United States Patent Application Publication US 2026/0337666 A1, published October 29, 2026 (application 19/460,486).

The application's sequence listing, which the Patent Office published only in electronic form, follows.

SEQUENCE LISTING (38661 sequences)

SEQ ID NO: 1 - DNA, 600 bp, Homo sapiens
  source 1..600: mol_type = unassigned DNA
aggtaggagtaacagtccctgacaccatcaccgagtggaaggcaggggccttctgcctgtctgaagatgctggacttggtatctcttccactgcctctctccgagccttccagcccttctttgtggagctcacaatgccttactctgtgattcgtggagaggccttcacactcaaggccacggtcctaaactaccttcccaaatgcatccgggtcagtgtgcagctggaagcctctcccgccttcctagctgtcccagtggagaaggaacaagcgcctcactgcatctgtgcaaacgggcggcaaactgtgtcctgggcagtaaccccaaagtcattaggaaatgtgaatttcactgtgagcgcagaggcactagagtctcaagagctgtgtgggactgaggtgccttcagttcctgaacacggaaggaaagacacagtcatcaagcctctgctgaaaagtgctttgctggagtcctgttctcagagctccacagaagacacgtgtttttgtatctttaaagacttgatgaataaacactttttctggtcaatgtctttccctgtttcctgttcattcaataaatatcattgtacatttc

SEQ ID NO: 2 - DNA, 729 bp, Homo sapiens
  source 1..729: mol_type = unassigned DNA
gtgtgctgtaggataataaagcttttcccccaaaaaacaggtgaatacttaaactaattcaaagagagaagaaagcttcctgaaaggtcatttaattgacttttgctttccaggtgtcaaatcagacactgagcttgttcttcacggttctgcaagatgtcccagtaagagatctgaaaccagccatagtgaaagtctatgattactacgagacggatgagtttgcaattgctgagtacaatgctccttgcagcaaaggtaagccactcacactcctccaaaaggcagtcagagctccttcagcttgccccccaaaccttctccttcataaaacgctgggtaaatatttgtcaaaaacatcaaattactcacactgcacattattatagaaaaacacatttattggagagggccgctgactctgtcaaacctcagagagtccataggattgcttatgggtaatgatttggaatagatttggtttcccactgtactgattaggtttccttgggcactatgctacccagaactaagggaaagaatactctctgctcatggagacccaaatctgtcttaattttttttctttccaatgtcacagatcttggaaatgcttgaagaccacaaggctgaaaagtgctttgctggagtcctgttctcagagctccacagaagacacgtgtttttgtatctttaaagacttgatgaataaacactttttctggtcaa

SEQ ID NO: 3 - DNA, 509 bp, Homo sapiens
  source 1..509: mol_type = unassigned DNA
gaacagagctatgtattggcattgacagaggtatatgcgttatgttagttatttaagaaataatctggagaatttatcatcccctctgagagatttctgcacaatttaattaaggaccctatagtgtgctgtaggataataaagcttttcccccaaaaaacaggtgaatacttaaactaattcaaagagagaagaaagcttcctgaaaggtcatttaattgacttttgctttccaggtgtcaaatcagacactgagcttgttcttcacggttctgcaagatgtcccagtaagagatctgaaaccagccatagtgaaagtctatgattactacgagacggatgagtttgcaattgctgagtacaatgctccttgcagcaaagatcttggaaatgcttgaagaccacaaggctgaaaagtgctttgctggagtcctgttctcagagctccacagaagacacgtgtttttgtatctttaaagacttgatgaataaacactttttctggtcaa

SEQ ID NO: 4 - DNA, 4844 bp, Homo sapiens
  source 1..4844: mol_type = unassigned DNA
gaaaagcttattagctgctgtacggtaaaagtgagctcttacgggaatgggaatgtagttttagccctccagggattctatttagcccgccaggaattaaccttgactataaataggccatcaatgacctttccagagaatgttcagagacctcaactttgtttagagatcttgtgtgggtggaacttcctgtttgcacacagagcagcataaagcccagttgctttgggaagtgtttgggaccagatggattgtagggagtagggtacaatacagtctgttctcctccagctccttctttctgcaacatggggaagaacaaactccttcatccaagtctggttcttctcctcttggtcctcctgcccacagacgcctcagtctctggaaaaccgcagtatatggttctggtcccctccctgctccacactgagaccactgagaagggctgtgtccttctgagctacctgaatgagacagtgactgtaagtgcttccttggagtctgtcaggggaaacaggagcctcttcactgacctggaggcggagaatgacgtactccactgtgtcgccttcgctgtcccaaagtcttcatccaatgaggaggtaatgttcctcactgtccaagtgaaaggaccaacccaagaatttaagaagcggaccacagtgatggttaagaacgaggacagtctggtctttgtccagacagacaaatcaatctacaaaccagggcagacagtgaaatttcgtgttgtctccatggatgaaaactttcaccccctgaatgagttgattccactagtatacattcaggatcccaaaggaaatcgcatcgcacaatggcagagtttccagttagagggtggcctcaagcaattttcttttcccctctcatcagagcccttccagggctcctacaaggtggtggtacagaagaaatcaggtggaaggacagagcaccctttcaccgtggaggaatttgttcttcccaagtttgaagtacaagtaacagtgccaaagataatcaccatcttggaagaagagatgaatgtatcagtgtgtggcctatacacatatgggaagcctgtccctggacatgtgactgtgagcatttgcagaaagtatagtgacgcttccgactgccacggtgaagattcacaggctttctgtgagaaattcagtggacagctaaacagccatggctgcttctatcagcaagtaaaaaccaaggtcttccagctgaagaggaaggagtatgaaatgaaacttcacactgaggcccagatccaagaagaaggaacagtggtggaattgactggaaggcagtccagtgaaatcacaagaaccataaccaaactctcatttgtgaaagtggactcacactttcgacagggaattcccttctttgggcaggtgcgcctagtagatgggaaaggcgtccctataccaaataaagtcatattcatcagaggaaatgaagcaaactattactccaatgctaccacggatgagcatggccttgtacagttctctatcaacaccaccaatgttatgggtacctctcttactgttagggtcaattacaaggatcgtagtccctgttacggctaccagtgggtgtcagaagaacacgaagaggcacatcacactgcttatcttgtgttctccccaagcaagagctttgtccaccttgagcccatgtctcatgaactaccctgtggccatactcagacagtccaggcacattatattctgaatggaggcaccctgctggggctgaagaagctctccttctattatctgataatggcaaagggaggcattgtccgaactgggactcatggactgcttgtgaagcaggaagacatgaagggccatttttccatctcaatccctgtgaagtcagacattgctcctgtcgctcggttgctcatctatgctgttttacctaccggggacgtgattggggattctgcaaaatatgatgttgaaaattgtctggccaacaaggtggatttgagcttcagcccatcacaaagtctcccagcctcacacgcccacctgcgagtcacagcggctcctcagtccgtctgcgccctccgtgctgtggaccaaagcgtgctgctcatgaagcctgatgctgagctctcggcgtcctcggtttacaacctgctaccagaaaaggacctcactggcttccctgggcctttgaatgaccaggacaatgaagactgcatcaatcgtcataatgtctatattaatggaatcacatatactccagtatcaagtacaaatgaaaaggatatgtacagcttcctagaggacatgggcttaaaggcattcaccaactcaaagattcgtaaacccaaaatgtgtccacagcttcaacagtatgaaatgcatggacctgaaggtctacgtgtaggtttttatgagtcagatgtaatgggaagaggccatgcacgcctggtgcatgttgaagagcctcacacggagaccgtacgaaagtacttccctgagacatggatctgggatttggtggtggtaaactcagcaggtgtggctgaggtaggagtaacagtccctgacaccatcaccgagtggaaggcaggggccttctgcctgtctgaagatgctggacttggtatctcttccactgcctctctccgagccttccagcccttctttgtggagctcacaatgccttactctgtgattcgtggagaggccttcacactcaaggccacggtcctaaactaccttcccaaatgcatccgggtcagtgtgcagctggaagcctctcccgccttcctagctgtcccagtggagaaggaacaagcgcctcactgcatctgtgcaaacgggcggcaaactgtgtcctgggcagtaaccccaaagtcattaggaaatgtgaatttcactgtgagcgcagaggcactagagtctcaagagctgtgtgggactgaggtgccttcagttcctgaacacggaaggaaagacacagtcatcaagcctctgttggttgaacctgaaggactagagaaggaaacaacattcaactccctactttgtccatcaggtggtgaggtttctgaagaattatccctgaaactgccaccaaatgtggtagaagaatctgcccgagcttctgtctcagttttgggagacatattaggctctgccatgcaaaacacacaaaatcttctccagatgccctatggctgtggagagcagaatatggtcctctttgctcctaacatctatgtactggattatctaaatgaaacacagcagcttactccagagatcaagtccaaggccattggctatctcaacactggttaccagagacagttgaactacaaacactatgatggctcctacagcacctttggggagcgatatggcaggaaccagggcaacacctggctcacagcctttgttctgaagacttttgcccaagctcgagcctacatcttcatcgatgaagcacacattacccaagccctcatatggctctcccagaggcagaaggacaatggctgtttcaggagctctgggtcactgctcaacaatgccataaagggaggagtagaagatgaagtgaccctctccgcctatatcaccatcgcccttctggagattcctctcacagtcactcaccctgttgtccgcaatgccctgttttgcctggagtcagcctggaagacagcacaagaaggggaccatggcagccatgtatataccaaagcactgctggcctatgcttttgccctggcaggtaaccaggacaagaggaaggaagtactcaagtcacttaatgaggaagctgtgaagaaagacaactctgtccattgggagcgccctcagaaacccaaggcaccagtggggcatttttacgaaccccaggctccctctgctgaggtggagatgacatcctatgtgctcctcgcttatctcacggcccagccagccccaacctcggaggacctgacctctgcaaccaacatcgtgaagtggatcacgaagcagcagaatgcccagggcggtttctcctccacccaggacacagtggtggctctccatgctctgtccaaatatggagcagccacatttaccaggactgggaaggctgcacaggtgactatccagtcttcagggacattttccagcaaattccaagtggacaacaacaaccgcctgttactgcagcaggtctcattgccagagctgcctggggaatacagcatgaaagtgacaggagaaggatgtgtctacctccagacatccttgaaatacaatattctcccagaaaaggaagagttcccctttgctttaggagtgcagactctgcctcaaacttgtgatgaacccaaagcccacaccagcttccaaatctccctaagtgtcagttacacagggagccgctctgcctccaacatggcgatcgttgatgtgaagatggtctctggcttcattcccctgaagccaacagtgaaaatgcttgaaagatctaaccatgtgagccggacagaagtcagcagcaaccatgtcttgatttaccttgataaggtgtcaaatcagacactgagcttgttcttcacggttctgcaagatgtcccagtaagagatctgaaaccagccatagtgaaagtctatgattactacgagacggatgagtttgcaattgctgagtacaatgctccttgcagcaaagatcttggaaatgcttgaagaccacaaggctgaaaagtgctttgctggagtcctgttctcagagctccacagaagacacgtgtttttgtatctttaaagacttgatgaataaacactttttctggtcaa

SEQ ID NO: 5 - DNA, 471 bp, Homo sapiens
  source 1..471: mol_type = unassigned DNA
caaactctcatttgtgaaagtggactcacactttcgacagggaattcccttctttgggcaggtgcgcctagtagatgggaaaggcgtccctataccaaataaagtcatattcatcagaggaaatgaagcaaactattactccaatgctaccacggatgagcatggccttgtacagttctctatcaacaccaccaatgttatgggtacctctcttactgttagggtcaattacaaggatcgtagtccctgttacggctaccagtgggtgtcagaagaacacgaagaggcacatcacactgcttatcttgtgttctccccaagcaagagctttgtccaccttgagcccatgtctcattgccagagctgcctggggaatacagcatgaaagtgacaggagaaggatgtgtctacctccagacatccttgaaatacaatattctcccagaaaaggaagagttcccctttgcttta

SEQ ID NO: 6 - DNA, 563 bp, Homo sapiens
  source 1..563: mol_type = unassigned DNA
ataaattactgaaaagatcattgaagaagaaattctgaaaatcacaggaaaccagtagcccatttttaagatatttatatattactgttgtattaaaggcggacaacttttcaggaggagtttaggtggtgaggtttctgaagaattatccctgaaactgccaccaaatgtggtagaagaatctgcccgagcttctgtctcagttttgggagacatattaggctctgccatgcaaaacacacaaaatcttctccagatgccctatggctgtggagagcagaatatggtcctctttgctcctaacatctatgtactggattatctaaatgaaacacagcagcttactccagagatcaagtccaaggccattggctatctcaacactggttaccagagacagttgaactacaaacactatgatggctcctacagcacctttggggagcgatatggcaggaaccagggcaacacctggctcacagcctttgttctgaagacttttgcccaagctcgagcctacatcttcatcgatgaagcacacattacccaagccctcatatggc

SEQ ID NO: 7 - DNA, 546 bp, Homo sapiens
  source 1..546: mol_type = unassigned DNA
cctctgttctccttccctctctactccctttcttatgtgtggtttcaggtcagtgtgcagctggaagcctctcccgccttcctagctgtcccagtggagaaggaacaagcgcctcactgcatctgtgcaaacgggcggcaaactgtgtcctgggcagtaaccccaaagtcattaggaaatgtgaatttcactgtgagcgcagaggcactagagtctcaagagctgtgtgggactgaggtgccttcagttcctgaacacggaaggaaagacacagtcatcaagcctctgttggttgaacctgaaggactagagaaggaaacaacattcaactccctactttgtccatcaggtggtgaggtttctgaagaattatccctgaaactgccaccaaatgtggtagaagaatctgcccgagcttctgtctcagttttgggtgagtctccagcccctagtggatccgggcattaacagcttctattatactatttttatttcccataaatatttactaaaaataatactataattttaacttctttcttctct

SEQ ID NO: 8 - DNA, 593 bp, Homo sapiens
  source 1..593: mol_type = unassigned DNA
aatggaggcaccctgctggggctgaagaagctctccttctattatctgataatggcaaagggaggcattgtccgaactgggactcatggactgcttgtgaagcaggaagacatgaagggccatttttccatctcaatccctgtgaagtcagacattgctcctgtcgctcggtttacaacctgctaccagaaaaggacctcactggcttccctgggcctttgaatgaccaggacaatgaagactgcatcaatcgtcataatgtctatattaatggaatcacatatactccagtatcaagtacaaatgaaaaggatatgtacagcttcctagaggacatgggcttaaaggcattcaccaactcaaagattcgtaaacccaaaatgtgtccacagcttcaacagtatgaaatgcatggacctgaaggtctacgtgtaggtttttatgagtcagatgtaatgggaagaggccatgcacgcctggtgcatgttgaagagcctcacacggagaccgtacgaaagtacttccctgagacatggatctgggatttggtggtggtaaactcagcaggtgtggctgaggtaggagtaacagtc

SEQ ID NO: 9 - DNA, 692 bp, Homo sapiens
  source 1..692: mol_type = unassigned DNA
agcccatgtctcatgaactaccctgtggccatactcagacagtccaggcacattatattctgaatggaggcaccctgctggggctgaagaagctctccttctattatctgataatggcaaagggaggcattgtccgaactgggactcatggactgcttgtgaagcaggaagacatgaagggccatttttccatctcaatccctgtgaagtcagacattgctcctgtcgctcggttgctcatctatgctgttttacctaccggggacgtgattggggattctgcaaaatatgatgttgaaaattgtctggccaacaaggtggatttgagcttcagcccatcacaaagtctcccagcctcacacgcccacctgcgagtcacagcggctcctcagtccgtctgcgccctccgtgctgtggaccaaagcgtgctgctcatgaagcctgatgctgagctctcggcgtcctcggtgagttcctggcagcctcaggaatcaagaagggccgtgccaggggctcagagcaaggaaaaatgactggataagtaggataagatcaattaaaattatatttatctaggaattaattgctttgagctctcttgtgggctttcattggtaaggaattatatatatatatatatataactactcacttctgcagttaaaaaaataaacaaaatacaatatattgaa

SEQ ID NO: 10 - DNA, 590 bp, Homo sapiens
  source 1..590: mol_type = unassigned DNA
ctttctgcaacatggggaagaacaaactccttcatccaagtctggttcttctcctcttggtcctcctgcccacagacgcctcagtctctggaaaaccgcagtatatggttctggtcccctccctgctccacactgagaccactgagaagggctgtgtccttctgagctacctgaatgagacagtgactgtaagtgcttccttggagtctgtcaggggaaacaggagcctcttcactgacctggaggcggagaatgacgtactccactgtgtcgccttcgcttgaaatttcgtgttgtctccatggatgaaaactttcaccccctgaatgagttgattccactagtatacattcaggatcccaaaggaaatcgcatcgcacaatggcagagtttccagttagagggtggcctcaagcaattttcttttcccctctcatcagagcccttccagggctcctacaaggtggtggtacagaagaaatcaggtggaaggacagagcaccctttcaccgtggaggaatttgttcttcccaagtttgaagtacaagtaacagtgccaaagataatcaccatcttggaagaagagatga

SEQ ID NO: 11 - DNA, 623 bp, Homo sapiens
  source 1..623: mol_type = unassigned DNA
atacaagagatgtgagaagcaccataaaaggcgttgtgaggagttgtgggggagtgagggagagaagaggttgaaaagcttattagctgctgtacggtaaaactccttctttctgcaacatggggaagaacaaactccttcatccaagtctggttcttctcctcttggtcctcctgcccacagacgcctcagtctctggaaaaccgcagtatatggttctggtcccctccctgctccacactgagaccactgagaagggctgtgtccttctgagctacctgaatgagacagtgactgtaagtgcttccttggagtctgtcaggggaaacaggagcctcttcactgacctggaggcggagaatgacgtactccactgtgtcgccttcgctgtcccaaagtcttcatccaatgaggaggtaatgttcctcactgtccaagtgaaaggaccaacccaagaatttaagaagcggaccacagtgatggttaagaacgaggacagtctggtctttgtccagacagacaaatcaatctacaaaccagggcagacagtgaaatttcgtgttgtctccatggatgaaaactttcaccccctgaatgagttgattccactagtatacattcag

SEQ ID NO: 12 - DNA, 533 bp, Homo sapiens
  source 1..533: mol_type = unassigned DNA
ttaaccttgactataaataggccatcaatgacctttccagagaatgttcagagacctcaactttgtttagagatcttgtgtgggtggaacttcctgtttgcacacagagcagcataaagcccagttgctttgggaagtgtttgggaccagatggattgtagggagtagggtacaatacagtctgttctcctccagctccttctttctgcaacatggggaagaacaaactccttcatccaagtctggttcttctcctcttggtcctcctgcccacagacgcctcagtctctggaaaaccgcagtatatggttctggtcccctccctgctccacactgagaccactgagaagggctgtgtccttctgagctacctgaatgagacagtgactgtaagtgcttccttggagtctgtcaggggaaacaggagcctcttcactgacctggaggcggagaatgacgtactccactgtgtcgccttcgctaagtgattcctgtccatgccaactttccctgctgagaacaagggagtgaag

SEQ ID NO: 13 - DNA, 533 bp, Homo sapiens
  source 1..533: mol_type = unassigned DNA
tgttcagagacctcaactttgtttagagatcttgtgtgggtggaacttcctgtttgcacacagagcagcataaagcccagttgctttgggaagtgtttgggaccagatggattgtagggagtagggtacaatacagtctgttctcctccagctccttctttctgcaacatggggaagaacaaactccttcatccaagtctggttcttctcctcttggtcctcctgcccacagacgcctcagtctctggaaaaccggtccattttctattttataaaaataaagacaattctctcccacaaccaaacatggaacaatgccctggagtataaaaatctatagagtgccaaataaaggaacaatttgaaatactggtgttgatattgaaaaagcaagggactctaatgtcagaagagaaatccttttgcagatgaggtggtgatgaattctttgtttcaacacaactgaaggaggaactgaaggaaataccagctgatgagtgatgagaagggattcttgataatagagtactagg

SEQ ID NO: 14 - DNA, 2331 bp, Homo sapiens
  source 1..2331: mol_type = unassigned DNA
ctttcttgatgccgttacgtccatggatttttttccaggattaaatttggaaggctatcctaacagagacagtacgaaatatgctgagatttatggcatttcttctgctcacactttgttgcgggggacactgagatataagggattggaatgctgaataatggattggaatgttgaataatgttgaataccttcctatggtatcctccctaactccttccccttgaaccacccagccccatctatggatatatgaaagctttgaatggatttgtaaaattaggtcttataaacagagaagcgcttcctgcctttagacctgaggccaaccctctcacctggaaacaactcctctgtgacctagttgggatttcaccctcctctgagcatgatgtgttgaaggaagctgttcttaagaaactaggaggagacaatacccagttggaggctgctgaatggtaggcacccaccactcaacttagagcaaaatatactggatcaatgattgctaatttctactcagaaaaagttaaatattttacatttgtctttgattaattcgttgctctaatgtgggtagagagattaccatgtgccatgttcatgtgggcataaagagtagataaagagaggagctcaatggcaattagaatttgagaaatgcttatctcgaaacactttaccactcagttcccaagcatagtggggtatttttgctttcctgtaggagatttggagtagtcatagaatattacatgaaaacattctttcatatgaccgctgtggcatcctgctggtatacctaatgttggagaactaacctataaattaatctcataaagatctttgtaagaacatgggattacaatccatcatctctgccctgctccagggagcagtgcctgggtgagtctggagaagattctgaaggttaaaacattgctattgttattgttattttacattttaggagaatcctacaacttgagttaccaccttgtaattctgccctttcaagattaaattcaaggagctcccttttgcttcccaaatgagaacatgtataggacttgaactaatgcagccatctcctgtgcttttcaggttgggcttacttggggatgaacaagttcctcaggcagagtccattctggatgccctctccaagcatttggtcatgaagctttcctatggtcctgaagaaaaagatatgattgtgatgagagacagctttggaatcagacatccttctggacatttagaacataaaacgattgatcttgtggcttatggggacatcaatggcttttcagccatggctaaaaccgtggggttacccaccgccatggcagccaaaatgttgcttgatggtgaaattggagccaaaggcctaatggggcccttttcaaaggagatctatggaccaatattggagcgaattaaagcagaaggcattatatatactacacagagtacaattaaaccataattgggaattatattttgtttttttcttcccaggcaatacacctctgaacatgtgtgtgataaatgggtttgctaatgtgctgttttaaagtataaagcataatatgttttggttaacacaatgtactttttgaactataaatctttattttaatatggaaatgtttggaacaggagatgcaagccactaacagagaactttaataattctaccctgtattttataaatacgtatgtgaaagtgatgatcatgctatttgttaatttattgtgccactttttttcttttgttttttttttgttgttgttgttttttgagatggagtctcgctctgtcacccaggctggagtgcagtggcgcgatctcggctcactgcaagctccgcctcctgggttcacgccattctcctgcctcagcctcccaagtagctgggactacaggcacccgccaccacgcccggctaaattttttgtatttttcagtagagacggggtttcaccatgttagccaggatgtccacttttttcttaaatgaacatattgtcttataaccagcaaatgaagttttacttttttagtcagaaaaaatttcgtcataaagctatatttttatatttttaaaattgatacagttagataccttcagattacctaagttaagtttttgccaaaatgctattttatgccctttttgtaaagttatgatttattttgtaaatatagttccttatagttttctcttgagtgtttggacatgagaatagataagattaaattacaatttacaagatcacttcattaggcacaggaaaagtatttaacaaaattcaacaccctttcac

SEQ ID NO: 15 - DNA, 3233 bp, Homo sapiens
  source 1..3233: mol_type = unassigned DNA
cctcagatttctcaggagaccagaactgatctgccagccttgctgccttttgttgctctgctctttacattgtctttacagtcaccaggtgtcaagatgctgcaagtacataggactggactgggcaggctgggggtcagcctctccaagggtcttcaccacaaagctgtgttggccgtccggagggaggatgtgaacgcctgggagagaagggccccgctagctcccaagcacatcaaaggcatcaccaatctgggatacaaggtcttgatacagccttcgaatcggcgggccattcatgataaggactatgtcaaagctggtggcattcttcaggaggatatttctgaagcttgtctaattttaggagttaaaagacctccagaggaaaaattaatgtccaggaagacttatgcatttttctcccacacaataaaagctcaggaggccaatatgggcttgttggatgagattctaaaacaggaaattcgccttattgattatgagaaaatggtggatcatagaggagtacgggtagtggcatttggacagtgggctggtgtggcaggaatgatcaacattttacatggaatgggtttaaggctccttgctttgggacatcacacaccttttatgcacattggcatggctcataactacaggaatagcagtcaggctgtgcaagctgtccgtgatgctggctatgaaatatctttgggtttgatgcctaagtcaataggacccttaacatttgtgttcacaggaactggtaatgtttctaagggagcccaagcaatctttaatgagctaccttgtgaatatgtggagccccatgaattaaaagaagtttcccaaactggagacctcagaaaagtgtatgggacggtgttaagtcgtcatcatcatcttgtcaggaaaacagatgctgtgtatgatcctgcagagtatgacaaacatccggagcgctacataagtcgttttaatactgatattgcaccctatacaacttgcttaattaatggaatctactgggaacaaaacactcctcgcctcctaacccgccaagatgctcagagtctcctggctccgggcaagttctcacctgctggtgtggaaggctgccctgcattaccacacaaactcgtggcaatatgtgacatttcagctgacacaggagggtctatagagtttatgactgagtgtacaacaatagagcatcccttttgcatgtatgatgcagaccagcatattattcatgacagtgttgaaggctcggggatcctgatgtgttccattgacaatttgccggcacagctcccaattgaagctacagaatgctttggagacatgctttacccttatgttgaagaaatgatattatcagacgcgacacagcctcttgaaagtcagaatttttctcctgtggtgagagatgcagtgattacatccaacggtacattacctgataaatataaatatatccagacactccgggagagcagggaacgtgctcagtcactttcaatgggcaccaggagaaaggttttggttcttggatctggctacatatctgagcctgtattagaatatttatcaagagatggcaatatagaaataacagtaggatctgacatgaagaatcaaattgaacagttaggcaagaaatataatattaatcctgttagcatggacatttgtaaacaagaagagaagctgggcttcttggtggcaaaacaggatcttgtcatcagcttgttgccttatgtattgcaccctcttgtggccaaggcctgcatcacaaacaaagttaacatggtcactgcaagctacatcacaccagcactaaaagaattggaaaagagtgtggaagatgctggcatcacaatcattggtgaattgggattggaccctggtctggatcacatgttagcaatggaaacaatagataaagccaaggaagtgggagccacgattgaatcatatatttcctactgtggtgggcttccagcccctgaacattcaaacaatccattgagatataaatttagctggagtccagtgggagttttgatgaatgtaatgcagtctgccacctatctgctcgatggaaaggttgtgaatgttgcaggaggcatctcctttcttgatgccgttacgtccatggatttttttccaggattaaatttggaaggctatcctaacagagacagtacgaaatatgctgagatttatggcatttcttctgctcacactttgttgcgggggacactgagatataagggatatatgaaagctttgaatggatttgtaaaattaggtcttataaacagagaagcgcttcctgcctttagacctgaggccaaccctctcacctggaaacaactcctctgtgacctagttgggatttcaccctcctctgagcatgatgtgttgaaggaagctgttcttaagaaactaggaggagacaatacccagttggaggctgctgaatggttgggcttacttggggatgaacaagttcctcaggcagagtccattctggatgccctctccaagcatttggtcatgaagctttcctatggtcctgaagaaaaagatatgattgtgatgagagacagctttggaatcagacatccttctggacatttagaacataaaacgattgatcttgtggcttatggggacatcaatggcttttcagccatggctaaaaccgtggggttacccaccgccatggcagccaaaatgttgcttgatggtgaaattggagccaaaggcctaatggggcccttttcaaaggagatctatggaccaatattggagcgaattaaagcagaaggcattatatatactacacagagtacaattaaaccataattgggaattatattttgtttttttcttcccaggcaatacacctctgaacatgtgtgtgataaatgggtttgctaatgtgctgttttaaagtataaagcataatatgttttggttaacacaatgtactttttgaactataaatctttattttaatatggaaatgtttggaacaggagatgcaagccactaacagagaactttaataattctaccctgtattttataaatacgtatgtgaaagtgatgatcatgctatttgttaatttattgtgccactttttttcttttgttttttttttgttgttgttgttttttgagatggagtctcgctctgtcacccaggctggagtgcagtg

SEQ ID NO: 16 - DNA, 1816 bp, Homo sapiens
  source 1..1816: mol_type = unassigned DNA
catcccagtttcttctaggaattcggagcctcccctgcagcgactcggaagattcgaggcggcgggggacaagtcggcgccccagagcggacgagatattatcagacgcgacacagcctcttgaaagtcagaatttttctcctgtggtgagagatgcagtgattacatccaacggtacattacctgataaatataaatatatccagacactccgggagagcaggatctgacatgaagaatcaaattgaacagttaggcaagaaatataatattaatcctgttagcatggacatttgtaaacaagaagagaagctgggcttcttggtggcaaaacaggatcttgtcatcagcttgttgccttatgtattgcaccctcttgtggccaaggcctgcatcacaaacaaagttaacatggtcactgcaagctacatcacaccagcactaaaagaattggaaaagagtgtggaagatgctggcatcacaatcattggtgaattgggattggaccctggtctggatcacatgttagcaatggaaacaatagataaagccaaggaagtgggagccacgattgaatcatatatttcctactgtggtgggcttccagcccctgaacattcaaacaatccattgagatataaatttagctggagtccagtgggagttttgatgaatgtaatgcagtctgccacctatctgctcgatggaaaggttgtgaatgttgcaggaggcatctcctttcttgatgccgttacgtccatggatttttttccaggattaaatttggaaggctatcctaacagagacagtacgaaatatgctgagatttatggcatttcttctgctcacactttgttgcgggggacactgagatataagggatatatgaaagctttgaatggatttgtaaaattaggtcttataaacagagaagcgcttcctgcctttagacctgaggccaaccctctcacctggaaacaactcctctgtgacctagttgggatttcaccctcctctgagcatgatgtgttgaaggaagctgttcttaagaaactaggaggagacaatacccagttggaggctgctgaatggttgggcttacttggggatgaacaagttcctcaggcagagtccattctggatgccctctccaagcatttggtcatgaagctttcctatggtcctgaagaaaaagatatgattgtgatgagagacagctttggaatcagacatccttctggacatttagaacataaaacgattgatcttgtggcttatggggacatcaatggcttttcagccatggctaaaaccgtggggttacccaccgccatggcagccaaaatgttgcttgatggtgaaattggagccaaaggcctaatggggcccttttcaaaggagatctatggaccaatattggagcgaattaaagcagaaggcattatatatactacacagagtacaattaaaccataattgggaattatattttgtttttttcttcccaggcaatacacctctgaacatgtgtgtgataaatgggtttgctaatgtgctgttttaaagtataaagcataatatgttttggttaacacaatgtactttttgaactataaatctttattttaatatggaaatgtttggaacaggagatgcaagccactaacagagaactttaataattctaccctgtattttataaatacgtatgtgaaagtgatgatcatgctatttgttaatttattgtgccactttttttcttttgttttttttttgttgttgttgttttttgagatggagtctcgctctgtcaccc

SEQ ID NO: 17 - DNA, 3163 bp, Homo sapiens
  source 1..3163: mol_type = unassigned DNA
aaacacctcctacttcccggccttccatcccagtttcttctaggaattcggagcctcccctgcagcgactcggaagattcgaggcggcgggggacaagtcggcgccccagagcggacgagtcaccaggtgtcaagatgctgcaagtacataggactggactgggcaggctgggggtcagcctctccaagggtcttcaccacaaagctgtgttggccgtccggagggaggatgtgaacgcctgggagagaagggccccgctagctcccaagcacatcaaaggcatcaccaatctgggatacaaggtcttgatacagccttcgaatcggcgggccattcatgataaggactatgtcaaagctggtggcattcttcaggaggatatttctgaagcttgtctaattttaggagttaaaagacctccagaggaaaaattaatgtccaggaagacttatgcatttttctcccacacaataaaagctcaggaggccaatatgggcttgttggatgagattctaaaacaggaaattcgccttattgattatgagaaaatggtggatcatagaggagtacgggtagtggcatttggacagtgggctggtgtggcaggaatgatcaacattttacatggaatgggtttaaggctccttgctttgggacatcacacaccttttatgcacattggcatggctcataactacaggaatagcagtcaggctgtgcaagctgtccgtgatgctggctatgaaatatctttgggtttgatgcctaagtcaataggacccttaacatttgtgttcacaggaactggtaatgtttctaagggagcccaagcaatctttaatgagctaccttgtgaatatgtggagccccatgaattaaaagaagtttcccaaactggagacctcagaaaagtgtatgggacggtgttaagtcgtcatcatcatcttgtcaggaaaacagatgctgtgtatgatcctgcagagtatgacaaacatccggagcgctacataagtcgttttaatactgatattgcaccctatacaacttgcttaattaatggaatctactgggaacaaaacactcctcgcctcctaacccgccaagatgctcagagtctcctggctccgggcaagttctcacctgctggtgtggaaggctgccctgcattaccacacaaactcgtggcaatatgtgacatttcagctgacacaggagggtctatagagtttatgactgagtgtacaacaatagagcatcccttttgcatgtatgatgcagaccagcatattattcatgacagtgttgaaggctcggggatcctgatgtgttccattgacaatttgccggcacagctcccaattgaagctacagaatgctttggagacatgctttacccttatgttgaagaaatgatattatcagacgcgacacagcctcttgaaagtcagaatttttctcctgtggtgagagatgcagtgattacatccaacggtacattacctgataaatataaatatatccagacactccgggagagcagggaacgtgctcagtcactttcaatgggcaccaggagaaaggttttggttcttggatctggctacatatctgagcctgtattagaatatttatcaagagatggcaatatagaaataacagtaggatctgacatgaagaatcaaattgaacagttaggcaagaaatataatattaatcctgttagcatggacatttgtaaacaagaagagaagctgggcttcttggtggcaaaacaggatcttgtcatcagcttgttgccttatgtattgcaccctcttgtggccaaggcctgcatcacaaacaaagttaacatggtcactgcaagctacatcacaccagcactaaaagaattggaaaagagtgtggaagatgctggcatcacaatcattggtgaattgggattggaccctggtctggatcacatgttagcaatggaaacaatagataaagccaaggaagtgggagccacgattgaatcatatatttcctactgtggtgggcttccagcccctgaacattcaaacaatccattgagatataaatttagctggagtccagtgggagttttgatgaatgtaatgcagtctgccacctatctgctcgatggaaaggttgtgaatgttgcaggaggcatctcctttcttgatgccgttacgtccatggatttttttccaggattaaatttggaaggctatcctaacagagacagtacgaaatatgctgagatttatggcatttcttctgctcacactttgttgcgggggacactgagatataagggatatatgaaagctttgaatggatttgtaaaattaggtcttataaacagagaagcgcttcctgcctttagacctgaggccaaccctctcacctggaaacaactcctctgtgacctagttgggatttcaccctcctctgagcatgatgtgttgaaggaagctgttcttaagaaactaggaggagacaatacccagttggaggctgctgaatggttgggcttacttggggatgaacaagttcctcaggcagagtccattctggatgccctctccaagcatttggtcatgaagctttcctatggtcctgaagaaaaagatatgattgtgatgagagacagctttggaatcagacatccttctggacatttagaacataaaacgattgatcttgtggcttatggggacatcaatggcttttcagccatggctaaaaccgtggggttacccaccgccatggcagccaaaatgttgcttgatggtgaaattggagccaaaggcctaatggggcccttttcaaaggagatctatggaccaatattggagcgaattaaagcagaaggcattatatatactacacagagtacaattaaaccataattgggaattatattttgtttttttcttcccaggcaatacacctctgaacatgtgtgtgataaatgggtttgctaatgtgctgttttaaagtataaagcataatatgttttggttaacacaatgtactttttgaactataaatctttattttaatatggaaatgtttggaacaggagatgcaagccactaacagagaactttaataattctaccctgtattttataaatacgtatgtgaaagtgatga

SEQ ID NO: 18 - DNA, 2922 bp, Homo sapiens
  source 1..2922: mol_type = unassigned DNA
gctgccttttgttgctctgctctttacattgtctttacagtcaccaggtgtcaagatgctgcaagtacataggactggactgggcaggctgggggtcagcctctccaagggtcttcaccacaaagctgtgttggccgtccggagggaggatgtgaacgcctgggagagaagggccccgctagctcccaagcacatcaaaggcatcaccaatctgggatacaaggtcttgatacagccttcgaatcggcgggccattcatgataaggactatgtcaaagctggtggcattcttcaggaggatatttctgaagcttgtctaattttaggagttaaaagacctccagaggaaaaattaatgtccaggaagacttatgcatttttctcccacacaataaaagctcaggaggccaatatgggcttgttggatgagattctaaaacaggaaattcgccttattgattatgagaaaatggtggatcatagaggagtacgggtagtggcatttggacagtgggctggtgtggcaggaatgatcaacattttacatggaatgggtttaaggctccttgctttgggacatcacacaccttttatgcacattggcatggctcataactacaggaatagcagtcaggctgtgcaagctgtccgtgatgctggctatgaaatatctttgggtttgatgcctaagtcaataggacccttaacatttgtgttcacaggaactggtaatgtttctaagggagcccaagcaatctttaatgagctaccttgtgaatatgtggagccccatgaattaaaagaagtttcccaaactggagacctcagaaaagtgtatgggacggtgttaagtcgtcatcatcatcttgtcaggaaaacagatgctgtgtatgatcctgcagagtatgacaaacatccggagcgctacataagtcgttttaatactgatattgcaccctatacaacttgcttaattaatggaatctactgggaacaaaacactcctcgcctcctaacccgccaagatgctcagagtctcctggctccgggcaagttctcacctgctggtgtggaaggctgccctgcattaccacacaaactcgtggcaatatgtgacatttcagctgacacaggagggtctatagagtttatgactgagtgtacaacaatagagcatcccttttgcatgtatgatgcagaccagcatattattcatgacagtgttgaaggctcggggatcctgatgtgttccattgacaatttgccggcacagctcccaattgaagctacagaatgctttggagacatgctttacccttatgttgaagaaatgatattatcagacgcgacacagcctcttgaaagtcagaatttttctcctgtggtgagagatgcagtgattacatccaacggtacattacctgataaatataaatatatccagacactccgggagagcagggaacgtgctcagtcactttcaatgggcaccaggagaaaggttttggttcttggatctggctacatatctgagcctgtattagaatatttatcaagagatggcaatatagaaataacagatctgacatgaagaatcaaattgaacagttaggcaagaaatataatattaatcctgttagcatggacatttgtaaacaagaagagaagctgggcttcttggtggcaaaacaggatcttgtcatcagcttgttgccttatgtattgcaccctcttgtggccaaggcctgcatcacaaacaaagttaacatggtcactgcaagctacatcacaccagcactaaaagaattggaaaagagtgtggaagatgctggcatcacaatcattggtgaattgggattggaccctggtctggatcacatgttagcaatggaaacaatagataaagccaaggaagtgggagccacgattgaatcatatatttcctactgtggtgggcttccagcccctgaacattcaaacaatccattgagatataaatttagctggagtccagtgggagttttgatgaatgtaatgcagtctgccacctatctgctcgatggaaaggttgtgaatgttgcaggaggcatctcctttcttgatgccgttacgtccatggatttttttccaggattaaatttggaaggctatcctaacagagacagtacgaaatatgctgagatttatggcatttcttctgctcacactttgttgcgggggacactgagatataagaaacaactcctctgtgacctagttgggatttcaccctcctctgagcatgatgtgttgaaggaagctgttcttaagaaactaggaggagacaatacccagttggaggctgctgaatggttgggcttacttggggatgaacaagttcctcaggcagagtccattctggatgccctctccaagcatttggtcatgaagctttcctatggtcctgaagaaaaagatatgattgtgatgagagacagctttggaatcagacatccttctggacatttagaacataaaacgattgatcttgtggcttatggggacatcaatggcttttcagccatggctaaaaccgtggggttacccaccgccatggcagccaaaatgttgcttgatggtgaaattggagccaaaggcctaatggggcccttttcaaaggagatctatggaccaatattggagcgaattaaagcagaaggcattatatatactacacagagtacaattaaaccataattgggaattatattttgtttttttcttcccaggcaatacacctctgaacatgtgtgtgataaatgggtttgctaatgtgctgttttaaagtataaagcataatatgttttggttaacacaatgtactttttgaactataaatctttattttaatatggaaatgtttggaacaggagatgcaagcca

SEQ ID NO: 19 - DNA, 3126 bp, Homo sapiens
  source 1..3126: mol_type = unassigned DNA
gctgccttttgttgctctgctctttacattgtctttacagtcaccaggtgtcaagatgctgcaagtacataggactggactgggcaggctgggggtcagcctctccaagggtcttcaccacaaagctgtgttggccgtccggagggaggatgtgaacgcctgggagagaagggccccgctagctcccaagcacatcaaaggcatcaccaatctgggatacaaggtcttgatacagccttcgaatcggcgggccattcatgataaggactatgtcaaagctggtggcattcttcaggaggatatttctgaagcttgtctaattttaggagttaaaagacctccagaggaaaaattaatgtccaggaagacttatgcatttttctcccacacaataaaagctcaggaggccaatatgggcttgttggatgagattctaaaacaggaaattcgccttattgattatgagaaaatggtggatcatagaggagtacgggtagtggcatttggacagtgggctggtgtggcaggaatgatcaacattttacatggaatgggtttaaggctccttgctttgggacatcacacaccttttatgcacattggcatggctcataactacaggaatagcagtcaggctgtgcaagctgtccgtgatgctggctatgaaatatctttgggtttgatgcctaagtcaataggacccttaacatttgtgttcacaggaactggtaatgtttctaagggagcccaagcaatctttaatgagctaccttgtgaatatgtggagccccatgaattaaaagaagtttcccaaactggagacctcagaaaagtgtatgggacggtgttaagtcgtcatcatcatcttgtcaggaaaacagatgctgtgtatgatcctgcagagtatgacaaacatccggagcgctacataagtcgttttaatactgatattgcaccctatacaacttgcttaattaatggaatctactgggaacaaaacactcctcgcctcctaacccgccaagatgctcagagtctcctggctccgggcaagttctcacctgctggtgtggaaggctgccctgcattaccacacaaactcgtggcaatatgtgacatttcagctgacacaggagggtctatagagtttatgactgagtgtacaacaatagagcatcccttttgcatgtatgatgcagaccagcatattattcatgacagtgttgaaggctcggggatcctgatgtgttccattgacaatttgccggcacagctcccaattgaagctacagaatgctttggagacatgctttacccttatgttgaagaaatgatattatcagacgcgacacagcctcttgaaagtcagaatttttctcctgtggtgagagatgcagtgattacatccaacggtacattacctgataaatataaatatatccagacactccgggagagcagggaacgtgctcagtcactttcaatgggcaccaggagaaaggttttggttcttggatctggctacatatctgagcctgtattagaatatttatcaagagatggcaatatagaaataacagtaggatctgacatgaagaatcaaattgaacagttaggcaagaaatataatattaatcctgttagcatggacatttgtaaacaagaagagaagctgggcttcttggtggcaaaacaggatcttgtcatcagcttgttgccttatgtattgcaccctcttgtggccaaggcctgcatcacaaacaaagttaacatggtcactgcaagctacatcacaccagcactaaaagaattggaaaagagtgtggaagatgctggcatcacaatcattggtgaattgggattggaccctggtctggatcacatgttagcaatggaaacaatagataaagccaaggaagtgggagccacgattgaatcatatatttcctactgtggtgggcttccagcccctgaacattcaaacaatccattgagatataaatttagctggagtccagtgggagttttgatgaatgtaatgcagtctgccacctatctgctcgatggaaaggttgtgaatgttgcaggaggcatctcctttcttgatgccgttacgtccatggatttttttccaggattaaatttggaaggctatcctaacagagacagtacgaaatatgctgagatttatggcatttcttctgctcacactttgttgcgggggacactgagatataagggattggaatgctgaataatggattggaatgttgaataatgttgaataccttcctatggtatcctccctaactccttccccttgaaccacccagccccatctatggatatatgaaagctttgaatggatttgtaaaattaggtcttataaacagagaagcgcttcctgcctttagacctgaggccaaccctctcacctggaaacaactcctctgtgacctagttgggatttcaccctcctctgagcatgatgtgttgaaggaagctgttcttaagaaactaggaggagacaatacccagttggaggctgctgaatggttgggcttacttggggatgaacaagttcctcaggcagagtccattctggatgccctctccaagcatttggtcatgaagctttcctatggtcctgaagaaaaagatatgattgtgatgagagacagctttggaatcagacatccttctggacatttagaacataaaacgattgatcttgtggcttatggggacatcaatggcttttcagccatggctaaaaccgtggggttacccaccgccatggcagccaaaatgttgcttgatggtgaaattggagccaaaggcctaatggggcccttttcaaaggagatctatggaccaatattggagcgaattaaagcagaaggcattatatatactacacagagtacaattaaaccataattgggaattatattttgtttttttcttcccaggcaatacacctctgaacatgtgtgtgataaatgggtttgctaatgtgctgttttaaagtataaagcataatatgttttggttaacacaatgtactttttgaactataaatctttattttaatatggaaatgtttggaacaggagatgcaagcca

SEQ ID NO: 20 - DNA, 722 bp, Homo sapiens
  source 1..722: mol_type = unassigned DNA
tggattggaatgttgaataatgttgaataccttcctatggtatcctccctaactccttccccttgaaccacccagccccatctatggatatatgaaagctttgaatggatttgtaaaattaggtcttataaacagagaagcgcttcctgcctttagacctgaggccaaccctctcacctggttgggatttcaccctcctctgagcatgatgtgttgaaggaagctgttcttaagaaactaggaggagacaatacccagttggaggctgctgaatggagatttggagtagtcatagaatattacatgaaaacattctttcatatgaccgctgtggcatcctgctggtatacctaatgttggagaactaacctataaattaatctcataaagatctttgtaagaacatgggattacaatccatcatctctgccctgctccagggagcagtgcctgggttgggcttacttggggatgaacaagttcctcaggcagagtccattctggatgccctctccaagcatttggtcatgaagctttcctatggtcctgaagaaaaagatatgattgtgatgagagacagctttggaatcagacatccttctggacatttagaacataaaacgattgatcttgtggcttatggggacatcaatggcttttcagccatggctaaaaccgtggggttacccaccgccatggcagccaaaatgttgcttgatggt

SEQ ID NO: 21 - DNA, 5257 bp, Homo sapiens
  source 1..5257: mol_type = unassigned DNA
atgcccgccggccgctggcccggccatgtcgtcgtccttcttcaaccccagcttcgccttcagctcgcacttcgaccccgacggcgccccgctcagcgagctgtcctggccatcctccctcgccgtggtggctgtgtctttctccgggctcttcgccgtcatcgtcctcatgctggcctgcctgtgctgtaagaagggcggtatcgggttcaaggagtttgagaatgcggagggggacgagtacgcagccgacctggcgcagggctccccggccacggcagcacagaacgggcccgacgtgtacgtcctgccactcacggaggtctccttgcccatggccaagcagcctgggcgctcagtgcagctcctcaagtccacagacgtgggccggcacagcctcctgtacctgaaggaaatcggccgtggctggttcgggaaggtgttcctgggggaggtgaactctggcatcagcagtgcccaggtggtggtgaaggagctgcaggctagtgccagcgtgcaggagcagatgcagttcctggaggaggtgcagccctacagggccctgaagcacagcaacctgctccagtgcctggcccagtgcgccgaggtgacgccctacctgctggtgatggagttctgcccactgggggacctcaagggctacctgcggagctgccgggtggcggagtccatggctcccgacccccggaccctgcagcgcatggcctgtgaggtggcctgtggcgtcctgcaccttcatcgcaacaatttcgtgcacagcgacctggccctgcggaactgcctgctcacggctgacctgacggtgaagattggtgactatggcctggctcactgcaagtacagagaggactacttcgtgactgccgaccagctgtgggtgcctctgcgctggatcgcgccagagctggtggacgaggtgcatagcaacctgctcgtcgtggaccagaccaagagcgggaatgtgtggtccctgggcgtgaccatctgggagctctttgagctgggcacgcagccctatccccagcactcggaccagcaggtgctggcgtacacggtccgggagcagcagctcaagctgcccaagccccagctgcagctgaccctgtcggaccgctggtacgaggtgatgcagttctgctggctgcagcccgagcagcggcccacagccgaggaggtgcacctgctgctgtcctacctgtgtgccaagggcgccaccgaagcagaggaggagtttgaacggcgctggcgctctctgcggcccggcgggggcggcgtggggcccgggcccggtgcggcggggcccatgctgggcggcgtggtggagctcgccgctgcctcgtccttcccgctgctggagcagttcgcgggcgacggcttccacgcggacggcgacgacgtgctgacggtgaccgagaccagccgaggcctcaattttgagtacaagtgggaggcgggccgcggcgcggaggccttcccggccacgctgagccctggccgcaccgcacgcctgcaggagctgtgcgcccccgacggcgcgcccccgggcgtggttccggtgctcagcgcgcacagcccgtcgctgggcagcgagtacttcatccgcctagaggaggccgcacccgccgccggccacgaccctgactgcgccggctgcgcccccagtccacctgccaccgcggaccaggacgacgactctgacggcagcaccgccgcctcgctggccatggagccgctgctgggccacgggccacccgtcgacgtcccctggggccgcggcgaccactaccctcgcagaagcttggcgcgggacccgctctgcccctcacgctctccctcgccctcggcggggcccctgagtctggcggagggaggagcggaggatgcagactggggcgtggccgccttctgtcctgccttcttcgaggacccactgggcacgtcccctttggggagctcaggggcgcccccgctgccgctgactggcgaggatgagctagaggaggtgggagcgcggagggccgcccagcgcgggcactggcgctccaacgtgtcagccaacaacaacagcggcagccgctgtccagagtcctgggaccccgtctctgcgggcggccacgctgagggctgccccagtccaaagcagaccccacgggcctcccccgagccggggtaccctggagagcctctgcttgggctccaggcagcctctgcccaggagccaggctgctgccccggcctccctcatctatgctctgcccagggcctggcacctgctccctgcctggttacaccctcctggacagagacagccagtagtgggggtgaccacccgcaggcagagcccaagcttgccacggaggctgagggcactaccggaccccgcctgccccttccttccgtcccctccccatcccaggagggagccccacttccctcggaggaggccagtgcccccgacgcccctgatgccctgcctgactctcccacgcctgctactggtggcgaggtgtctgccatcaagctggcttctgccctgaatggcagcagcagctctcccgaggtggaggcacccagcagtgaggatgaggacacggccgaggccacctcaggcatcttcaccgacacgtccagcgacggcctgcaggccaggaggccggatgtggtgccagccttccgctctctgcagaagcaggtggggacccccgactccctggactccctggacatcccgtcctcagccagtgatggtggctatgaggtcttcagcccgtcggccactggcccctctggagggcagccgcgagcgctggacagtggctatgacaccgagaactatgagtcccctgagtttgtgctcaaggaggcgcaggaagggtgtgagccccaggcctttgcggagctggcctcagagggtgagggccccgggcccgagacacggctctccacctccctcagtggcctcaacgagaagaatccctaccgagactctgcctacttctcagacctcgaggctgaggccgaggccacctcaggcccagagaagaagtgcggcggggaccgagcccccgggccagagctgggcctgccgagcactgggcagccgtctgagcaggtctgtctcaggcctggggtttccggggaggcacaaggctctggccccggggaggtgctgcccccactgctgcagcttgaagggtcctccccagagcccagcacctgcccctcgggcctggtcccagagcctccggagccccaaggcccagccaaggtgcggcctgggcccagccccagctgctcccagtttttcctgctgaccccggttccgctgagatcagaaggcaacagctctgagttccaggggcccccaggactgttgtcagggccggccccacaaaagcggatggggggcccaggcacccccagagccccactccgcctggctctgcccggcctccctgcggccttggagggccggccggaggaggaggaggaggacagtgaggacagcgacgagtctgacgaggagctccgctgctacagcgtccaggagcctagcgaggacagcgaagaggaggcgccggcggtgcccgtggtggtggctgagagccagagcgcgcgcaacctgcgcagcctgctcaagatgcccagcctgctgtccgagaccttctgcgaggacctggaacgcaagaagaaggccgtgtccttcttcgacgacgtcaccgtctacctctttgaccaggaaagccccacccgggagctcggggagcccttcccgggcgccaaggaatcgccccctacgttccttagggggagccccggctctcccagcgcccccaaccggccgcagcaggctgatggctccccaaatggctccacagcggaagagggtggtgggttcgcgtgggacgacgacttcccgctgatgacggccaaggcagccttcgccatggccctagacccggccgcacccgccccggctgcgcccacgcccacgcccgctcccttctcgcgcttcacggtgtcgcccgcgcccacgtcccgcttctccatcacgcacgtgtctgactcggacgccgagtccaagagaggacctgaagctggtgccgggggtgagagtaaagaggcttgagacctgggcagctcctgcccctcaaggctggcgtcaccggagcccctgccaggcagcagcgaggatggtgaccgagaaggtggggaccacgtcctggtggctgttggcagcagattcaggtgcctctgccccacgcggtgtcctggagaagcccgtgggatgagaggccctggatggtagatcggccatgctccgccccagaggcagaattcgtctgggcttttaggcttgctgctagcccctgggggcgcctggagccacagtgggtgtctgtacacacatacacactcaaaaggggccagtgcccctgggcacggcggcccccaccctctgccctgcctgcctggcctcggaggacccgcatgccccatccggcagctcctccggtgtgctcacaggacacttaaaccaggacgaggcatggccccgagacactggcaggtttgtgagcctcttcccaccccctgtgcccccacccttgcctggttcctggtggctcagggcaaggagtggccctgggcgcccgtgtcggtcctgtttccgctgcccttatctcaaagtccgtggctgtttccccttcactgactcagctagacccgtaagcccacccttcccacagggaacaggctgctcccacctgggtcccgctgtggccacggtgggcagcccaaaagatcaggggtggaggggcttccaggctgtactcctgccccgtgggccccgttctagaggtgcccttggcaggaccgtgcaggcagctcccctctgtggggcagtatctggtcctgtgccccagctgccaaaggagagtgggggccatgccccgcagtcagtgttggggggctcctacctacagggagagggatggtggggaaggggtggagctgggggcagggcagcacagggaatatttttgtaactaactaactgctgtggttggagcgaatggaagttgggtgattttaagttattgttgccaaagagatgtaaagtttattgttgcttcgcagggggatttgttttgtgttttgtttgaggcttagaacgctggtgcaatgttttcttgttccttgttttttaagagaaatgaagctaagacaaaagaaa

SEQ ID NO: 22 - DNA, 2108 bp, Homo sapiens
  source 1..2108: mol_type = unassigned DNA
tcggaggaggccagtgcccccgacgcccctgatgccctgcctgactctcccacgcctgctactggtggcgaggtgtctgccatcaagctggcttctgccctgaatggcagcagcagctctcccgaggtggaggcacccagcagtgaggatgaggacacggccgaggccacctcaggcatcttcaccgacacgtccagcgacggcctgcaggccaggaggccggatgtggtgccagccttccgctctctgcagaagcagtggcctcaacgagaagaatccctaccgagactctgcctacttctcagacctcgaggctgaggccgaggccacctcaggcccagagaagaagtgcggcggggaccgagcccccgggccagagctgggcctgccgagcactgggcagccgtctgagcagcgtccaggagcctagcgaggacagcgaagaggaggcgccggcggtgcccgtggtggtggctgagagccagagcgcgcgcaacctgcgcagcctgctcaagatgcccagcctgctgtccgagaccttctgcgaggacctggaacgcaagaagaaggccgtgtccttcttcgacgacgtcaccgtctacctctttgaccaggaaagccccacccgggagctcggggagcccttcccgggcgccaaggaatcgccccctacgttccttagggggagccccggctctcccagcgcccccaaccggccgcagcaggctgatggctccccaaatggctccacagcggaagagggtggtgggttcgcgtgggacgacgacttcccgctgatgacggccaaggcagccttcgccatggccctagacccggccgcacccgccccggctgcgcccacgcccacgcccgctcccttctcgcgcttcacggtgtcgcccgcgcccacgtcccgcttctccatcacgcacgtgtctgactcggacgccgagtccaagagaggacctgaagctggtgccgggggtgagagtaaagaggcttgagacctgggcagctcctgcccctcaaggctggcgtcaccggagcccctgccaggcagcagcgaggatggtgaccgagaaggtggggaccacgtcctggtggctgttggcagcagattcaggtgcctctgccccacgcggtgtcctggagaagcccgtgggatgagaggccctggatggtagatcggccatgctccgccccagaggcagaattcgtctgggcttttaggcttgctgctagcccctgggggcgcctggagccacagtgggtgtctgtacacacatacacactcaaaaggggccagtgcccctgggcacggcggcccccaccctctgccctgcctgcctggcctcggaggacccgcatgccccatccggcagctcctccggtgtgctcacaggacacttaaaccaggacgaggcatggccccgagacactggcaggtttgtgagcctcttcccaccccctgtgcccccacccttgcctggttcctggtggctcagggcaaggagtggccctgggcgcccgtgtcggtcctgtttccgctgcccttatctcaaagtccgtggctgtttccccttcactgactcagctagacccgtaagcccacccttcccacagggaacaggctgctcccacctgggtcccgctgtggccacggtgggcagcccaaaagatcaggggtggaggggcttccaggctgtactcctgccccgtgggccccgttctagaggtgcccttggcaggaccgtgcaggcagctcccctctgtggggcagtatctggtcctgtgccccagctgccaaaggagagtgggggccatgccccgcagtcagtgttggggggctcctacctacagggagagggatggtggggaaggggtggagctgggggcagggcagcacagggaatatttttgtaactaactaactgctgtggttggagcgaatggaagttgggtgattttaagttattgttgccaaagagatgtaaagtttattgttgcttcgcagggggatttgttttgtgttttgtttgaggcttagaacgctggtgcaatgttttcttgttccttgttttttaagagaaatgaagctaagacaaaag

SEQ ID NO: 23 - DNA, 4938 bp, Homo sapiens
  source 1..4938: mol_type = unassigned DNA
gatgcggcggctcgggccggggccgcgggcgtcctgagcgcagcgccctcccgggatgcccgccggccgctggcccggccatgtcgtcgtccttcttcaaccccagcttcgccttcagctcgcacttcgaccccgacggcgccccgctcagcgagctgtcctggccatcctccctcgccgtggtggctgtgtctttctccgggctcttcgccgtcatcgtcctcatgctggcctgcctgtgctgtaagaagggcggtatcgggttcaaggagtttgagaatgcggagggggacgagtacgcagccgacctggcgcagggctccccggccacggcagcacagaacgggcccgacgtgtacgtcctgccactcacggaggtctccttgcccatggccaagcagcctgggcgctcagtgcagctcctcaagtccacagacgtgggccggcacagcctcctgtacctgaaggaaatcggccgtggctggttcgggaaggtgttcctgggggaggtgaactctggcatcagcagtgcccaggtggtggtgaaggagctgcaggctagtgccagcgtgcaggagcagatgcagttcctggaggaggtgcagccctacagggccctgaagcacagcaacctgctccagtgcctggcccagtgcgccgaggtgacgccctacctgctggtgatggagttctgcccactgggggacctcaagggctacctgcggagctgccgggtggcggagtccatggctcccgacccccggaccctgcagcgcatggcctgtgaggtggcctgtggcgtcctgcaccttcatcgcaacaatttcgtgcacagcgacctggccctgcggaactgcctgctcacggctgacctgacggtgaagattggtgactatggcctggctcactgcaagtacagagaggactacttcgtgactgccgaccagctgtgggtgcctctgcgctggatcgcgccagagctggtggacgaggtgcatagcaacctgctcgtcgtggaccagaccaagagcgggaatgtgtggtccctgggcgtgaccatctgggagctctttgagctgggcacgcagccctatccccagcactcggaccagcaggtgctggcgtacacggtccgggagcagcagctcaagctgcccaagccccagctgcagctgaccctgtcggaccgctggtacgaggtgatgcagttctgctggctgcagcccgagcagcggcccacagccgaggaggtgcacctgctgctgtcctacctgtgtgccaagggcgccaccgaagcagaggaggagtttgaacggcgctggcgctctctgcggcccggcgggggcggcgtggggcccgggcccggtgcggcggggcccatgctgggcggcgtggtggagctcgccgctgcctcgtccttcccgctgctggagcagttcgcgggcgacggcttccacgcggacggcgacgacgtgctgacggagctgtgcgcccccgacggcgcgcccccgggcgtggttccggtgctcagcgcgcacagcccgtcgctgggcagcgagtacttcatccgcctagaggaggccgcacccgccgccggccacgaccctgactgcgccggctgcgcccccagtccacctgccaccgcggaccaggacgacgactctgacggcagcaccgccgcctcgctggccatggagccgctgctgggccacgggccacccgtcgacgtcccctggggccgcggcgaccactaccctcgcagaagcttggcgcgggacccgctctgcccctcacgctctccctcgccctcggcggggcccctgagtctggcggagggaggagcggaggatgcagactggggcgtggccgccttctgtcctgccttcttcgaggacccactgggcacgtcccctttggggagctcaggggcgcccccgctgccgctgactggcgaggatgagctagaggaggtgggagcgcggagggccgcccagcgcgggcactggcgctccaacgtgtcagccaacaacaacagcggcagccgctgtccagagtcctgggaccccgtctctgcgggcggccacgctgagggctgccccagtccaaagcagaccccacgggcctcccccgagccggggtaccctggagagcctctgcttgggctccaggcagcctctgcccaggagccaggctgctgccccggcctccctcatctatgctctgcccagggcctggcacctgctccctgcctggttacaccctcctggacagagacagccagtagtgggggtgaccacccgcaggcagagcccaagcttgccacggaggctgagggcactaccggaccccgcctgccccttccttccgtcccctccccatcccaggagggagccccacttccctcggaggaggccagtgcccccgacgcccctgatgccctgcctgactctcccacgcctgctactggtggcgaggtgtctgccatcaagctggcttctgccctgaatggcagcagcagctctcccgaggtggaggcacccagcagtgaggatgaggacacggccgaggccacctcaggcatcttcaccgacacgtccagcgacggcctgcaggccaggaggccggatgtggtgccagccttccgctctctgcagaagcagtggcctcaacgagaagaatccctaccgagactctgcctacttctcagacctcgaggctgaggccgaggccacctcaggcccagagaagaagtgcggcggggaccgagcccccgggccagagctgggcctgccgagcactgggcagccgtctgagcaggtctgtctcaggcctggggtttccggggaggcacaaggctctggccccggggaggtgctgcccccactgctgcagcttgaagggtcctccccagagcccagcacctgcccctcgggcctggtcccagagcctccggagccccaaggcccagccaaggtgcggcctgggcccagccccagctgctcccagtttttcctgctgaccccggttccgctgagatcagaaggcaacagctctgagttccaggggcccccaggactgttgtcagggccggccccacaaaagcggatggggggcccaggcacccccagagccccactccgcctggctctgcccggcctccctgcggccttggagggccggccggaggaggaggaggaggacagtgaggacagcgacgagtctgacgaggagctccgctgctacagcgtccaggagcctagcgaggacagcgaagaggaggcgccggcggtgcccgtggtggtggctgagagccagagcgcgcgcaacctgcgcagcctgctcaagatgcccagcctgctgtccgagaccttctgcgaggacctggaacgcaagaagaaggccgtgtccttcttcgacgacgtcaccgtctacctctttgaccaggaaagccccacccgggagctcggggagcccttcccgggcgccaaggaatcgccccctacgttccttagggggagccccggctctcccagcgcccccaaccggccgcagcaggctgatggctccccaaatggctccacagcggaagagggtggtgggttcgcgtgggacgacgacttcccgctgatgacggccaaggcagccttcgccatggccctagacccggccgcacccgccccggctgcgcccacgcccacgcccgctcccttctcgcgcttcacggtgtcgcccgcgcccacgtcccgcttctccatcacgcacgtgtctgactcggacgccgagtccaagagaggacctgaagctggtgccgggggtgagagtaaagaggcttgagacctgggcagctcctgcccctcaaggctggcgtcaccggagcccctgccaggcagcagcgaggatggtgaccgagaaggtggggaccacgtcctggtggctgttggcagcagattcaggtgcctctgccccacgcggtgtcctggagaagcccgtgggatgagaggccctggatggtagatcggccatgctccgccccagaggcagaattcgtctgggcttttaggcttgctgctagcccctgggggcgcctggagccacagtgggtgtctgtacacacatacacactcaaaaggggccagtgcccctgggcacggcggcccccaccctctgccctgcctgcctggcctcggaggacccgcatgccccatccggcagctcctccggtgtgctcacaggacacttaaaccaggacgaggcatggccccgagacactggcaggtttgtgagcctcttcccaccccctgtgcccccacccttgcctggttcctggtggctcagggcaaggagtggccctgggcgcccgtgtcggtcctgtttccgctgcccttatctcaaagtccgtggctgtttccccttcactgactcagctagacccgtaagcccacccttcccacagggaacaggctgctcccacctgggtcccgctgtggccacggtgggcagcccaaaagatcaggggtggaggggcttccaggctgtactcctgccccgtgggccccgttctagaggtgcccttggcaggaccgtgcaggcagctcccctctgtggggcagtatctggtcctgtgccccagctgccaaaggagagtgggggccatgccccgcagtcagtgttggggggctcctacctacagggagagggatggtggggaaggggtggagctgggggcagggcagcacagggaatatttttgtaactaactaactgctgtggttggagcgaatggaagttgggtgattttaagttattgttgccaaagagatgtaaagtttattgttgcttcgcagggggatttgttttgtgttttgtttgaggcttagaacgctggtgcaatgttttcttgttccttgttttttaagagaaatgaagctaagacaaaag

SEQ ID NO: 24 - DNA, 5081 bp, Homo sapiens
  source 1..5081: mol_type = unassigned DNA
gccaccaggtgaaggtccaaggctgctggggcagatggcggtggcaggagtttgagaatgcggagggggacgagtacgcagccgacctggcgcagggctccccggccacggcagcacagaacgggcccgacgtgtacgtcctgccactcacggaggtctccttgcccatggccaagcagcctgggcgctcagtgcagctcctcaagtccacagacgtgggccggcacagcctcctgtacctgaaggaaatcggccgtggctggttcgggaaggtgttcctgggggaggtgaactctggcatcagcagtgcccaggtggtggtgaaggagctgcaggctagtgccagcgtgcaggagcagatgcagttcctggaggaggtgcagccctacagggccctgaagcacagcaacctgctccagtgcctggcccagtgcgccgaggtgacgccctacctgctggtgatggagttctgcccactgggggacctcaagggctacctgcggagctgccgggtggcggagtccatggctcccgacccccggaccctgcagcgcatggcctgtgaggtggcctgtggcgtcctgcaccttcatcgcaacaatttcgtgcacagcgacctggccctgcggaactgcctgctcacggctgacctgacggtgaagattggtgactatggcctggctcactgcaagtacagagaggactacttcgtgactgccgaccagctgtgggtgcctctgcgctggatcgcgccagagctggtggacgaggtgcatagcaacctgctcgtcgtggaccagaccaagagcgggaatgtgtggtccctgggcgtgaccatctgggagctctttgagctgggcacgcagccctatccccagcactcggaccagcaggtgctggcgtacacggtccgggagcagcagctcaagctgcccaagccccagctgcagctgaccctgtcggaccgctggtacgaggtgatgcagttctgctggctgcagcccgagcagcggcccacagccgaggaggtgcacctgctgctgtcctacctgtgtgccaagggcgccaccgaagcagaggaggagtttgaacggcgctggcgctctctgcggcccggcgggggcggcgtggggcccgggcccggtgcggcggggcccatgctgggcggcgtggtggagctcgccgctgcctcgtccttcccgctgctggagcagttcgcgggcgacggcttccacgcggacggcgacgacgtgctgacggtgaccgagaccagccgaggcctcaattttgagtacaagtgggaggcgggccgcggcgcggaggccttcccggccacgctgagccctggccgcaccgcacgcctgcaggagctgtgcgcccccgacggcgcgcccccgggcgtggttccggtgctcagcgcgcacagcccgtcgctgggcagcgagtacttcatccgcctagaggaggccgcacccgccgccggccacgaccctgactgcgccggctgcgcccccagtccacctgccaccgcggaccaggacgacgactctgacggcagcaccgccgcctcgctggccatggagccgctgctgggccacgggccacccgtcgacgtcccctggggccgcggcgaccactaccctcgcagaagcttggcgcgggacccgctctgcccctcacgctctccctcgccctcggcggggcccctgagtctggcggagggaggagcggaggatgcagactggggcgtggccgccttctgtcctgccttcttcgaggacccactgggcacgtcccctttggggagctcaggggcgcccccgctgccgctgactggcgaggatgagctagaggaggtgggagcgcggagggccgcccagcgcgggcactggcgctccaacgtgtcagccaacaacaacagcggcagccgctgtccagagtcctgggaccccgtctctgcgggcggccacgctgagggctgccccagtccaaagcagaccccacgggcctcccccgagccggggtaccctggagagcctctgcttgggctccaggcagcctctgcccaggagccaggctgctgccccggcctccctcatctatgctctgcccagggcctggcacctgctccctgcctggttacaccctcctggacagagacagccagtagtgggggtgaccacccgcaggcagagcccaagcttgccacggaggctgagggcactaccggaccccgcctgccccttccttccgtcccctccccatcccaggagggagccccacttccctcggaggaggccagtgcccccgacgcccctgatgccctgcctgactctcccacgcctgctactggtggcgaggtgtctgccatcaagctggcttctgccctgaatggcagcagcagctctcccgaggtggaggcacccagcagtgaggatgaggacacggccgaggccacctcaggcatcttcaccgacacgtccagcgacggcctgcaggccaggaggccggatgtggtgccagccttccgctctctgcagaagcaggtggggacccccgactccctggactccctggacatcccgtcctcagccagtgatggtggctatgaggtcttcagcccgtcggccactggcccctctggagggcagccgcgagcgctggacagtggctatgacaccgagaactatgagtcccctgagtttgtgctcaaggaggcgcaggaagggtgtgagccccaggcctttgcggagctggcctcagagggtgagggccccgggcccgagacacggctctccacctccctcagtggcctcaacgagaagaatccctaccgagactctgcctacttctcagacctcgaggctgaggccgaggccacctcaggcccagagaagaagtgcggcggggaccgagcccccgggccagagctgggcctgccgagcactgggcagccgtctgagcaggtctgtctcaggcctggggtttccggggaggcacaaggctctggccccggggaggtgctgcccccactgctgcagcttgaagggtcctccccagagcccagcacctgcccctcgggcctggtcccagagcctccggagccccaaggcccagccaaggtgcggcctgggcccagccccagctgctcccagtttttcctgctgaccccggttccgctgagatcagaaggcaacagctctgagttccaggggcccccaggactgttgtcagggccggccccacaaaagcggatggggggcccaggcacccccagagccccactccgcctggctctgcccggcctccctgcggccttggagggccggccggaggaggaggaggaggacagtgaggacagcgacgagtctgacgaggagctccgctgctacagcgtccaggagcctagcgaggacagcgaagaggaggcgccggcggtgcccgtggtggtggctgagagccagagcgcgcgcaacctgcgcagcctgctcaagatgcccagcctgctgtccgagaccttctgcgaggacctggaacgcaagaagaaggccgtgtccttcttcgacgacgtcaccgtctacctctttgaccaggaaagccccacccgggagctcggggagcccttcccgggcgccaaggaatcgccccctacgttccttagggggagccccggctctcccagcgcccccaaccggccgcagcaggctgatggctccccaaatggctccacagcggaagagggtggtgggttcgcgtgggacgacgacttcccgctgatgacggccaaggcagccttcgccatggccctagacccggccgcacccgccccggctgcgcccacgcccacgcccgctcccttctcgcgcttcacggtgtcgcccgcgcccacgtcccgcttctccatcacgcacgtgtctgactcggacgccgagtccaagagaggacctgaagctggtgccgggggtgagagtaaagaggcttgagacctgggcagctcctgcccctcaaggctggcgtcaccggagcccctgccaggcagcagcgaggatggtgaccgagaaggtggggaccacgtcctggtggctgttggcagcagattcaggtgcctctgccccacgcggtgtcctggagaagcccgtgggatgagaggccctggatggtagatcggccatgctccgccccagaggcagaattcgtctgggcttttaggcttgctgctagcccctgggggcgcctggagccacagtgggtgtctgtacacacatacacactcaaaaggggccagtgcccctgggcacggcggcccccaccctctgccctgcctgcctggcctcggaggacccgcatgccccatccggcagctcctccggtgtgctcacaggacacttaaaccaggacgaggcatggccccgagacactggcaggtttgtgagcctcttcccaccccctgtgcccccacccttgcctggttcctggtggctcagggcaaggagtggccctgggcgcccgtgtcggtcctgtttccgctgcccttatctcaaagtccgtggctgtttccccttcactgactcagctagacccgtaagcccacccttcccacagggaacaggctgctcccacctgggtcccgctgtggccacggtgggcagcccaaaagatcaggggtggaggggcttccaggctgtactcctgccccgtgggccccgttctagaggtgcccttggcaggaccgtgcaggcagctcccctctgtggggcagtatctggtcctgtgccccagctgccaaaggagagtgggggccatgccccgcagtcagtgttggggggctcctacctacagggagagggatggtggggaaggggtggagctgggggcagggcagcacagggaatatttttgtaactaactaactgctgtggttggagcgaatggaagttgggtgattttaagttattgttgccaaagagatgtaaagtttattgttgcttcgcagggggatttgttttgtgttttgtttgaggcttagaacgctggtgcaatgttttcttgttccttgttttttaagagaaatgaagctaaga

SEQ ID NO: 25 - DNA, 754 bp, Homo sapiens
  source 1..754: mol_type = unassigned DNA
agcctcttgctcagccacactgcctgcctggtgcagcccatgtgacgggtcgagctccgggccctgctgtccctggccgggctatcccagtggcttcaggcaccttctccagacctacccagaaagatgcccggatggatcctgcagctccgtggcttttctgggaagcagcggcccctgctctcaagagaccctggctcctgatggtggccccaaggttgccagctggtgctagggactcaggacagtttcccagaaaaggccaagcgggcagcccctccaggggccgggtgaggaagctggggggtgcggaggccacactgggtccctgaaccccctgcttggttacagtgcagctcctcaagtccacagacgtgggccggcacagcctcctgtacctgaaggaaatcggccgtggctggttcgggaaggtggggaccacgtcctggtggctgttggcagcagattcaggtgcctctgccccacgcggtgtcctggagaagcccgtgggatgagaggccctggatggtagatcggccatgctccgccccagaggcagaattcgtctgggcttttaggcttgctgctagcccctgggggcgcctggagccacagtgggtgtctgtacacacatacacactcaaaaggggccagtgcccctgggcacggcggcccccaccctctgccctgcctgcctggcctcggaggacccgcatgccccatccggcagctcctccggtgtgctcacaggaca

SEQ ID NO: 26 - DNA, 581 bp, Homo sapiens
  source 1..581: mol_type = unassigned DNA
cgacctggccctgcggaactgcctgctcacggctgacctgacggtgaagattggtgactatggcctggctcactgcaagtacagagaggactacttcgtgactgccgaccagctgtgggtgcctctgcgctggatcgcgccagagctggtggacgaggtgcatagcaacctgctcgtcgtggaccagaccaagagcgggaatgtgtggtccctgggcgtgaccatctgggagctctttgagctgggcacgcagccctatccccagcactcggaccagcaggtgctggcgtacacggtccgggagcagcagctcaagctgcccaagccccagctgcagctgaccctgtcggaccgctgggcgccaccgaagcagaggaggagtttgaacggcgctggcgctctctgcggcccggcgggggcggcgtggggcccgggcccggtgcggcggggcccatgctgggcggcgtggtggagctcgccgctgcctcgtccttcccgctgctggagcagttcgcgggcgacggcttccacgcggacggcgacgacgtgctgacggtgaccgagaccagccgaggcctcaa

SEQ ID NO: 27 - DNA, 679 bp, Homo sapiens
  source 1..679: mol_type = unassigned DNA
agccacactgcctgcctggtgcagcccatgtgacgggtcgagctccgggccctgctgtccctggccgggctatcccagtggcttcaggcaccttctccagacctacccagaaagatgcccggatggatcctgcagctccgtggcttttctgggaagcagcggcccctgctctcaagagaccctggctcctgatggtggccccaagtgcagctcctcaagtccacagacgtgggccggcacagcctcctgtacctgaaggaaatcggccgtggctggttcgggaaggtgttcctgggggaggtgaactctggcatcagcagtgcccaggtggtggtgaaggagctgcaggctagtgccagcgtgcaggagcagatgcagttcctggaggaggtgcagccctacagggccctgaagcacagcaacctgctccagtgcctggcccagtgcgccgaggtgacgccctacctgctggtgatggagttctgcccactgggggacctcaagggctacctgcggagctgccgggtggcggagtccatggctcccgacccccggaccctgcagcgcatggcctgtgaggtggcctgtggcgtcctgcaccttcatcgcaacaatttcgtgcacagcgacctggccctgcggaactgcctgctcacggctgacctgacggtgaagattg

SEQ ID NO: 28 - DNA, 938 bp, Homo sapiens
  source 1..938: mol_type = unassigned DNA
agtgccctctctgtgccgtggccccagcctcttgctcagccacactgcctgcctggtgcagcccatgtgacgggtcgagctccgggccctgctgtccctggccgggctatcccagtggcttcaggcaccttctccagacctacccagaaagatgcccggatggatcctgcagctccgtggcttttctgggaagcagcggcccctgctctcaagagaccctggctcctgatggtggccccaaggttgccagctggtgctagggactcaggacagtttcccagaaaaggccaagcgggcagcccctccaggggccgggtgaggaagctggggggtgcggaggccacactgggtccctgaaccccctgcttggttacagtgcagctcctcaagtccacagacgtgggccggcacagcctcctgtacctgaaggaaatcggccgtggctggttcgggaaggtgttcctgggggaggtgaactctggcatcagcagtgcccaggtggtggtgaaggagctgcaggctagtgccagcgtgcaggagcagatgcagttcctggaggaggtgcagccctacagggccctgaagcacagcaacctgctccagtgcctggcccagtgcgccgaggtgacgccctacctgctggtgatggagttctgcccactggccaagggactcctgctgcccggggctggctgaggggcagtggagaggaagccttcagtccagcccagccctgggggacacggcccccctccaggaactgctgggtgctggccactgtgcagggcacgaggctgctctgggcagctgctgtccctcagctggggacctcaagggctacctgcggagctgccgggtggcggagtccatggctcccgacccccggaccctgcagcgcatggcctgtgaggtggcctgtggcgtcctgcaccttcatc

SEQ ID NO: 29 - DNA, 475 bp, Homo sapiens
  source 1..475: mol_type = unassigned DNA
attccagcaccagtgtgcccctgggaagtcctgcctccacactgggctccctcctgggatttggggacctgcgctgggctccctggtggggagctgtgctgagggaaggggctgggcaggcccccaatgctgaccctgtgctacctgattgcacgctgtatcggcaggacccggctggcccccgggcagcaggagtttgagaatgcggagggggacgagtacgcagccgacctggcgcagggctccccggccacggcagcacagaacgggcccgacgtgtacgtcctgccactcacggaggtctccttgcccatggccaagcagcctgggcgctcagtgcagctcctcaagtccacagacgtgggccggcacagcctcctgtacctgaaggaaatcggccgtggctggttcgggaaggtgttcctgggggaggtgaactctggcatcagcagtgcccaggtggtggtgaaggagc

SEQ ID NO: 30 - DNA, 407 bp, Homo sapiens
  source 1..407: mol_type = unassigned DNA
tgggtgatgcggcggctcgggccggggccgcgggcgtcctgagcgcagcgccctcccgggatgcccgccggccgctggcccggccatgtcgtcgtccttcttcaaccccagcttcgccttcagctcgcacttcgaccccgcagaagcagccggaccccctggcggccccagatctcggaggggcaggccctgggccccagcacaaaccggcctccgcctgtgggctggcgtcccccgcgtggtcgtgactccgtggctgcctccagggcacagacggcgccccgctcagcgagctgtcctggccatcctccctcgccgtggtggctgtgtctttctccgggctcttcgccgtcatcgtcctcatgctggcctgcctgtgctgtaagaagggcggtatcgggttcaag

SEQ ID NO: 31 - DNA, 4836 bp, Homo sapiens
  source 1..4836: mol_type = unassigned DNA
ggccgggacgctcggcggagccagggagtccggcgagtcgctgggggaagtcgagcagacacccagcgctgccggaactcggggcgcgcatcccgcaagtcggaacccggcggatcggatcccgcagatcggagacggggcctggagggtggcagcacgcaaagggtgtccctgtccctcaaggggtcatggcctccatgttgctcgcccagcgcctggcctgcagcttccagcacagctaccgcctgctggtgcctggatccagacacattagtcaagctgcagccaaagtcgacgttgaatttgattatgatgggcctctgatgaagacggaagtcccagggcctagatctcaggagttaatgaaacagctgaatataattcagaatgcagaggctgtgcattttttctgcaattacgaagagagccgaggcaattacctggttgatgtggacggcaaccgaatgctggatctttattcccagatctcctctgtccccataggttacagccaccccgccctgctgaaactcatccaacagcctcaaaatgcgagcatgtttgtcaacagacccgccctcggaatcctgcctccggagaactttgtggagaagctccggcagtccttgctctcggtggctcccaaagggatgtcccagctcatcaccatggcctgcggctcctgctccaatgaaaacgccttaaagaccatcttcatgtggtaccggagcaaggaaagagggcagaggggcttctcccaggaggagctggagacgtgcatgattaaccaggcccctggctgccccgactacagcatcctctccttcatgggcgcgttccatgggaggaccatgggttgcttagcgaccacgcactctaaagccattcacaagatcgacatcccttcctttgactggcccatcgcaccgttcccacggctgaaataccctctggaagagtttgtgaaagagaaccaacaggaggaggcccgctgtctggaagaggtggaggatctgattgtgaaatatcggaaaaagaagaagacggtggccgggatcatcgtggagcccatccagtccgagggtggagacaaccacgcatccgatgacttctttcggaagctgagagacatcgccaggaagcatggctgcgccttcttggtggacgaggtccagaccggaggaggctgcacgggcaagttctgggcccatgagcactggggcctggatgacccagcagacgtgatgaccttcagcaagaagatgatgactgggggcttcttccacaaggaggagttcaggcctaatgctccctaccggatcttcaacacctggctgggggacccgtccaagaacctgttgctggctgaggtcatcaacatcatcaagcgggaggacctgctaaataatgcagcccatgccgggaaggccctgctcacaggactgctggacctccaggcccggtacccccagttcatcagcagggtgagaggacgaggcaccttttgctccttcgatactcccgatgattccatacggaataagctcattttaattgccagaaacaaaggtgtggtgttgggtggctgtggtgacaaatccattcgtttccgtcccacgctggtcttcagggatcaccacgctcacctgttcctcaatattttcagtgacatcttagcagacttcaagtaaagaagccatttccactacagtgagaaagcccggatcccaacagttgtcaaattgattagtttgcctaattcatgttttcacttaaaagtatcagaggtgaatgcacagtgaagggtgatttgtggggagggagcatttttggtggtcttgggggaggggaggggagggaagggctggtgttgattttcctccctgcagagccaatggtgcacattggtttaagcccagagatcctgcttgagccctggactcatcttgggaagggccatgggaggtcctggctagagttctgcccaaccttgaccaaccccagcaatttttccaaaagccagtcaagggcattacatttgttcctgggactggcagctgggcctcctgggtgccagtccatctcaagtgccatattctgtgatcacggatgttggctccccctcgccctatgcaagcaaacacactctcacctcctctcccagcctcccggagctctgagcacgccccacgcatggtgcaggagggactggacagatctgaggaaggccgtaaaatggggacaggaggattcagctcaggagtaagggaagaggtcctctggccccctgaagatgagaatcacccctctcagtgcacctggggatccccctaaactgtgaattctgccctggacagggctttgcccttggaggatccccaggtggccttacccgtgattcttactcggcatcctccattccccaaactccctcctccctgttaaatgtcaacctagacctggacctgggtgggaggaaactgtagcctgagtgtccacagggacacacgtgagccacagggctagaagcacaggcccgtcaccccaggaggaaaagcccagggtctggggcagcagagccatcgcatcatgtttcccagggcaacttgaggtctgacttttggctccctcgccctaagaggctcttcctctcttttgctcatccaccttcacaccacttgtgagctgacccccaggaacagcttggctgttccaccagagcagagggaatcattgctggactggatttcttctggagggaagcaccatgaattaaaggtgccagagctccatgcatggaaaagtggcctgttggttcaacgtggtttccttgtacttgatcctcctgaaatgagagattttcctgagatgactgagtatggagattaccaggcagatgataccgaaatgcttaaaggggctgtggctgaggctgtagcatctctgctggaggtgagacactctgggaactgatttgacctcgaatgctcctaaaagagaacttgatagcctgacagcagagaagtattatttggtggggagtctgagaaagcctggcttgtattatctgtccaaaaggaagcctcttcatctcccggtgccttggttgactattttggaaataggcatatcaaggttcctgattcagcactttgctcttttaataacaaatcgtccaaagatctcaaagtaagggtttttttttttagcttccactcttccgcagacttggtcatcgacctatttttgttgaagaatgaaaggcaatgacaagtttaacatatacaaattcgtgaattcttgttcattttgcattcctgcagtcagtgctaatccgtcgttcttaatcaggagttctgccaggtttaaggtcacctgcactcccagccaagtggtgatgtatgcctcccactctctgcaaggttttcctcatttttatattcatttattcatcattcattcattcacctaactttcattaaatagctgcaccatcccaggccctgtgcggagcatcgggaatacaaagatgagataaaacattgtccctgcccccgggggctcacatgccactggaaacaacagactcttaaactaacaattcaagcaggcgccaagtgctatgacagaggtgtgaataaaagcatcaggaaatcggatggagaaccaccattcacccaagggtcagaggaggtttcaaagaaaaggtgtcattggagcagtgttttgcagaatgagccagagttcaccaagcaggcaaggcaaggaagggtgttgcagagagggaacagcatatgcaaaggcgtatcagttcatggcatcacatctttcactggggaagccagtttccacaggcagcatcccaaggttcaataaggccttatttaacaagcaagcaaaatgcaaaccaaaccattattcatttattggcttaagtatgctttctcctgaaaactttagcattgggtgcaaatattcagtatggttctcggagtccaaagggttttaagccagggcacaaccagaaaagtggctctctttggtagggagaggggctccaatatttcgttctctccccatggggcactgacagagaaatgaaatagttttatctggaaaattccagagctattatttactccttaccaagggaagttacttcttgtaaaaacttttaagccatttatcaacaagttcttgttgactcagggcataatgagttcctgagacatgctcttttgggggctggggctttagctagaagaatttcaaggaaaagaattctcagcagagctcaagattgtagaaactcagcagaagctggtaaaaacatggggagcccggaggacaggctgctgtccagggcagaggccatgaagaagtgcttccgtggccgacagtctggaaatgaatccatcatacattagtgccatagagtttagtaaccgtccagcaagtgtcatcacttttacagaaaacaaggtccagtaatagcaagtcttagtacatcctcacttttattataaatgggtgttttttcataatttttactgacgctcagtaaccatgcaaaattgtgtatagcattaatgtatctacatacctacacctatctatatataagctcatggtagaaaaccatagctaagtagcatcgcagacttaagcgtacaaagtgatcttgttcacaagtaatctgttgacagtgccaataaatgataaaaaaaaaattaacatgtcacaatgtaacggatgaccatatgcacaattccatgaattaaatctgtttcctgtgttagtcagtattcttaaataaaatttataattgaaacatga

SEQ ID NO: 32 - DNA, 466 bp, Homo sapiens
  source 1..466: mol_type = unassigned DNA
ggcgagtcgctgggggaagtcgagcagacacccagcgctgccggaactcggggcgcgcatcccgcaagtcggaacccggcggatcggatcccgcagatcggagacggggcctggagatgcgcccatccagggtctagcggattgcaaagggcctggtagaatcaaagagggatatactaatgcaacttcgagggtggcagcacgcaaagggtgtccctgtccctcaaggggtcatggcctccatgttgctcgcccagcgcctggcctgcagcttccagcacagctaccgcctgctggtgcctggatccagacacattagtcaagctgcagccaaagtcgacgttgaatttgattatgatgggcctctgatgaagacggaagtcccagggcctagatctcaggagttaatgaaacagctgaatataattcagaatgcagaggctgtgcattttttctgcaattacga

SEQ ID NO: 33 - DNA, 1870 bp, Homo sapiens
  source 1..1870: mol_type = unassigned DNA
gagcagacacccagcgctgccggaactcggggcgcgcatcccgcaagtcggaacccggcggatcggatcccgcagatcggagacggggcctggagggtggcagcacgcaaagggtgtccctgtccctcaaggggtcatggcctccatgttgctcgcccagcgcctggcctgcagcttccagcacagctaccgcctgctggtgcctggtaagccccgggggtcttgataagaactggtactaatggaagataccatccagactagggattcctgggctggaagagcccttggggataaagggaccagccagtgagtgtttctgggactgtcccactgtattagtctgttctcatgctgctaataaaggtacacctgagactgggtattttatgaagaaaaagaggtttaatggtctcacagtttcatatggctggggaggcctcacaatcatggcggaaggtgaaggaggaacaaaggcacgtcttacatggctacaggcaagagagcatgtgcaggggaactcccgtttgtaaaaacatcagatcgtgtgagacttactcaattgactatcatgagaacagcatgggaaagacccacccccatgattcaattacctcccactgggtccctcccatgacgtgggaattatgggagctatgatttaagatgagatttgaatgaggacacagccaaaccacatcacccactatccataaaactgtcaccatcgccacctcctttctctctcccatctctgtcatatgatcctgtcccaagtgcctcggtctgatgggattggatccaccctggagccactctgcctgcaggtaggcggtggcctccacagccagatggccccaggccatctctgcagggaccgctggggaaaacacacatctgggatcgctgctaaggaacaaagaaagccataagcgactctgaaattgacctagagcccagctgtgcttcagggtcactggatcactggatgggaggcaccatcttaggaatgtctcacccccactctgccccacacccatggccacttgcactggctccttcttccttctgtttgacgtctttgagacctccctcccaatagtcccatgagggagggaggctcaagtgaatcctattttacaggtgagagaactcaggcttagagaagcaaagccatttgcccaaggtcacacagccacttgcaagcaactctgtccggctccaatgctaactactcctccgtgtgcctccatgtggctctggagacagagccgccagcaggagcctcccttcacatgccccgagagtggcctcctgcagagatataaagtgcctggctcggggctggccatgaaataggttcagaaagaccagtgagcctccagcctgtccccagctctctcacagcccctgtgcttgtcatcatggtgtcccttgttggcaggccttactgccttctgaagacaaactgctagccgtgtccttggtctgcatgttgaatgctggtgtgtatgtcctgggtggcataaacagtaggagcgttcgcccctccccaaggagtatgagtaggctttattttaaaataaacatcttggccgggcgcagtggctcacaactgtaatcccagcactttgggaggcgaggtgggcagatcacctgaggtcaggggtcgagaccagcctggccaacatggtgaaaccccgtctctaccaaaaatacaaaaattagccaggtatggtggtggatgcctgtaatcccaactactcagcaggctgaggcaggagaatcgcttgaatccaggaggtagaggtggcagtgagctggatcgtgccactgtactccagcctgggcaacatcgaggctctgtctc

SEQ ID NO: 34 - DNA, 580 bp, Homo sapiens
  source 1..580: mol_type = unassigned DNA
gatttagaaccagtgtgtctctcctgcagcctccattctgggtgcctccacccccttgccgtcgtcatgttgcatcctgtttctgtctgaaaacccttgtctttctgaatccatctttcagtctctcacattctgtctttcccctcctccttcaccttccctccgtccctctcccttgcgcacttgccgggtaccagctgagtgcatccttttcccaaacctgctctgcttccaaggggcccttttctgtctcctccacctgtccccatgttttggggactgcctggaaatccgggacaccctcctgaggagggagctggtgcccaacggcacctcttaggatgaacccagccagctgcgttcctggcctctgcagaatggcatacagaaggcattttaagcaagcgagctgagctcgccgcaggactccgactaccaggcaccggtggcagcacgcaaagggtgtccctgtccctcaaggggtcatggcctccatgttgctcgcccagcgcctggcctgcagcttccagcacagctaccgcctgctggtgcctggatccagacacattagtcaagctgc

SEQ ID NO: 35 - DNA, 592 bp, Homo sapiens
  source 1..592: mol_type = unassigned DNA
ataccccctccccatcttgtgatcaccctcattacctcttctgggccccctgtggacctgcgttgacccagcatgggctacaatgggggagttgggtaatcgctcccgctgagtgcatccttttcccaaacctgctctgcttccaaggggcccttttctgtctcctccacctgtccccatgttttggggactgcctggaaatccgggacaccctcctgaggagggagctggtgcccaacggcacctcttaggatgaacccagccagctgcgttcctggcctctgcagaatggcatacagaaggcattttaagcaagcgagctgagctcgccgcaggactccgactaccaggcaccggtggcagcacgcaaagggtgtccctgtccctcaaggggtcatggcctccatgttgctcgcccagcgcctggcctgcagcttccagcacagctaccgcctgctggtgcctggatccagacacattagtcaagctgcagccaaagtcgacgttgaatttgattatgatgggcctctgatgaagacggaagtcccagggcctagatctcaggagttaatgaaacagctgaatataattc

SEQ ID NO: 36 - DNA, 470 bp, Homo sapiens
  source 1..470: mol_type = unassigned DNA
atcttgtgatcaccctcattacctcttctgggccccctgtggacctgcgttgacccagcatgggctacaatgggggagttgggtaatcgctcccgttgcatcctgtttctgtctgaaaacccttgtctttctgaatccatctttcagtctctcacattctgtctttcccctcctccttcaccttccctccgtccctctcccttgcgcacttgccgggtaccagctgagtgcatccttttcccaaacctgctctgcttccaaggggcccttttctgtctcctccacctgtccccatgttttggggactgcctggaaatccgggacaccctcctgaggagggagctggtgcccaacggcacctcttaggatgaacccagccagctgcgttcctggcctctgcagaatggcatacagaaggcattttaagcaagcgagctgagctcgccgcaggactccgactaccaggcacc

SEQ ID NO: 37 - DNA, 2423 bp, Homo sapiens
  source 1..2423: mol_type = unassigned DNA
ctcttctgggccccctgtggacctgcgttgacccagcatgggctacaatgggggagttgggtaatcgctcccggtaggttcctccccaacccccgaggcggggtcaggtggagcgtgggcgccagagcagcccctctgccttgggtgtcttggagatgacttggcgccccccggagccccgtcatggctgtggctgcgtccacaacactgcatcagcagagtcctggggaagccatttaggaatctgaagcccgggatttctgctttgtcccttcaggggttcctgagcctgttaaaaaaaaaaaaaaatctaggaagaggccctggaaggaaaaaggggagggagatagcctattttacaaggtctgaaatgatgtgtcttatccttctggcttaaaccaagctgggcttaaaacatcttttaaaaaaaatctgtattctatttttttctctctgtttatcgctctccttctgcctctgttaatctttgtttctgtgtagttgcatcctgtttctgtctgaaaacccttgtctttctgaatccatctttcagtctctcacattctgtctttcccctcctccttcaccttccctccgtccctctcccttgcgcacttgccgggtaccagctgagtgcatccttttcccaaacctgctctgcttccaaggggcccttttctgtctcctccacctgtccccatgttttggggactgcctggaaatccgggacaccctcctgaggagggagctggtgcccaacggcacctcttaggatgaacccagccagctgcgttcctggcctctgcagaatggcatacagaaggcattttaagcaagcgagctgagctcgccgcaggactccgactaccaggcaccggtggcagcacgcaaagggtgtccctgtccctcaaggggtcatggcctccatgttgctcgcccagcgcctggcctgcagcttccagcacagctaccgcctgctggtgcctggagttaatgaaacagctgaatataattcagaatgcagaggctgtgcattttttctgcaattacgaagagagccgaggcaattacctggttgatgtggacggcaaccgaatgctggatctttattcccagatctcctctgtccccataggttacagccaccccgccctgctgaaactcatccaacagcctcaaaatgcgagcatgtttgtcaacagacccgccctcggaatcctgcctccggagaactttgtggagaagctccggcagtccttgctctcggtggctcccaaagggatgtcccagctcatcaccatggcctgcggctcctgctccaatgaaaacgccttaaagaccatcttcatgtggtaccggagcaaggaaagagggcagaggggcttctcccaggaggagctggagacgtgcatgattaaccaggcccctggctgccccgactacagcatcctctccttcatgggcgcgttccatgggaggaccatgggttgcttagcgaccacgcactctaaagccattcacaagatcgacatcccttcctttgactggcccatcgcaccgttcccacggctgaaataccctctggaagagtttgtgaaagagaaccaacaggaggaggcccgctgtctggaagaggtggaggatctgattgtgaaatatcggaaaaagaagaagacggtggccgggatcatcgtggagcccatccagtccgagggtggagacaaccacgcatccgatgacttctttcggaagctgagagacatcgccaggaagcatggctgcgccttcttggtggacgaggtccagaccggaggaggctgcacgggcaagttctgggcccatgagcactggggcctggatgacccagcagacgtgatgaccttcagcaagaagatgatgactgggggcttcttccacaaggaggagttcaggcctaatgctccctaccggatcttcaacacctggctgggggacccgtccaagaacctgttgctggctgaggtcatcaacatcatcaagcgggaggacctgctaaataatgcagcccatgccgggaaggccctgctcacaggactgctggacctccaggcccggtacccccagttcatcagcagggtgagaggacgaggcaccttttgctccttcgatactcccgatgattccatacggaataagctcattttaattgccagaaacaaaggtgtggtgttgggtggctgtggtgacaaatccattcgtttccgtcccacgctggtcttcagggatcaccacgctcacctgttcctcaatattttcagtgacatcttagcagacttcaagtaaagaagccatttccactacagtgagaaagcccggatcccaacagttgtcaaattgattagtttgcctaattcatgttttcacttaaaagtatcagaggtgaa

SEQ ID NO: 38 - DNA, 1548 bp, Homo sapiens
  source 1..1548: mol_type = unassigned DNA
gatgtgtcttatccttctggcttaaaccaagctgggcttaaaacatcttttaaaaaaaatctgtattctatttttttctctctgtttatcgctctccttctgcctctgttaatctttgtttctgtgtagttgcatcctgtttctgtctgaaaacccttgtctttctgaatccatctttcagtctctcacattctgtctttcccctcctccttcaccttccctccgtccctctcccttgcgcacttgccgggtaccagctgagtgcatccttttcccaaacctgctctgcttccaaggggcccttttctgtctcctccacctgtccccatgttttggggactgcctggaaatccgggacaccctcctgaggagggagctggtgcccaacggcacctcttaggatgaacccagccagctgcgttcctggcctctgcagaatggcatacagaaggcattttaagcaagcgagctgagctcgccgcaggactccgactaccaggcaccggcaagatgtgggaatcctgaaaggttggcgctgaagatcctgcagttggtgtgtgcaagctggcagccaggccgctgccggaggaagggggtcctctgtgctttgcatgtccctgggtatttgggaaacttggcagccggttgctctaagtgaaccctgactctggagtaggcactgggcaccctggcggagaggacagagccggagacaaggactggcctcagggagtttccagttcaaataggaacagacccgatcacacgcgatacgctcaccctcagacacattgctgctgcctgcatttcctccgggctgccatcccccttcccctaccctggcctctgtctgccacgactgcccttgtctacctgccaagctctaattatcgttaaacatcccgtcactgcttcccggaaatctttaacttccacccaagaacagctaacactatacgccctcctctacctgcagaaatcacttggaccctctgacatcacatgtccaaccgacctctttctccacatttgcccgtgagctgcacttcattttgcaaggacataaagaagactattcacgcaactacatgcaaaatgactggctgggattcctaaaacgccaatgtcttttaaaaggcaaaagggctgagaaatggttccaggttaaaagagattaaagagccatgagcccaaatgcaatgtttgatcctaggatgaagcctggatcaggggaacagaaaacacttgtgggctgggctcagtggctcatacctgtaatcccagtgctttgggagtccgagggaggaggatcacttgaagtcaagagttagagactagcctcaggaatatagggagaccccatctctacaaaaaataaatataaaaataaactaaccagacatagtggtgtgtgcctgtgatcccagctactcaggaggctgaggcaagaggatcacctgagcccaagagttcgaggctgcagtgagccatgagccatgatcatgccactgcactccagcctaggtgatagagcgagaccctgtctct

SEQ ID NO: 39 - DNA, 580 bp, Homo sapiens
  source 1..580: mol_type = unassigned DNA
gcacttgccgggtaccagctgagtgcatccttttcccaaacctgctctgcttccaaggggcccttttctgtctcctccacctgtccccatgttttggggactgcctggaaatccgggacaccctcctgaggagggagctggtgcccaacggcacctcttaggatgaacccagccagctgcgttcctggcctctgcagaatggcatacagaaggcattttaagcaagcgagctgagctcgccgcaggactccgactaccaggcaccggtggcagcacgcaaagggtgtccctgtccctcaaggggtcatggcctccatgttgctcgcccagcgcctggcctgcagcttccagcacagctaccgcctgctggtgcctggatccaatccaggatccagacacattagtcaagctgcagccaaagtcgacgttgaatttgattatgatgggcctctgatgaagacggaagtcccagggcctagatctcaggagttaatgaaacagctgaatataattcagaatgcagaggctgtgcattttttctgcaattacgaagagagccgaggcaattacctggttgatg

SEQ ID NO: 40 - DNA, 1959 bp, Homo sapiens
  source 1..1959: mol_type = unassigned DNA
accagctgagtgcatccttttcccaaacctgctctgcttccaaggggcccttttctgtctcctccacctgtccccatgttttggggactgcctggaaatccgggacaccctcctgaggagggagctggtgcccaacggcacctcttaggatgaacccagccagctgcgttcctggcctctgcagaatggcatacagaaggcattttaagcaagcgagctgagctcgccgcaggactccgactaccaggcaccgtgagtgcaaatgtggtggcagcacgcaaagggtgtccctgtccctcaaggggtcatggcctccatgttgctcgcccagcgcctggcctgcagcttccagcacagctaccgcctgctggtgcctggatccagacacattagtcaagctgcagccaaagtcgacgttgaatttgattatgatgggcctctgatgaagacggaagtcccagggcctagatctcaggagttaatgaaacagctgaatataattcagaatgcagaggctgtgcattttttctgcaattacgaagagagccgaggcaattacctggttgatgtggacggcaaccgaatgctggatctttattcccagatctcctctgtccccataggttacagccaccccgccctgctgaaactcatccaacagcctcaaaatgcgagcatgtttgtcaacagacccgccctcggaatcctgcctccggagaactttgtggagaagctccggcagtccttgctctcggtggctcccaaagggatgtcccagctcatcaccatggcctgcggctcctgctccaatgaaaacgccttaaagaccatcttcatgtggtaccggagcaaggaaagagggcagaggggcttctcccaggaggagctggagacgtgcatgattaaccaggcccctggctgccccgactacagcatcctctccttcatgggcgcgttccatgggaggaccatgggttgcttagcgaccacgcactctaaagccattcacaagatcgacatcccttcctttgactggcccatcgcaccgttcccacggctgaaataccctctggaagagtttgtgaaagagaaccaacaggaggaggcccgctgtctggaagaggtggaggatctgattgtgaaatatcggaaaaagaagaagacggtggccgggatcatcgtggagcccatccagtccgagggtggagacaaccacgcatccgatgacttctttcggaagctgagagacatcgccaggaagcatggctgcgccttcttggtggacgaggtccagaccggaggaggctgcacgggcaagttctgggcccatgagcactggggcctggatgacccagcagacgtgatgaccttcagcaagaagatgatgactgggggcttcttccacaaggaggagttcaggcctaatgctccctaccggatcttcaacacctggctgggggacccgtccaagaacctgttgctggctgaggtcatcaacatcatcaagcgggaggacctgctaaataatgcagcccatgccgggaaggccctgctcacaggactgctggacctccaggcccggtacccccagttcatcagcagggtgagaggacgaggcaccttttgctccttcgatactcccgatgattccatacggaataagctcattttaattgccagaaacaaaggtgtggtgttgggtggctgtggtgacaaatccattcgtttccgtcccacgctggtcttcagggatcaccacgctcacctgttcctcaatattttcagtgacatcttagcagacttcaagtaaagaagccatttccactacagtgagaaagcccggatcccaacagttgtcaaattgattagtttgcctaattcatgttttcacttaaaagtatcagaggtgaatgcacagtgaagggtgatttgtggggagggagcatttttggtggtctt

SEQ ID NO: 41 - DNA, 1923 bp, Homo sapiens
  source 1..1923: mol_type = unassigned DNA
tttgtgtccctttgagtctgcagagaagccagcagctggggctgcagacgggaaaggaatgtcctcagcgtctgccagcacttttgtcttggtcccaacggctgataggaaaatgagaggcagggtcttttctagagagatctggggggtccatttctagccgatgatgcatgcaaagagttcgtgttcacaggacctgggaagcagcggagtagaaagggtggcagcacgcaaagggtgtccctgtccctcaaggggtcatggcctccatgttgctcgcccagcgcctggcctgcagcttccagcacagctaccgcctgctggtgcctggatccagacacattagtcaagctgcagccaaagtcgacgttgaatttgattatgatgggcctctgatgaagacggaagtcccagggcctagatctcaggagttaatgaaacagctgaatataattcagaatgcagaggctgtgcattttttctgcaattacgaagagagccgaggcaattacctggttgatgtggacggcaaccgaatgctggatctttattcccagatctcctctgtccccataggttacagccaccccgccctgctgaaactcatccaacagcctcaaaatgcgagcatgtttgtcaacagacccgccctcggaatcctgcctccggagaactttgtggagaagctccggcagtccttgctctcggtggctcccaaagggatgtcccagctcatcaccatggcctgcggctcctgctccaatgaaaacgccttaaagaccatcttcatgtggtaccggagcaaggaaagagggcagaggggcttctcccaggaggagctggagacgtgcatgattaaccaggcccctggctgccccgactacagcatcctctccttcatgggcgcgttccatgggaggaccatgggttgcttagcgaccacgcactctaaagccattcacaagatcgacatcccttcctttgactggcccatcgcaccgttcccacggctgaaataccctctggaagagtttgtgaaagagaaccaacaggaggaggcccgctgtctggaagaggtggaggatctgattgtgaaatatcggaaaaagaagaagacggtggccgggatcatcgtggagcccatccagtccgagggtggagacaaccacgcatccgatgacttctttcggaagctgagagacatcgccaggaagcatggctgcgccttcttggtggacgaggtccagaccggaggaggctgcacgggcaagttctgggcccatgagcactggggcctggatgacccagcagacgtgatgaccttcagcaagaagatgatgactgggggcttcttccacaaggaggagttcaggcctaatgctccctaccggatcttcaacacctggctgggggacccgtccaagaacctgttgctggctgaggtcatcaacatcatcaagcgggaggacctgctaaataatgcagcccatgccgggaaggccctgctcacaggactgctggacctccaggcccggtacccccagttcatcagcagggtgagaggacgaggcaccttttgctccttcgatactcccgatgattccatacggaataagctcattttaattgccagaaacaaaggtgtggtgttgggtggctgtggtgacaaatccattcgtttccgtcccacgctggtcttcagggatcaccacgctcacctgttcctcaatattttcagtgacatcttagcagacttcaagtaaagaagccatttccactacagtgagaaagcccggatcccaacagttgtcaaattgattagtttgcctaattcatgttttcacttaaaagtatcagaggtgaatgcacagtgaagggtgatttgtggggagggagcatttttggtggtcttgggggagggga

SEQ ID NO: 42 - DNA, 1911 bp, Homo sapiens
  source 1..1911: mol_type = unassigned DNA
gtgtccctttgagtctgcagagaagccagcagctggggctgcagacgggaaaggaatgtcctcagcgtctgccagcacttttgtcttggtcccaacggctgataggaaaatgagaggcagggtcttttctagagagatctggggggtccatttctagccgatgatgcatgcaaagagttcgtgttcacaggacctgggaagcagcggagtagaaagggtggcagcacgcaaagggtgtccctgtccctcaaggggtcatggcctccatgttgctcgcccagcgcctggcctgcagcttccagcacagctaccgcctgctggtgcctggatccagacacattagtcaagctgcagccaaagtcgacgttgaatttgattatgatgggcctctgatgaagacggaagtcccagggcctagatctcaggagttaatgaaacagctgaatataattcagaatgcagaggctgtgcattttttctgcaattacgaagagagccgaggcaattacctggttgatgtggacggcaaccgaatgctggatctttattcccagatctcctctgtccccataggttacagccaccccgccctgctgaaactcatccaacagcctcaaaatgcgagcatgtttgtcaacagacccgccctcggaatcctgcctccggagaactttgtggagaagctccggcagtccttgctctcggtggctcccaaagggatgtcccagctcatcaccatggcctgcggctcctgctccaatgaaaacgccttaaagaccatcttcatgtggtaccggagcaaggaaagagggcagaggggcttctcccaggaggagctggagacgtgcatgattaaccaggcccctggctgccccgactacagcatcctctccttcatgggcgcgttccatgggaggaccatgggttgcttagcgaccacgcactctaaagccattcacaagatcgacatcccttcctttgactggcccatcgcaccgttcccacggctgaaataccctctggaagagtttgtgaaagagaaccaacaggaggaggcccgctgtctggaagaggtggaggatctgattgtgaaatatcggaaaaagaagaagacggtggccgggatcatcgtggagcccatccagtccgagggtggagacaaccacgcatccgatgacttctttcggaagctgagagacatcgccaggaagcatggctgcgccttcttggtggacgaggtccagaccggaggaggctgcacgggcaagttctgggcccatgagcactggggcctggatgacccagcagacgtgatgaccttcagcaagaagatgatgactgggggcttcttccacaaggaggagttcaggcctaatgctccctaccggatcttcaacacctggctgggggacccgtccaagaacctgttgctggctgaggtcatcaacatcatcaagcgggaggacctgctaaataatgcagcccatgccgggaaggccctgctcacaggactgctggacctccaggcccggtacccccagttcatcagcagggtgagaggacgaggcaccttttgctccttcgatactcccgatgattccatacggaataagctcattttaattgccagaaacaaagctctcccagcatgtgactttgagaaaccacgctcctcacctacctcctgcctctttcaggtgtggtgttgggtggctgtggtgacaaatccattcgtttccgtcccacgctggtcttcagggatcaccacgctcacctgttcctcaatattttcagtgacatcttagcagacttcaagtaaagaagccatttccactacagtgagaaagcccggatcccaacagttgtcaaattgattagtttgcctaattcatgttttcacttaaaagtatc

SEQ ID NO: 43 - DNA, 634 bp, Homo sapiens
  source 1..634: mol_type = unassigned DNA
aggaaaatgagaggcagggtcttttctagagagatctggggggtccatttctagccgatgatgcatgcaaagagttcgtgttcacaggacctgggaagcagcggagtagaaagggtggcagcacgcaaagggtgtccctgtccctcaaggggtcatggcctccatgttgctcgcccagcgcctggcctgcagcttccagcacagctaccgcctgctggtgcctggatccagacacattagtcaagctgcagccaaagtcgacgttgaatttgattatgatgggcctctgatgaagacggaagtcccagggcctagatctcaggagttaatgaaacagctgaatataattcagaatgcagaggctgtgcattttttctgcaattacgaagagagccgaggcaattacctggttgatgtggacggcaaccgaatgctggatctttattcccagatctcctctgtccccatagagtctcactgtcacccaggctggagtgcagtggcgtgatctcaactcaatgcaacctccgcctcttgtgttcaagagattcttctgcctcagccccccgagtacctgggattacaggttacagccaccccgccctgctgaaactcatccaacagcctcaaaatg

SEQ ID NO: 44 - DNA, 596 bp, Homo sapiens
  source 1..596: mol_type = unassigned DNA
atccagacacattagtcaagctgcagccaaagtcgacgttgaatttgattatgatgggcctctgatgaagacggaagtcccagggcctagatctcaggagttaatgaaacagctgaatataattcagaatgcagaggctgtgcattttttctgcaattacgaagagagccgaggcaattacctggttgatgtggacggcaaccgaatgctggatctttattcccagatctcctctgtccccataggttacagccaccccgccctgctgaaactcatccaacagcctcaaaatgcgatacgaagcttggagtagaactgctggccatgtacagctcctgcagatcctgccagacagttctccaaatcgatcgcaccaactccactcccacagccgggggagggttccagtcttgccacatcctcgccaacacggggtatcactggaagatttttctttgactcagagagtaacatacttatccacacatgacaaggaacttgatcccagaaagaaatctaagaaaggcagaaggaacaaagacccaatcctggtcagaaaaggggtccctagccctaaaacgtacttcactttaaat

SEQ ID NO: 45 - DNA, 572 bp, Homo sapiens
  source 1..572: mol_type = unassigned DNA
ttatttaaatattctaaattgcagagacagagtcccactttgttgcccagcatggtctcaaactcttggcctcaagcaatcctcctgtcttagccacccaaagtactaggattacagatttgagcccgcacatctggcctccattcttcctggcaaaacatgcaacgctctcagcagatcttaatccaacagatcttaatcgttgctgatggtgcttaatgcattatgtgtgttagtttcttttgttgcgagcacagttggtagcctcacgtttcagtacagacctgcaacaattaatacatgagatccactcctgagaaagcactttctacttgtctggactgaatatcggtttggttggaaagatgaagccccgactaccccagagcatctctgagattttgttctgttctattgtttcagagcaaggaaagagggcagaggggcttctcccaggaggagctggagacgtgcatgattaaccaggcccctggctgccccgactacagcatcctctccttcatgggcgcgttccatgggaggaccatgggttgcttagcgaccacgcactc

SEQ ID NO: 46 - DNA, 5586 bp, Homo sapiens
  source 1..5586: mol_type = unassigned DNA
tcttgtgatcaccctcattacctcttctgggccccctgtggacctgcgttgacccagcatgggctacaatgggggagttgggtaatcgctcccggtaggttcctccccaacccccgaggcggggtcaggtggagcgtgggcgccagagcagcccctctgccttgggtgtcttggagatgacttggcgccccccggagccccgtcatggctgtggctgcgtccacaacactgcatcagcagagtcctggggaagccatttaggaatctgaagcccgggatttctgctttgtcccttcaggggttcctgagcctgttaaaaaaaaaaaaaaatctaggaagaggccctggaaggaaaaaggggagggagatagcctattttacaaggtctgaaatgatgtgtcttatccttctggcttaaaccaagctgggcttaaaacatcttttaaaaaaaatctgtattctatttttttctctctgtttatcgctctccttctgcctctgttaatctttgtttctgtgtagttgcatcctgtttctgtctgaaaacccttgtctttctgaatccatctttcagtctctcacattctgtctttcccctcctccttcaccttccctccgtccctctcccttgcgcacttgccgggtaccagctgagtgcatccttttcccaaacctgctctgcttccaaggggcccttttctgtctcctccacctgtccccatgttttggggactgcctggaaatccgggacaccctcctgaggagggagctggtgcccaacggcacctcttaggatgaacccagccagctgcgttcctggcctctgcagaatggcatacagaaggcattttaagcaagcgagctgagctcgccgcaggactccgactaccaggcaccggtggcagcacgcaaagggtgtccctgtccctcaaggggtcatggcctccatgttgctcgcccagcgcctggcctgcagcttccagcacagctaccgcctgctggtgcctggatccagacacattagtcaagctgcagccaaagtcgacgttgaatttgattatgatgggcctctgatgaagacggaagtcccagggcctagatctcaggagttaatgaaacagctgaatataattcagaatgcagaggctgtgcattttttctgcaattacgaagagagccgaggcaattacctggttgatgtggacggcaaccgaatgctggatctttattcccagatctcctctgtccccataggttacagccaccccgccctgctgaaactcatccaacagcctcaaaatgcgagcatgtttgtcaacagacccgccctcggaatcctgcctccggagaactttgtggagaagctccggcagtccttgctctcggtggctcccaaagggatgtcccagctcatcaccatggcctgcggctcctgctccaatgaaaacgccttaaagaccatcttcatgtggtaccggagcaaggaaagagggcagaggggcttctcccaggaggagctggagacgtgcatgattaaccaggcccctggctgccccgactacagcatcctctccttcatgggcgcgttccatgggaggaccatgggttgcttagcgaccacgcactctaaagccattcacaagatcgacatcccttcctttgactggcccatcgcaccgttcccacggctgaaataccctctggaagagtttgtgaaagagaaccaacaggaggaggcccgctgtctggaagaggtggaggatctgattgtgaaatatcggaaaaagaagaagacggtggccgggatcatcgtggagcccatccagtccgagggtggagacaaccacgcatccgatgacttctttcggaagctgagagacatcgccaggaagcatggctgcgccttcttggtggacgaggtccagaccggaggaggctgcacgggcaagttctgggcccatgagcactggggcctggatgacccagcagacgtgatgaccttcagcaagaagatgatgactgggggcttcttccacaaggaggagttcaggcctaatgctccctaccggatcttcaacacctggctgggggacccgtccaagaacctgttgctggctgaggtcatcaacatcatcaagcgggaggacctgctaaataatgcagcccatgccgggaaggccctgctcacaggactgctggacctccaggcccggtacccccagttcatcagcagggtgagaggacgaggcaccttttgctccttcgatactcccgatgattccatacggaataagctcattttaattgccagaaacaaaggtgtggtgttgggtggctgtggtgacaaatccattcgtttccgtcccacgctggtcttcagggatcaccacgctcacctgttcctcaatattttcagtgacatcttagcagacttcaagtaaagaagccatttccactacagtgagaaagcccggatcccaacagttgtcaaattgattagtttgcctaattcatgttttcacttaaaagtatcagaggtgaatgcacagtgaagggtgatttgtggggagggagcatttttggtggtcttgggggaggggaggggagggaagggctggtgttgattttcctccctgcagagccaatggtgcacattggtttaagcccagagatcctgcttgagccctggactcatcttgggaagggccatgggaggtcctggctagagttctgcccaaccttgaccaaccccagcaatttttccaaaagccagtcaagggcattacatttgttcctgggactggcagctgggcctcctgggtgccagtccatctcaagtgccatattctgtgatcacggatgttggctccccctcgccctatgcaagcaaacacactctcacctcctctcccagcctcccggagctctgagcacgccccacgcatggtgcaggagggactggacagatctgaggaaggccgtaaaatggggacaggaggattcagctcaggagtaagggaagaggtcctctggccccctgaagatgagaatcacccctctcagtgcacctggggatccccctaaactgtgaattctgccctggacagggctttgcccttggaggatccccaggtggccttacccgtgattcttactcggcatcctccattccccaaactccctcctccctgttaaatgtcaacctagacctggacctgggtgggaggaaactgtagcctgagtgtccacagggacacacgtgagccacagggctagaagcacaggcccgtcaccccaggaggaaaagcccagggtctggggcagcagagccatcgcatcatgtttcccagggcaacttgaggtctgacttttggctccctcgccctaagaggctcttcctctcttttgctcatccaccttcacaccacttgtgagctgacccccaggaacagcttggctgttccaccagagcagagggaatcattgctggactggatttcttctggagggaagcaccatgaattaaaggtgccagagctccatgcatggaaaagtggcctgttggttcaacgtggtttccttgtacttgatcctcctgaaatgagagattttcctgagatgactgagtatggagattaccaggcagatgataccgaaatgcttaaaggggctgtggctgaggctgtagcatctctgctggaggtgagacactctgggaactgatttgacctcgaatgctcctaaaagagaacttgatagcctgacagcagagaagtattatttggtggggagtctgagaaagcctggcttgtattatctgtccaaaaggaagcctcttcatctcccggtgccttggttgactattttggaaataggcatatcaaggttcctgattcagcactttgctcttttaataacaaatcgtccaaagatctcaaagtaagggtttttttttttagcttccactcttccgcagacttggtcatcgacctatttttgttgaagaatgaaaggcaatgacaagtttaacatatacaaattcgtgaattcttgttcattttgcattcctgcagtcagtgctaatccgtcgttcttaatcaggagttctgccaggtttaaggtcacctgcactcccagccaagtggtgatgtatgcctcccactctctgcaaggttttcctcatttttatattcatttattcatcattcattcattcacctaactttcattaaatagctgcaccatcccaggccctgtgcggagcatcgggaatacaaagatgagataaaacattgtccctgcccccgggggctcacatgccactggaaacaacagactcttaaactaacaattcaagcaggcgccaagtgctatgacagaggtgtgaataaaagcatcaggaaatcggatggagaaccaccattcacccaagggtcagaggaggtttcaaagaaaaggtgtcattggagcagtgttttgcagaatgagccagagttcaccaagcaggcaaggcaaggaagggtgttgcagagagggaacagcatatgcaaaggcgtatcagttcatggcatcacatctttcactggggaagccagtttccacaggcagcatcccaaggttcaataaggccttatttaacaagcaagcaaaatgcaaaccaaaccattattcatttattggcttaagtatgctttctcctgaaaactttagcattgggtgcaaatattcagtatggttctcggagtccaaagggttttaagccagggcacaaccagaaaagtggctctctttggtagggagaggggctccaatatttcgttctctccccatggggcactgacagagaaatgaaatagttttatctggaaaattccagagctattatttactccttaccaagggaagttacttcttgtaaaaacttttaagccatttatcaacaagttcttgttgactcagggcataatgagttcctgagacatgctcttttgggggctggggctttagctagaagaatttcaaggaaaagaattctcagcagagctcaagattgtagaaactcagcagaagctggtaaaaacatggggagcccggaggacaggctgctgtccagggcagaggccatgaagaagtgcttccgtggccgacagtctggaaatgaatccatcatacattagtgccatagagtttagtaaccgtccagcaagtgtcatcacttttacagaaaacaaggtccagtaatagcaagtcttagtacatcctcacttttattataaatgggtgttttttcataatttttactgacgctcagtaaccatgcaaaattgtgtatagcattaatgtatctacatacctacacctatctatatataagctcatggtagaaaaccatagctaagtagcatcgcagacttaagcgtacaaagtgatcttgttcacaagtaatctgttgacagtgccaataaatgataaaaaaaaaattaacatgtcacaatgtaacggatgaccatatgcacaattccatgaattaaatctgtttcctgtgttagtcagtattcttaaataaaatttataattgaaacatga

SEQ ID NO: 47 - DNA, 923 bp, Homo sapiens
  source 1..923: mol_type = unassigned DNA
gtgagtggggccgggacccgcagagccgagccgacccttctctcccgggctgcggcagggcagggcggggagctccgcgcaccaacagagccggttctcagggcgctttgctccttgttttttccccggttctgttttctccccttctccggaaggcttgtcaaggggtaggagaaagagacgcaaacacaaaagtggaaaacagtgtcagctgctgctggaagtggcctggcctctatttatcttcctgatcctgatctctgttcggctgagctacccaccctatgaacaacatgaatgccattttccaaataaagccatgccctctgcaggaacacttccttgggttcaggggattatctgtaatgccaacaacccctgtttccgttacccgactcctggggaggctcccggagttgttggaaactttaacaaatccattgtggctcgcctgttctcagatgctcggaggcttcttttatacagccagaaagacaccagcatgaaggacatgcgcaaagttctgagaacattacagcagatcaagaaatccagctcaaacttgaagcttcaagatttcctggtggacaatgaaaccttctctgggttcctgtatcacaacctctctctcccaaagtctactgtggacaagatgctgagggctgatgtcattctccacaaggtaagctgatgcctccagcttcctcagtagggctgatggcaattacgttgtgcagctactggaaagaaatgaataaacccttgtccttgtaatggtggtgaaggggagggaggtagtttgaatacaacttcacttaattttacttccctattcaggcaggaattgccaaaccatccaggagtggaatatgcaacctggcgtcatgggccagctggttaaaataaaattgatttctggctta

SEQ ID NO: 48 - DNA, 1540 bp, Homo sapiens
  source 1..1540: mol_type = unassigned DNA
gtgagtggggccgggacccgcagagccgagccgacccttctctcccgggctgcggcagggcagggcggggagctccgcgcaccaacagagccggttctcagggcgctttgctccttgttttttccccggttctgttttctccccttctccggaaggcttgtcaaggggtaggagaaagagacgcaaacacaaaagtggaaaacagttaatgaccagccacggcgtccctgctgtgagctctggccgctgccttccagggctcccgagccacacgctgggggtgctggctgagggaacatggcttgttggcctcagctgaggttgctgctgtggaagaacctcactttcagaagaagacaaacatgtcagctgctgctggaagtggcctggcctctatttatcttcctgatcctgatctctgttcggctgagctacccaccctatgaacaacatgaatgccattttccaaataaagccatgccctctgcaggaacacttccttgggttcaggggattatctgtaatgccaacaacccctgtttccgttacccgactcctggggaggctcccggagttgttggaaactttaacaaatccattgtggctcgcctgttctcagatgctcggaggcttcttttatacagccagaaagacaccagcatgaaggacatgcgcaaagttctgagaacattacagcagatcaagaaatccagctcaaacttgaagcttcaagatttcctggtggacaatgaaaccttctctgggttcctgtatcacaacctctctctcccaaagtctactgtggacaagatgctgagggctgatgtcattctccacaaggtatttttgcaaggctaccagttacatttgacaagtctgtgcaatggatcaaaatcagaagagatgattcaacttggtgaccaagaagtttctgagctttgtggcctaccaagggagaaactggctgcagcagagcgagtacttcgttccaacatggacatcctgaagccaatcctgatggatgtgacatgtgatgacattgcacatgggcagttaactgtgccaagaagtgcagcagtagcagcaaccggagatgcaaagcccaacatgatggggagagaaactcttctttcaatatgtgcttctgtaccaaaagtggaatttcacgagagacatattttgaaacatttctccttttgtgtgtgcgtgagtgtttccctgtttccagccaagggtattgtgagtttctcctgggcctccttcagaatctgggtgctctggaaagcagtgttttggcaacatggggaaagtatggcagtgtgggagggtcagctgggtctgggtttgaatattgcatttgaatattttaccagcattgatgtcggataaattatttagtccctgtaagcctcagttttctcttcttctacatacacataatatatttgactctttgttgtgattattggttacacatatgaagagcctggtgtggggcctggcacacaataggtgctcaataaatagaagttgataattt

SEQ ID NO: 49 - DNA, 807 bp, Homo sapiens
  source 1..807: mol_type = unassigned DNA
ggcaccgagaagaaaactggtgtctatatgcaacagatgccctatccctgttacgttgatgacatctttctgcgggtgatgagccggtcaatgcccctcttcatgacgctggcctggatttactcagtggctgtgatcatcaagggcatcgtgtatgagaaggaggcacggctgaaagagaccatgcggatcatgggcctggacaacagcatcctctggtttagctggttcattagtagcctcattcctcttcttgtgagcgctggcctgctagtggtcatcctgaagttaggaaacctgctgccctacagtgatcccagcgtggtgtttgtcttcctgtccgtgtttgctgtggtgacaatcctgcagtgcttcctgattagcacactcttctccagagccaacctggcagcagcctgtgggggcatcatctacttcacgctgtacctgccctacgtcctgtgtgtggcatggcaggactacgtgggcttcacactcaagatcttcgctagcctgctgtctcctgtggcttttgggtttggctgtgagtactttgccctttttgaggagcagggcattggagtgcagtgggacaacctgtttgagagtcctgtggaggaagatggcttcaatctcaccacttcggtctccatgatgctgtttgacaccttcctctatggggtgatgacctggtacattgaggctgtctttccaggtacactgctttgggcatctgtttggaaaatatgacttctagctgatgtcctttctttgtgctagaatctctgcagtgcatgggcttccctg

SEQ ID NO: 50 - DNA, 10494 bp, Homo sapiens
  source 1..10494: mol_type = unassigned DNA
agagcacaggctttgaccgatagtaacctctgcgctcggtgcagccgaatctataaaaggaactagtcccggcaaaaaccccgtaattgcgagcgagagtgagtggggccgggacccgcagagccgagccgacccttctctcccgggctgcggcagggcagggcggggagctccgcgcaccaacagagccggttctcagggcgctttgctccttgttttttccccggttctgttttctccccttctccggaaggcttgtcaaggggtaggagaaagagacgcaaacacaaaagtggaaaacagttaatgaccagccacggcgtccctgctgtgagctctggccgctgccttccagggctcccgagccacacgctgggggtgctggctgagggaacatggcttgttggcctcagctgaggttgctgctgtggaagaacctcactttcagaagaagacaaacatgtcagctgctgctggaagtggcctggcctctatttatcttcctgatcctgatctctgttcggctgagctacccaccctatgaacaacatgaatgccattttccaaataaagccatgccctctgcaggaacacttccttgggttcaggggattatctgtaatgccaacaacccctgtttccgttacccgactcctggggaggctcccggagttgttggaaactttaacaaatccattgtggctcgcctgttctcagatgctcggaggcttcttttatacagccagaaagacaccagcatgaaggacatgcgcaaagttctgagaacattacagcagatcaagaaatccagctcaaacttgaagcttcaagatttcctggtggacaatgaaaccttctctgggttcctgtatcacaacctctctctcccaaagtctactgtggacaagatgctgagggctgatgtcattctccacaaggtatttttgcaaggctaccagttacatttgacaagtctgtgcaatggatcaaaatcagaagagatgattcaacttggtgaccaagaagtttctgagctttgtggcctaccaagggagaaactggctgcagcagagcgagtacttcgttccaacatggacatcctgaagccaatcctgagaacactaaactctacatctcccttcccgagcaaggagctggctgaagccacaaaaacattgctgcatagtcttgggactctggcccaggagctgttcagcatgagaagctggagtgacatgcgacaggaggtgatgtttctgaccaatgtgaacagctccagctcctccacccaaatctaccaggctgtgtctcgtattgtctgcgggcatcccgagggaggggggctgaagatcaagtctctcaactggtatgaggacaacaactacaaagccctctttggaggcaatggcactgaggaagatgctgaaaccttctatgacaactctacaactccttactgcaatgatttgatgaagaatttggagtctagtcctctttcccgcattatctggaaagctctgaagccgctgctcgttgggaagatcctgtatacacctgacactccagccacaaggcaggtcatggctgaggtgaacaagaccttccaggaactggctgtgttccatgatctggaaggcatgtgggaggaactcagccccaagatctggaccttcatggagaacagccaagaaatggaccttgtccggatgctgttggacagcagggacaatgaccacttttgggaacagcagttggatggcttagattggacagcccaagacatcgtggcgtttttggccaagcacccagaggatgtccagtccagtaatggttctgtgtacacctggagagaagctttcaacgagactaaccaggcaatccggaccatatctcgcttcatggagtgtgtcaacctgaacaagctagaacccatagcaacagaagtctggctcatcaacaagtccatggagctgctggatgagaggaagttctgggctggtattgtgttcactggaattactccaggcagcattgagctgccccatcatgtcaagtacaagatccgaatggacattgacaatgtggagaggacaaataaaatcaaggatgggtactgggaccctggtcctcgagctgacccctttgaggacatgcggtacgtctgggggggcttcgcctacttgcaggatgtggtggagcaggcaatcatcagggtgctgacgggcaccgagaagaaaactggtgtctatatgcaacagatgccctatccctgttacgttgatgacatctttctgcgggtgatgagccggtcaatgcccctcttcatgacgctggcctggatttactcagtggctgtgatcatcaagggcatcgtgtatgagaaggaggcacggctgaaagagaccatgcggatcatgggcctggacaacagcatcctctggtttagctggttcattagtagcctcattcctcttcttgtgagcgctggcctgctagtggtcatcctgaagttaggaaacctgctgccctacagtgatcccagcgtggtgtttgtcttcctgtccgtgtttgctgtggtgacaatcctgcagtgcttcctgattagcacactcttctccagagccaacctggcagcagcctgtgggggcatcatctacttcacgctgtacctgccctacgtcctgtgtgtggcatggcaggactacgtgggcttcacactcaagatcttcgctagcctgctgtctcctgtggcttttgggtttggctgtgagtactttgccctttttgaggagcagggcattggagtgcagtgggacaacctgtttgagagtcctgtggaggaagatggcttcaatctcaccacttcggtctccatgatgctgtttgacaccttcctctatggggtgatgacctggtacattgaggctgtctttccaggccagtacggaattcccaggccctggtattttccttgcaccaagtcctactggtttggcgaggaaagtgatgagaagagccaccctggttccaaccagaagagaatatcagaaatctgcatggaggaggaacccacccacttgaagctgggcgtgtccattcagaacctggtaaaagtctaccgagatgggatgaaggtggctgtcgatggcctggcactgaatttttatgagggccagatcacctccttcctgggccacaatggagcggggaagacgaccaccatgtcaatcctgaccgggttgttccccccgacctcgggcaccgcctacatcctgggaaaagacattcgctctgagatgagcaccatccggcagaacctgggggtctgtccccagcataacgtgctgtttgacatgctgactgtcgaagaacacatctggttctatgcccgcttgaaagggctctctgagaagcacgtgaaggcggagatggagcagatggccctggatgttggtttgccatcaagcaagctgaaaagcaaaacaagccagctgtcaggtggaatgcagagaaagctatctgtggccttggcctttgtcgggggatctaaggttgtcattctggatgaacccacagctggtgtggacccttactcccgcaggggaatatgggagctgctgctgaaataccgacaaggccgcaccattattctctctacacaccacatggatgaagcggacgtcctgggggacaggattgccatcatctcccatgggaagctgtgctgtgtgggctcctccctgtttctgaagaaccagctgggaacaggctactacctgaccttggtcaagaaagatgtggaatcctccctcagttcctgcagaaacagtagtagcactgtgtcatacctgaaaaaggaggacagtgtttctcagagcagttctgatgctggcctgggcagcgaccatgagagtgacacgctgaccatcgatgtctctgctatctccaacctcatcaggaagcatgtgtctgaagcccggctggtggaagacatagggcatgagctgacctatgtgctgccatatgaagctgctaaggagggagcctttgtggaactctttcatgagattgatgaccggctctcagacctgggcatttctagttatggcatctcagagacgaccctggaagaaatattcctcaaggtggccgaagagagtggggtggatgctgagacctcagatggtaccttgccagcaagacgaaacaggcgggccttcggggacaagcagagctgtcttcgcccgttcactgaagatgatgctgctgatccaaatgattctgacatagacccagaatccagagagacagacttgctcagtgggatggatggcaaagggtcctaccaggtgaaaggctggaaacttacacagcaacagtttgtggcccttttgtggaagagactgctaattgccagacggagtcggaaaggattttttgctcagattgtcttgccagctgtgtttgtctgcattgcccttgtgttcagcctgatcgtgccaccctttggcaagtaccccagcctggaacttcagccctggatgtacaacgaacagtacacatttgtcagcaatgatgctcctgaggacacgggaaccctggaactcttaaacgccctcaccaaagaccctggcttcgggacccgctgtatggaaggaaacccaatcccagacacgccctgccaggcaggggaggaagagtggaccactgccccagttccccagaccatcatggacctcttccagaatgggaactggacaatgcagaacccttcacctgcatgccagtgtagcagcgacaaaatcaagaagatgctgcctgtgtgtcccccaggggcaggggggctgcctcctccacaaagaaaacaaaacactgcagatatccttcaggacctgacaggaagaaacatttcggattatctggtgaagacgtatgtgcagatcatagccaaaagcttaaagaacaagatctgggtgaatgagtttaggtatggcggcttttccctgggtgtcagtaatactcaagcacttcctccgagtcaagaagttaatgatgccatcaaacaaatgaagaaacacctaaagctggccaaggacagttctgcagatcgatttctcaacagcttgggaagatttatgacaggactggacaccaaaaataatgtcaaggtgtggttcaataacaagggctggcatgcaatcagctctttcctgaatgtcatcaacaatgccattctccgggccaacctgcaaaagggagagaaccctagccattatggaattactgctttcaatcatcccctgaatctcaccaagcagcagctctcagaggtggctctgatgaccacatcagtggatgtccttgtgtccatctgtgtcatctttgcaatgtccttcgtcccagccagctttgtcgtattcctgatccaggagcgggtcagcaaagcaaaacacctgcagttcatcagtggagtgaagcctgtcatctactggctctctaattttgtctgggatatgtgcaattacgttgtccctgccacactggtcattatcatcttcatctgcttccagcagaagtcctatgtgtcctccaccaatctgcctgtgctagcccttctacttttgctgtatgggtggtcaatcacacctctcatgtacccagcctcctttgtgttcaagatccccagcacagcctatgtggtgctcaccagcgtgaacctcttcattggcattaatggcagcgtggccacctttgtgctggagctgttcaccgacaataagctgaataatatcaatgatatcctgaagtccgtgttcttgatcttcccacatttttgcctgggacgagggctcatcgacatggtgaaaaaccaggcaatggctgatgccctggaaaggtttggggagaatcgctttgtgtcaccattatcttgggacttggtgggacgaaacctcttcgccatggccgtggaaggggtggtgttcttcctcattactgttctgatccagtacagattcttcatcaggcccagacctgtaaatgcaaagctatctcctctgaatgatgaagatgaagatgtgaggcgggaaagacagagaattcttgatggtggaggccagaatgacatcttagaaatcaaggagttgacgaagatatatagaaggaagcggaagcctgctgttgacaggatttgcgtgggcattcctcctggtgagtgctttgggctcctgggagttaatggggctggaaaatcatcaactttcaagatgttaacaggagataccactgttaccagaggagatgctttccttaacaaaaatagtatcttatcaaacatccatgaagtacatcagaacatgggctactgccctcagtttgatgccatcacagagctgttgactgggagagaacacgtggagttctttgcccttttgagaggagtcccagagaaagaagttggcaaggttggtgagtgggcgattcggaaactgggcctcgtgaagtatggagaaaaatatgctggtaactatagtggaggcaacaaacgcaagctctctacagccatggctttgatcggcgggcctcctgtggtgtttctggatgaacccaccacaggcatggatcccaaagcccggcggttcttgtggaattgtgccctaagtgttgtcaaggaggggagatcagtagtgcttacatctcatagtatggaagaatgtgaagctctttgcactaggatggcaatcatggtcaatggaaggttcaggtgccttggcagtgtccagcatctaaaaaataggtttggagatggttatacaatagttgtacgaatagcagggtccaacccggacctgaagcctgtccaggatttctttggacttgcatttcctggaagtgttctaaaagagaaacaccggaacatgctacaataccagcttccatcttcattatcttctctggccaggatattcagcatcctctcccagagcaaaaagcgactccacatagaagactactctgtttctcagacaacacttgaccaagtatttgtgaactttgccaaggaccaaagtgatgatgaccacttaaaagacctctcattacacaaaaaccagacagtagtggacgttgcagttctcacatcttttctacaggatgagaaagtgaaagaaagctatgtatgaagaatcctgttcatacggggtggctgaaagtaaagaggaactagactttcctttgcaccatgtgaagtgttgtggagaaaagagccagaagttgatgtgggaagaagtaaactggatactgtactgatactattcaatgcaatgcaattcaatgcaatgaaaacaaaattccattacaggggcagtgcctttgtagcctatgtcttgtatggctctcaagtgaaagacttgaatttagttttttacctatacctatgtgaaactctattatggaacccaatggacatatgggtttgaactcacacttttttttttttttttgttcctgtgtattctcattggggttgcaacaataattcatcaagtaatcatggccagcgattattgatcaaaatcaaaaggtaatgcacatcctcattcactaagccatgccatgcccaggagactggtttcccggtgacacatccattgctggcaatgagtgtgccagagttattagtgccaagtttttcagaaagtttgaagcaccatggtgtgtcatgctcacttttgtgaaagctgctctgctcagagtctatcaacattgaatatcagttgacagaatggtgccatgcgtggctaacatcctgctttgattccctctgataagctgttctggtggcagtaacatgcaacaaaaatgtgggtgtctccaggcacgggaaacttggttccattgttatattgtcctatgcttcgagccatgggtctacagggtcatccttatgagactcttaaatatacttagatcctggtaagaggcaaagaatcaacagccaaactgctggggctgcaagctgctgaagccagggcatgggattaaagagattgtgcgttcaaacctagggaagcctgtgcccatttgtcctgactgtctgctaacatggtacactgcatctcaagatgtttatctgacacaagtgtattatttctggctttttgaattaatctagaaaatgaaaagatggagttgtattttgacaaaaatgtttgtactttttaatgttatttggaattttaagttctatcagtgacttctgaatccttagaatggcctctttgtagaaccctgtggtatagaggagtatggccactgccccactatttttattttcttatgtaagtttgcatatcagtcatgactagtgcctagaaagcaatgtgatggtcaggatctcatgacattatatttgagtttctttcagatcatttaggatactcttaatctcacttcatcaatcaaatattttttgagtgtatgctgtagctgaaagagtatgtacgtacgtataagactagagagatattaagtctcagtacacttcctgtgccatgttattcagctcactggtttacaaatataggttgtcttgtggttgtaggagcccactgtaacaatactgggcagcctttttttttttttttttaattgcaacaatgcaaaagccaagaaagtataagggtcacaagtctaaacaatgaattcttcaacagggaaaacagctagcttgaaaacttgctgaaaaacacaacttgtgtttatggcatttagtaccttcaaataattggctttgcagatattggataccccattaaatctgacagtctcaaatttttcatctcttcaatcactagtcaagaaaaatataaaaacaacaaatacttccatatggagcatttttcagagttttctaacccagtcttatttttctagtcagtaaacatttgtaaaaatactgtttcactaatacttactgttaactgtcttgagagaaaagaaaaatatgagagaactattgtttggggaagttcaagtgatctttcaatatcattactaacttcttccactttttccagaatttgaatattaacgctaaaggtgtaagacttcagatttcaaattaatctttctatattttttaaatttacagaatattatataacccactgctgaaaaagaaaaaaatgattgttttagaagttaaagtcaatattgattttaaatataagtaatgaaggcatatttccaataactagtgatatggcatcgttgcattttacagtatcttcaaaaatacagaatttatagaataatttctcctcatttaatatttttcaaaatcaaagttatggtttcctcattttactaaaatcgtattctaattcttcattatagtaaatctatgagcaactccttacttcggttcctctgatttcaaggccatattttaaaaaatcaaaaggcactgtgaactattttgaagaaaacacaacattttaatacagattgaaaggacctcttctgaagctagaaacaatctatagttatacatcttcattaatactgtgttaccttttaaaatagtaattttttacattttcctgtgtaaacctaattgtggtagaaatttttaccaactctatactcaatcaagcaaaatttctgtatattccctgtggaatgtacctatgtgagtttcagaaattctcaaaatacgtgttcaaaaatttctgcttttgcatctttgggacacctcagaaaacttattaacaactgtgaatatgagaaatacagaagaaaataataagccctctatacataaatgcccagcacaattcattgttaaaaaacaaccaaacctcacactactgtatttcattatctgtactgaaagcaaatgctttgtgactattaaatgttgcacatcattcattcactgtatagtaatcattgactaaagccatttgtctgtgttttcttcttgtggttgtatatatcaggtaaaatattttccaaagagccatgtgtcatgtaatactgaaccactttgatattgagacattaatttgtacccttgttattatctactagtaataatgtaatactgtagaaatattgctctaattcttttcaaaattgttgcatcccccttagaatgtttctatttccataaggatttaggtatgctattatcccttcttataccctaagatgaagctgtttttgtgctctttgttcatcattggccctcattccaagcactttacgctgtctgtaatgggatctatttttgcactggaatatctgagaattgcaaaactagacaaaagtttcacaacagatttctaagttaaatcattttcattaaaaggaaaaaagaaaaaaaattttgtatgtcaataactttatatgaagtattaaaatgcatatttctatgttgtaatataatgagtcacaaaataaagctgtgacagttctgttggtctacagaaa

SEQ ID NO: 51 - DNA, 467 bp, Homo sapiens
  source 1..467: mol_type = unassigned DNA
ggaagcagggctggggaagaaatggcaaactagggatcttacctgggccttcccagttgagactacgtcaaaatgggctcccatgagactgcctggctcatgcagatggaaggctaacatctttttagaaacaactcgtgctaccctctcctgttccaaaagcctgtctggtcagaatggtgtgatgagccctcctcttcagctaggaaaatgacggtgttcagaaagttaaaacttcttcgctggaaggatttcatcttaaagttgggagactggaagaaattaaagtgttctaaatggaagagcattcaccacatgtgttctgttttgggttgacatttagcttttgtttttattttagaaacggaagactctggtagcagtccttgaaatcttgatgccattgctattttctgcattgtattgtatcttcgttttagtagtgctccaataaaaagacctgctac

SEQ ID NO: 52 - DNA, 328 bp, Homo sapiens
  source 1..328: mol_type = unassigned DNA
ctaccctctcctgttccaaaagcctgtctggtcagaatggtgtgatgagccctcctcttcagctaggaaaatgacggtgttcagaaagttaaaacttcttcgctggaaggatttcatcttaaagttgttttaggctgttcttcagtgtctttgtttgaacgttatataattgatgatcccaaagctttctacatattggcaggaattgtttttgaccacagcgtcaatgacagcaatggatctttgccacttgcggttaagtatcaattgcgcttcagttactttcagaagaattttatactggggaagaatatattttttcaagatg

SEQ ID NO: 53 - DNA, 4188 bp, Homo sapiens
  source 1..4188: mol_type = unassigned DNA
gtcagccaccctgcgagtacgcggttcgcacccggccgcgcggcagcccgtgcttgcgcactgctctgtgcccgcgcctatgtccagcagggggcgcgcagcggcggtagccgagcgagggcgcggtggcctctgacaggaatgactctgcgcacgtgcgtttcgcagcagtggaagtcttcacacccggaaactcgactttggccgtttctccatttctcctcacgcactgtctttccttgggccctcgtcactcctggcaccgggggaagggcttccccgcctctggccgggcgctggggcgcgaccgaaggcgaggcggcggcgaggaaccttctggaattcggccgtcggggcaggcgtcgagtttacaggagaaggcgcggtgtcccgggatgagcggagtcgccctcacttaaggagcgagggaggcctcgggggtccccagccggtgatgagccctcctcttcagctaggaaaatgacggtgttcagaaagttaaaacttcttcgctggaaggatttcatcttaaagttgttttaggctgttcttcagtgtctttgtttgaacgttatataattgatgatcccaaagctttctacatattggcaggaattgtttttgaccacagcgtcaatgacagcaatggatctttgccacttgcggttaagtatcaattgcgcttcagttactttcagaagaattttatactggggaagaatatattttttcaagatgacatagaaggctggtgcacatcctttctttaccctcccaatccacgccaagaaccccgggaatttccatttgctgttgggggaagtcctggatacaacaaagaaggcttcctggccatacagtatgctgtggataaagccatcatgtggtaccatgctcacaatgcaatgaccaacatgtttgagaatctcaatgtacttgtgaagagattcccatatggaccctatatcgaggacaggttcttcctagtccttcagaatgagttttctgtgttcttcatactcagcttcatgtacattgagctcatcatcatcagttccattgtactggagaaagagaaaagactgaaggattacctgtgcgtgatgggactggaaagctggttacactgggttgcttggttcatcacgttcttcatttctgtcttcattgctgtttctttcatgaccattctcttctgcacagaggtcttattccccctacaagtggatgtgcatatgtcaatggatatgaaatttcacaagagatatttcacattaggaagagcctgggctggtgccccaacatgatgtcttatctgataagttaacagtagcagaacatctttctttctatggtcagctgaagggcctgtcacgtcagaagtgccctgaagtcaagcaggtgctgcacatcataggcctggaggacaagtggaactcacggagccgcttcctgagcgggggcatgagccgcaagctctccatcggcatcgccctcatcgcaggctccaaggtttgaatctctatttactgacttggaactgaggcaggtagagctgggcatctccagctttggggcctctgtcatgaccatggaggatgtcttcataagggtttgtatgttggcagatgccagtacagctgtcccaaacatcaaacatccctctatccatccccagccctgcttagcagaattcctgttgacagaattaaacatcttcattcgaggaccttctcaatacggactgggctgccaatcaaaccaaacactgggttcagtcttctctgccaacaattttatgccatgctcctgaaaaaggtcacatattcttaacacaactggatgttgatgttatcaatacagatcctggtccctctggtgatcatcatgttaagcctcacattcttcaacttcaaagaaagaagcatagaaaatgtcccattggagctgactctgaaaacatatggtcagaccattgttcctttctttatttctcagaattccaggctggatcctcaactttcagaacgctttgcaaatatgtttatggttgagggacagattcctctggaggtcctaggttctgtagatgagttcctattgaaaaaggcaaaagaggagcctgaggactttgataagctctacttagtggcagcttcctttgaagacgtgggaaatcacaccatagtgacagcgctgttcaacaaccaggcataccattcttctgccctggctctggcgctattggacaattttctcttgaagttgctttctggtgccagggcttccattaccgcagccaaccaccctcaacctcagccagccagggaggattcagagaatttcctgtatcaggaacctaaaggacattaccttgttatcaacttgctttttggattagctttcctgtctagctctttttccatgttgacagtcagagagaggcgcgttaaggccaagcttgtccagtttatcaatggagtttatgtggccactttctggctctccactctgctatgggacctcatctccttcctcattcccagtctgctgctggtggtatggcggtggattggttactgtcctcagtttgatgctctgctgaacttcatgacaggccatgagatgctggtcatgtatgcccagatcgggggcatcccagagcaccccatcagtgcttgtgtggaccagattcttgaggatttagtcatgtacatgtacgccaacaagctggtcaagacctacagcatggaggagtgtgaggccctgtgcagccggcggccatcatggtgcaggggcagttcaagtgcctgggcagcccccagcacctcaagagcaagttcagcagtggctactccctgcgggccaaggtgcagagtgaagggcagcaggaggtgctggaggagttcaaggccttcgtggacctgacctttccaggcagcgttcttgaagacaagcaccaaggcatggtccattaccatctgctgggccgcgacctcagctgggcgaagttgagcgcacatttttgacgtgacccactttctggggtgtttggcactctggagcaagccaagaagtacatgctggacaactactcagcagtcaggtcaccatggaggacgtcttcctgagcttcgcatgccctgtgcccctggtccaaagcgaagaccaacgagagcaagcagagcaggtgggctcctcatcgtgctcgctgcctccttccctgcctccctctcggctttcctctcagtctccctccctgcctccctctcagcttttctctcggcctccctccctgcctcctccctcagagcctgtcctgctgtaataaggacagaccagtgccaggttggcccaggtgtgcatggccttccctgggtttccagggcgtacagaggcagctctcgacctagctagctcagcacagggctgtccccctaactgcagtgcacggagcagagtggggcccactggagaacttaagaggcccgctggagaacccaggtgcgtttccttagaaagggatgcccaagtcccacctgagtagcctgtggtcttattgagacctggctgtggaagcagcctcagaacatcttgcatgtcctttccaagggcggtggccatggggtgactacagtactaaccatgacccgaccaggtgccaactctgtggttggtcccctgcaggcattgcgtcatttgatcacatcaccctcaggcccggccttaaggggtctgtcctggtcatccccttgctcatgggcaagaagtctgcagggcagagggaaatgctcacccaaagcttgcgctcttccttctctagaatcccctgcccagatggtttgtccatccagtgcactccctcccagggcaggccatgccgcccaacgcaccctgagatgcgagatgcagcaaagcagtggctctgcagaacttcgggtagagtttggatgggtgcgtggaggtttccacacatgtgtgcagatcccttggaaagcaggatagagccagaaacagagaggagggtgcccgtaggccgctgggggctggctcccatggtcacatgcaagagtgaagcttcatggagaccatgattctaaactcacacctggcctcacaggtggtaatgtcactgttcttctgaaggaaggaggaaataaatattgacaagtttgctagcctaagtcg

SEQ ID NO: 54 - DNA, 1700 bp, Homo sapiens
  source 1..1700: mol_type = unassigned DNA
gtgcttgcgcactgctctgtgcccgcgcctatgtccagcagggggcgcgcagcggcggtagccgagcgagggcgcggtggcctctgacaggaatgactctgcgcacgtgcgtttcgcagcagtggaagtcttcacacccggaaactcgactttggccgtttctccatttctcctcacgcactgtctttccttgggccctcgtcactcctggcaccgggggaagggcttccccgcctctggccgggcgctggggcgcgaccgaaggcgaggcggcggcgaggaaccttctggaattcggccgtcggggcaggcgtcgagtttacaggagaaggcgcggtgtcccgggatgagcggagtcgccctcacttaaggagcgagggaggcctcgggggtccccagccggtgatgagccctcctcttcagctaggaaaatgacggtgttcagaaagttaaaacttcttcgctggaaggatttcatcttaaagttgggagactggaagaaattaaagtgttctaaatggaagagcattcaccacatgtgttctgttttgggttgacatttagcttttgtttttattttagaaacggaagactctggtagcagtccttgaaatcttgatgccattgctattttctgcattgtattgtatcttcgttttagtagtgctccaataaaaagacctgctactagctgccatgcaattgatatcagtttgttgccagacttctacaattttcctgaaaaatagatttcaactagtttatatcccttctataagtgaaacattgaaggctgtcaccgaaatggtggaacagatctttgatgttgagtttgaaggttagatgtaaatatgggtaaggatcgggaggacatttttataaagtacagtttgaagtttttccccgagagttcttacagtagtgattctaaatctagtgtctccaaattctaaagagcctatgaggtggtagttggggggaagctgtccatgagatatttttattatttcaaacaacatatggagtcttgtctatatatgtcagaaggcttcaaggctaattaaaatgttaaatgttaagtatttgtttttaactcactatcatgacacctattatctcatattaatccaaaggtctgattggcaattatatgtctctaataaaaaatggaaggcattcagagagtcagagggtctgaaatagcttctaacttgttaactggtctctgcttctcctcttgtcccattctaatccagtctccgtgtggaggcagaaagatcttcaaaagctcaataggatccagctagtctctagcttaaaccccttcagtggcttcccattgccctgaaagaaaaccagctcttctccaggttctgaccctgcttttttcccagtcttatctagtttggctctttattgtgctcccacacactggtcatgttggtcttttacttcctagaaagcagctacatgaggttttctcccaatagggcctttgcagcaggtgttccttctgacagtgctttgccctcagccttccctgtgcattgctccctcttagtcttcacgtttcagctgaactgatgcctaggaaagcagctaaatcggttttaggtttctcacctctgccttattctctgtcacagaaccctgttttatactttctatcaaaaagggaattttaataaatgtttacatat

SEQ ID NO: 55 - DNA, 476 bp, Homo sapiens
  source 1..476: mol_type = unassigned DNA
actttggccgtttctccatttctcctcacgcactgtctttccttgggccctcgtcactcctggcaccgggggaagggcttccccgcctctggccgggcgctggggcgcgaccgaaggcgaggcggcggcgaggaaccttctggaattcggccgtcggggcaggcgtcgagtttacaggagaaggcgcggtgtcccgggatgagcggagtcgccctcacttaaggagcgagggaggcctcgggggtccccagccggaaatgaaaattggacatttgacatttgaacctctctcctgtgtttggaaaactctccatcaatgtgatacaatggtggaaagcggggtctaggctcaatggaacagatggagtctcgctctgttgcccaagctggagtgcagtggcgggatctcggctcactgcaacctttgcctcctggattccagcgattcttgtgcctcagcctcacaagtaggtgag

SEQ ID NO: 56 - DNA, 466 bp, Homo sapiens
  source 1..466: mol_type = unassigned DNA
caaatccagtaccagaactggctgactcagaatttaccttagatggaagatagggtaggaattttggaagaaggatgaccttacagatcaagacagacaattgcaggaaatgaaaattggacatttgacatttgaacctctctcctgtgtttggaaaactctccatcaatgtgatacaatggtggaaagcggggtctaggctcaatggaacagatggagtctcgctctgttgcccaagctggagtgcagtggcgggatctcggctcactgcaacctttgcctcctggattccagcgattcttgtgcctcagcctcacaagtagtgatgagccctcctcttcagctaggaaaatgacggtgttcagaaagttaaaacttcttcgctggaaggatttcatcttaaagttgggagactggaagaaattaaagtgttctaaatggaagagcattcaccacatgtgttctg

SEQ ID NO: 57 - DNA, 3478 bp, Homo sapiens
  source 1..3478: mol_type = unassigned DNA
atgacggtgttcagaaagttaaaacttcttcgctggaaggatttcatcttaaagttggtatggttatctgtgggaagatataagtccttgggggggattgaatgtttaagttaaattggttcataataacgggttaaagaacaattaagaactttacatggaaaggggcccttttctgcaaatgagtcatgtaattattaaagatgacatcattgttactgatttctggccattggagttacagaaaggctaaaaggagatgtttcaagctaattcttactctgtgtttttctttttcgtgtgttttgcagggagactggaagaaattaaagtgttctaaatggaagagcattcaccacatgtgttctgttttgggttgacatttagcttttgtttttattttagaaacggaagactctggtagcagtccttgaaatcttgatgccattgctattttctgcattgtattgtatcttcgttttagtagtgctccaataaaaagacctgctactagctgccatgcaattgatatcagtttgttgccagacttctacaattttcctgaaaaatagatttcaactagtttatatcccttctataagtgaaacattgaaggctgtcaccgaaatggtggaacagatctttgatgttgagtttgaaggctgttcttcagtgtctttgtttgaacgttatataattgatgatcccaaagctttctacatattggcaggaattgtttttgaccacagcgtcaatgacagcaatggatctttgccacttgcggttaagtatcaattgcgcttcagttactttcagaagaattttatactggggaagaatatattttttcaagatgacatagaaggctggtgcacatcctttctttaccctcccaatccacgccaagaaccccgggaatttccatttgctgttgggggaagtcctggatacaacaaagaaggcttcctggccatacagtatgctgtggataaagccatcatgtggtaccatgctcacaatgcaatgaccaacatgtttgagaatctcaatgtacttgtgaagagattcccatatggaccctatatcgaggacaggttcttcctagtccttcagaatgagttttctgtgttcttcatactcagcttcatgtacattgagctcatcatcatcagttccattgtactggagaaagagaaaagactgaaggattacctgtgcgtgatgggactggaaagctggttacactgggttgcttggttcatcacgttcttcatttctgtcttcattgctgtttctttcatgaccattctcttctgcacagagaaatgtggcactgcttaagaacagtgaccctagtctgatatttgtttttctaatgtgttttgccattgccacaattttctttgcattcatgatcagcacattcttccaaagaggtcttattccccctacaagtggatgtgcatatgtcaatggatatgaaatttcacaagagatatttcacattaggaagagcctgggctggtgccccaacatgatgtcttatctgataagttaacagtagcagaacatctttctttctatggtcagctgaagggcctgtcacgtcagaagtgccctgaagtcaagcaggtgctgcacatcataggcctggaggacaagtggaactcacggagccgcttcctgagcgggggcatgagccgcaagctctccatcggcatcgccctcatcgcaggctccaaggtttgaatctctatttactgacttggaactgaggcaggtagagctgggcatctccagctttggggcctctgtcatgaccatggaggatgtcttcataagtcttctctgccaacaattttatgccatgctcctgaaaaaggtcacatattcttaacacaactggatgttgatgttatcaatacagatcctggtccctctggtgatcatcatgttaagcctcacattcttcaacttcaaagaaagaagcatagaaaatgtcccattggagctgactctgaaaacatatggtcagaccattgttcctttctttatttctcagaattccaggctggatcctcaactttcagaacgctttgcaaatatgtttatggttgagggacagattcctctggaggtcctaggttctgtagatgagttcctattgaaaaaggcaaaagaggagcctgaggactttgataagctctacttagtggcagcttcctttgaagacgtgggaaatcacaccatagtgacagcgctgttcaacaaccaggcataccattcttctgccctggctctggcgctattggacaattttctcttgaagttgctttctggtgccagggcttccattaccgcagccaaccaccctcaacctcagccagccagggaggattcagagaaaaggacattaccttgttatcaacttgctttttggattagctttcctgtctagctctttttccatgttgacagtcagagagaggcgcgttaaggccaagcttgtccagtttatcaatggagtttatgtggccactttctggctctccactctgctatgggacctcatctccttcctcattcccagtctgctgctggtgatctcaaaatccttggattatacattcctaatacttccagggcactgcctggggatggctttcaccaacttatattacaactctgaactacagaggttttgcagtgtcaagaacctgagtgtatggcggtggattggttactgtcctcagtttgatgctctgctgaacttcatgacaggccatgagatgctggtcatgtatgcccagatcgggggcatcccagagcaccccatcagtgcttgtgtggaccagattcttgaggatttagtcatgtacatgtacgccaacaagctggtcaagacctacagggtggtggtaacaagccgaagttgagcactggcattgatcgccctgattggagagcctgccttcatcttcctggatgagccatccactggcatggaccccgtggcccggcgcctgttctggaatgctgtggcacacgcccacgagtctggcaaggccatcatcatcacctcccatagcatggaggagtgtgaggccctgtgcagccggcggccatcatggtgcaggggcagttcaagtgcctgggcagcccccagcacctcaagagcaagttcagcagtggctactccctgcgggccaaggtgcagagtgaagggcagcaggaggtgctggaggagttcaaggccttcgtggacctgacctttccaggcagcgttcttgaagacaagcaccaaggcatggtccattaccatctgctgggccgcgacctcagctgggcgaagtgtttggcactctggagcaagccaagaagtacatgctggacaactactcagcagtcaggtcaccatggaggacgtcttcctgagcttcgcatgccctgtgcccctggtccaaagcgaagaccaacg

SEQ ID NO: 58 - DNA, 5677 bp, Homo sapiens
  source 1..5677: mol_type = unassigned DNA
cagaagtcaaatagttaaagcaaattctagatacatggtagagaccaggagaaaatatgaataactttcttctaaacaaggagctcagtggataaaccatacctctagattccttgcttccattttcccagaaacaagatgaggaagagaaagatcagtgtgtgtcaacaaacttgggccttattatgcaagaactttcttaaaaaatggagaatgaaaagagagtccttaatggaatggctgaattcattgctcctactactttgtttgtatatatatcctcatagtcatcaagtaaatgatttttcttcactgcttaccatggacctgggacgggtagatacatttaatgaatccagattttctgttgtatacacacctgtcaccaacacgacccaacagataatgaataaagtagcctctactcccttcctggcaggtaaagaggtcttgggactgccagatgaggaaagtattaaagaattcacagcaaattatcctgaagaaatagtaagagtcacctttactaatacatactcatatcatttgaagttcttgctaggacatggaatgccagcaaagaaggagcacaaggaccatacagctcattgttatgaaacaaatgaagatgtttactgtgaagtttcagtattttggaaggaaggttttgtggctcttcaagctgccattaatgctgctattatagaaatcacaacaaatcactcagtgatggaggagctgatgtcagttactggaaaaaatatgaagatgcattccttcattggtcaatcaggagttataactgatttgtaccttttttcctgcattatttcattttcctcattcatttactatgcatctgttaatgtcacaagagagaggaaaaggatgaaggccttgatgacaatgatgggtcttcgggattcagcgttctggctctcctggggtttgctctatgctggtttcatcttcattatggcccttttcttggcacttgttataagatctacccagtttatcattttgtctggcttcatggtagtcttcagcctctttctcctgtatggattatctttggtagctttggctttcttaatgagcatcttggtaaagaaatctttcctcaccggcctggtcgtgttcctcctcactgtcttttgggggtgtctggggttcacatcactgtacagacaccttcctgcatccttggagtggattttaagcttgcttagtccctttgccttcatgcttggaatggcccagcttttacacttggactatgatttgaattctaatgcatttcctcatccatcggacggctcaaatctcattgtagcaacaaatttcatgttggcatttgacacttgcctctatctggcattggcgatttactttgaaaaaattttgccaaatgaatatggacatcgacgtccacctttgtttttcctgaagtcctcattttggtctcaaacacaaaagactgatcacgtggcccttgaagatgaaatggatgccgatccttcatttcatgactcttttgaacaagcgcctccagaattccaagggaaagaagccatcagaatcagaaatgttacaaaagaatataaaggaaagcctgataaaatagaagccttgaaagatctggtatttgacatttacgaaggccaaatcactgcaatacttggtcacagtggagctggaaagtcaacactgctaaacattcttagtgggttgtctgttcccaccaaaggttcagtcaccatctataacaataagctttcagaaatggctgacctagaaaatctcagcaagctgaccggagtttgtccacaatccaatgtgcaatttgacttcctcactgtaagagaaaacctcagactctttgctaaaataaaagggattctgccacaagaagtggataaagagattttcctgttggatgaaccaactgctggattggatcccttttcaagacaccaagtatggaaccttctgaaagaacgcaaaacagaccgcgtgatcctcttcagtacccagttcatggatgaggccgacatcctggcggacaggaaagtatttctctcccaagggaagctaaagtgcgcgggctcttctttgtttctaaagaagaaatgggggattggatatcacttaagcttgcagttaaatgaaatatgtgttgaggaaaacataacatcacttgttaaacagcacatccctgatgccaaattatcagccaaaagcgaaggaaaacttatttatacattacccttagaaagaacaaataaatttccagaactttacaaggatcttgatagctatcctgacctaggaattgagaattatggtgtttccatgacaactttgaatgaagtattcctgaagctagaaggaaaatctacaattaatgaatcggacattgctattttgggagaagtacaagcggaaaaagctgacgacactgaaaggcttgttgagatggaacaagtcctctcttcacttaacaagatgagaaagacaataggtggtgtggctctctggcgacagcaaatctgcgcaattgcaagggttcgcttgttaaagttaaagcatgaaagaaaagctcttttagcactgctattaattctaatggctggattttgccctcttcttgtggagtataccatggtgaaaatatatcaaaacagttacacctgggaactttctcctcatttgtatttccttgctcctggacaacaaccacatgaccctctcactcaactactgatcatcaataaaacaggggcaagcattgatgactttatacagtctgtggagcaccagaacatagctttagaagtggatgcatttggaactagaaatggcacagatgacccatcttataatggagccatcacagtgtgttgtaatgaaaagaattacagcttttcgttagcatgcaatgccaaaagattgaattgcttcccagttcttatggacattgttagtaatgggctacttggaatggttaaaccatcagtacatatccgaactgaaagaagtacatttttggagaatggacaggacaatccaatcggattcctggcatatatcatgttctggctggttttaacatcgagttgcccaccttacattgccatgagcagcatcgatgattataagaacagagctcggtcccagctacggatttccggactctccccttctgcttactggtttgggcaggcgctggtggatgtttccctgtacttcttggtcttcgtttttatatatttaatgagctacatttcaaacttcgaagacatgctacttacaataattcatattattcaaatcccatgtgctgttggttattccttttccctcatcttcatgacatacgtgatttccttcatctttcgcaaggggagaaaaaatagtggcatttggtcattttgtttctatgttgtcactgtattctctgtggctggatttgcgttcagtatcttcgaaagtgatattccatttatcttcacttttttaataccacctgccacaatgattggctgtttgttcttatcttctcatcttctcttttcttctctcttttctgaagaacgaatggatgtacagccatttctggtattcctaattcctttccttcattttatcatttttctttttactcttcgatgtctggaatggaagtttggaaagaaatcaatgagaaaggatcctttctttagaatttctccaagaagtagtgatgtgtgtcaaaatccagaagaaccagaaggagaggatgaagatgttcagatggaaagagtgagaacagcaaatgccttgaattctactaattttgatgagaagccagtcatcattgccagctgtctacgcaaggagtatgcagggaagaggaaaggctgtttttccaagaggaagaataagatagccacgagaaatgtctccttctgtgttagaaaaggtgaagttttaggattattaggacacaatggagctggtaaaagcacatccattaaggtgataactggagacacaaaaccaactgctggacaagtgctactgaaagggagcggtggaggggatgccctggagttcctggggtactgccctcaggagaacgcgctgtggcccaacctgacagtgaggcagcacctggaggtgtacgccgccgtgaaagggctgaggaaaggggatgctgaggttgccatcacacggttagtggatgcgctcaagctgcaggaccagctgaagtctcccgtgaagaccttgtcagagggaataaagagaaagctgtgctttgtcctgagcatactggggaacccgtcagtggtgcttctggatgagccgtcgaccgggatggaccccgaggggcagcagcaaatgtggcaggccatccgggccacctttagaaacacggaaaggggtgccctcctaaccacccactacatggcagaggctgaggccgtgtgtgaccgagtggccatcatggtatctgggaggttgagatgtatcggttccatccaacacctgaaaagcaaatttggcaaagattacctgctggagatgaaggtgaagaacctggcacaagtggagcccctccatgcagagatcctgaggcttttcccccaggctgctcggcaggaaaggtactcctctctgatggtttataagttgccagtggaagatgtgcaacctttagcccaagctttcttcaaattagagaaggttaaacagagctttgacctagaggagtacagcctctcacagtctaccctggagcaggttttcctggagctctccaaggagcaggagctgggtgattttgaggaggattttgatccctcagtgaagtggaagctcctcccccaggaagagccttaaaaccccaaattctgtgttcctgtttaaacccgtggttttttttaaatacatttatttttatagcagcaatgttctatttttagaaactatattataagtacagaaatggttctccgtgtggtgggaggaggaggttcgggtgctgggtaagtgccatgtcagtgtggacagaggcatttgactaagccaacctcctctcacagcctctgtatctctgcaggccatactggttccattgttctgtataatactgaataaataaatttacttttacatgatcgtataagtttctagataagataaacaaattttgtttaaatttttttaataaaaatcttaaaacactttttttctaacctagactgagaaattcatgtttacttttctaggtgtatgatactttgtaaagttgatactttcctaagaatttaacatgtcatatttttgaaatagatttaagtgtgcttcttattgctaaaaatactaaatgtcatgggtcatagtatctgatatcaatatcgttgataacatatccacaggtaacaccatgatgtaggcataaatggaaaacaaaaaccctactatttcaaatatattgtacttttttatttctgtaagccaactgtgtgccattttcactggacttttaaatctagactttagtgatgtctacattgtaaatgatcttttgtggatatttgtcacttggtttcagaaagttcacaaatgtagcaacagctcacatgactgagtaggtagaaaatgtgaaataaatctcatatatatagttttg

SEQ ID NO: 59 - DNA, 5088 bp, Homo sapiens
  source 1..5088: mol_type = unassigned DNA
tccttgcttccattttcccagaagttttggtagcaggatgatgttggcctcataatgtgagttagagaggagtccctctttttcgactgtttggaattgtttcagaaggaatgctaccagctcctcttgtaccactggtagaattcagctgtgaatctgtctggtcctgggctttttttgattgacaagatgaggaagagaaagatcagtgtgtgtcaacaaacttgggccttattatgcaagaactttcttaaaaaatggagaatgaaaagagagtccttaatggaatggctgaattcattgctcctactactttgtttgtatatatatcctcatagtcatcaagtaaatgatttttcttcactgcttaccatggacctgggacgggtagatacatttaatgaatccagattttctgttgtatacacacctgtcaccaacacgacccaacagataatgaataaagtagcctctactcccttcctggcaggtaaagaggtcttgggactgccagatgaggaaagtattaaagaattcacagcaaattatcctgaagaaatagtaagagtcacctttactaatacatactcatatcatttgaagttcttgctaggacatggaatgccagcaaagaaggagcacaaggaccatacagctcattgttatgaaacaaatgaagatgtttactgtgaagtttcagtattttggaaggaaggttttgtggctcttcaagctgccattaatgctgctattatagaaatcacaacaaatcactcagtgatggaggagctgatgtcagttactggaaaaaatatgaagatgcattccttcattggtcaatcaggagttataactgatttgtaccttttttcctgcattatttcattttcctcattcatttactatgcatctgttaatgtcacaagagagaggaaaaggatgaaggccttgatgacaatgatgggtcttcgggattcagcgttctggctctcctggggtttgctctatgctggtttcatcttcattatggcccttttcttggcacttgttataagatctacccagtttatcattttgtctggcttcatggtagtcttcagcctctttctcctgtatggattatctttggtagctttggctttcttaatgagcatcttggtaaagaaatctttcctcaccggcctggtcgtgttcctcctcactgtcttttgggggtgtctggggttcacatcactgtacagacaccttcctgcatccttggagtggattttaagcttgcttagtccctttgccttcatgcttggaatggcccagcttttacacttggactatgatttgaattctaatgcatttcctcatccatcggacggctcaaatctcattgtagcaacaaatttcatgttggcatttgacacttgcctctatctggcattggcgatttactttgaaaaaattttgccaaatgaatatggacatcgacgtccacctttgtttttcctgaagtcctcattttggtctcaaacacaaaagactgatcacgtggcccttgaagatgaaatggatgccgatccttcatttcatgactcttttgaacaagcgcctccagaattccaagggaaagaagccatcagaatcagaaatgttacaaaagaatataaaggaaagcctgataaaatagaagccttgaaagatctggtatttgacatttacgaaggccaaatcactgcaatacttggtcacagtggagctggaaagtcaacactgctaaacattcttagtgggttgtctgttcccaccaaaggttcagtcaccatctataacaataagctttcagaaatggctgacctagaaaatctcagcaagctgaccggagtttgtccacaatccaatgtgcaatttgacttcctcactgtaagagaaaacctcagactctttgctaaaataaaagggattctgccacaagaagtggataaagagatacaaagggttctgctggaattggaaatgaaaaatattcaggatgttcttgctcaaaacttaagtggtggacagaaaagaaagctaacctttgggattgccattttaggagatcctcagattttcctgttggatgaaccaactgctggattggatcccttttcaagacaccaagtatggaaccttctgaaagaacgcaaaacagaccgcgtgatcctcttcagtacccagttcatggatgaggccgacatcctggcggacaggaaagtatttctctcccaagggaagctaaagtgcgcgggctcttctttgtttctaaagaagaaatgggggattggatatcacttaagcttgcagttaaatgaaatatgtgttgaggaaaacataacatcacttgttaaacagcacatccctgatgccaaattatcagccaaaagcgaaggaaaacttatttatacattacccttagaaagaacaaataaatttccagaactttacaaggatcttgatagctatcctgacctaggaattgagaattatggtgtttccatgacaactttgaatgaagtattcctgaagctagaaggaaaatctacaattaatgaatcggacattgctattttgggagaagtacaagcggaaaaagctgacgacactgaaaggcttgttgagatggaacaagtcctctcttcacttaacaagatgagaaagacaataggtggtgtggctctctggcgacagcaaatctgcgcaattgcaagggttcgcttgttaaagttaaagcatgaaagaaaagctcttttagcactgctattaattctaatggctggattttgccctcttcttgtggagtataccatggtgaaaatatatcaaaacagttacacctgggaactttctcctcatttgtatttccttgctcctggacaacaaccacatgaccctctcactcaactactgatcatcaataaaacaggggcaagcattgatgactttatacagtctgtggagcaccagaacatagctttagaagtggatgcatttggaactagaaatggcacagatgacccatcttataatggagccatcacagtgtgttgtaatgaaaagaattacagcttttcgttagcatgcaatgccaaaagattgaattgcttcccagttcttatggacattgttagtaatgggctacttggaatggttaaaccatcagtacatatccgaactgaaagaagtacatttttggagaatggacaggacaatccaatcggattcctggcatatatcatgttctggctggttttaacatcgagttgcccaccttacattgccatgagcagcatcgatgattataagaacagagctcggtcccagctacggatttccggactctccccttctgcttactggtttgggcaggcgctggtggatgtttccctgtacttcttggtcttcgtttttatatatttaatgagctacatttcaaacttcgaagacatgctacttacaataattcatattattcaaatcccatgtgctgttggttattccttttccctcatcttcatgacatacgtgatttccttcatctttcgcaaggggagaaaaaatagtggcatttggtcattttgtttctatgttgtcactgtattctctgtggctggatttgcgttcagtatcttcgaaagtgatattccatttatcttcacttttttaataccacctgccacaatgattggctgtttgttcttatcttctcatcttctcttttcttctctcttttctgaagaacgaatggatgtacagccatttctggtattcctaattcctttccttcattttatcatttttctttttactcttcgatgtctggaatggaagtttggaaagaaatcaatgagaaaggatcctttctttagaatttctccaagaagtagtgatgtgtgtcaaaatccagaagaaccagaaggagaggatgaagatgttcagatggaaagagtgagaacagcaaatgccttgaattctactaattttgatgagaagccagtcatcattgccagctgtctacgcaaggagtatgcagggaagaggaaaggctgtttttccaagaggaagaataagatagccacgagaaatgtctccttctgtgttagaaaaggtgaagttttaggattattaggacacaatggagctggtaaaagcacatccattaaggtgataactggagacacaaaaccaactgctggacaagtgctactgaaagggagcggtggaggggatgccctggagttcctggggtactgccctcaggagaacgcgctgtggcccaacctgacagtgaggcagcacctggaggtgtacgccgccgtgaaagggctgaggaaaggggatgctgaggttgccatcacacggttagtggatgcgctcaagctgcaggaccagctgaagtctcccgtgaagaccttgtcagagggaataaagagaaagctgtgctttgtcctgagcatactggggaacccgtcagtggtgcttctggatgagccgtcgaccgggatggaccccgaggggcagcagcaaatgtggcaggccatccgggccacctttagaaacacggaaaggggtgccctcctaaccacccactacatggcagaggctgaggccgtgtgtgaccgagtggccatcatggtatctgggaggttgagatgtatcggttccatccaacacctgaaaagcaaatttggcaaagattacctgctggagatgaaggtgaagaacctggcacaagtggagcccctccatgcagagatcctgaggcttttcccccaggctgctcggcaggaaaggtactcctctctgatggtttataagttgccagtggaagatgtgcaacctttagcccaagctttcttcaaattagagaaggttaaacagagctttgacctagaggagtacagcctctcacagtctaccctggagcaggttttcctggagctctccaaggagcaggagctgggtgattttgaggaggattttgatccctcagtgaagtggaagctcctcccccaggaagagccttaaaaccccaaattctgtgttcctgtttaaacccgt

SEQ ID NO: 60 - DNA, 445 bp, Homo sapiens
  source 1..445: mol_type = unassigned DNA
ctggagttcctggggtactgccctcaggagaacgcgctgtggcccaacctgacagtgaggcagcacctggaggtgtacgccgccgtgaaagggctgaggaaaggggatgctgaggttgccatcacacggttagtggatgcgctcaagctgcaggaccagctgaagtctcccgtgaagaccttgtcagagggaataaagagaaagctgtgctttgtcctgagcatactggggaacccgtcagtggtgcttctggatgagccgtcgaccgggatggaccccgaggggcagcagcaaatgtggtgaggaacattaccacggtcagggacagcacggatgacttgcatggagcctgtgaaccatttttcttctgtaaaaattgtcccttaaactcttttgtggagaacaaaaaaactatcaatgtcacttgtaaaaccaatactttgca

SEQ ID NO: 61 - DNA, 875 bp, Homo sapiens
  source 1..875: mol_type = unassigned DNA
ataaatcctattgcttcaaacaaaagctcatagaccttgggaggaaggaagacagccccttgctatacactttagaaaggacacttaggtgatattcatggtcaaatgttagcagggctgtttagggccaattcacgtatatgtggacaaaattcaggaaacaaaaaactccctgtttagcaattgtcttttcttttgcagcttctcttttcttctctcttttctgaagaacgaatggatgtacagccatttctggtattcctaattcctttccttcattttatcatttttctttttactcttcgatgtctggaatggaagtttggaaagaaatcaatgagaaaggatcctttctttagaatttctccaagaagtagtgatgtgtgtcaaaatccagaagaaccagaaggagaggatgaagatgttcagatggaaagagtgagaacagcaaatgccttgaattctactaattttgatgagaagccagtcatcattgccagctgtctacgcaaggagtatgcagggaagaggaaaggctgtttttccaagaggaagaataagatagccacgagaaatgtctccttctgtgttagaaaaggtgaagttttaggattattaggacacaatggagctggtaaaagcacatccattaaggtgataactggagacacaaaaccaactgctggacaagtgctactgaaagggagcggtggaggggatgccctggagttcctggggtactgccctcaggagaacgcgctgtggcccaacctgacagtgaggcagcacctggaggtgtacgccgccgtgaaagggctgaggaaaggggatgctgaggttgccatcacacggttagtggatgcgctcaagctgca

SEQ ID NO: 62 - DNA, 3071 bp, Homo sapiens
  source 1..3071: mol_type = unassigned DNA
gtgtccagcccctaatggagaggagacccaaagtgggtagctcctttctgcagctggtagtccctaagtctgtgtgaatctggctgagtccaggatttttatgggctcagaaaggaggaagtgtgtgccatttggtccatgagtggccatgggcaggcctggaaaaagcatcataagttctcactctgggtcacagactccacctagaaccggcagcctggcacccaggcttcaggccatccctgaagcttgaaggtggcttgaaggtggggtttcaccagagaaccacccctttctatccaggaacctgtctgcctgctgccatcaacatgccatctatggcacccaggtggtttgtgctgaggtgcacctgcaagtccatgctgagctgccctcagcacccccccggactccctcccacacttgtcagggcccaaaatccagagcgagctgaggtggcaggaggctggcatggcagttccaccctgggcacgtacacacccagcagggttgcaacagcacctgggcttggccacaactttgctccaaaattggagcatgcaactgcccctgagattcagtaaaggatgctccaattcagcgaagggcagggctcttacctgtttctggcccctgccagtcccccggagtacacagccccagtcacacctcccctgctacagccagcatctttgctgtggtggctccagacaggctgccactgccatcaaggagtaactattaaaggtattaagacgtctcccttgctgcagccagcatctttgctgtgatggctgcagacgggctgcagccaccatcaaggggtaattattaaaggcattaagagagaatgtccagcatcagagctgaaattaatgccagaattcacacacatcctatttatactgccatcagtcacacggatttgcactttcagtgagcattgtctttccagtatgtaatatttaatctttcataaaactgtttttaaaaaactgtattagacagttgtccttcacaaaatgcttagttattggaacatacatttttgtgcaaatgcaactatttttggggagtgttttcaagaaatagatcaaaaattagatacaagggggtgaaattgactttaattgtacttctaatttagttgtataaggtggctaggcaaacagaaaaagagctcaggtttatctaagagagacatcatggggtagagataaaacattttctcctaaattctatggcagaagatagaaaaccttaagaactcttttacaaagaatgtccaagggaagtacagaacagaatataaggcagatgcctgtgaaactgtaccgtgggaaaggggctagtagtcaagccaagaaaggaaaagacagcttggaatgctattgacaaatactccactaatgaaagaagagaaaaccgatattcacaatccctctgtagccacagtgagagcagatgttcatgaaggtacctctctgctggtggcttggccaactctaatttagtccttaacttcaatcatggacaccctccaactcagtcaccacctgggcccaaagtcagtattttatttctcattaagcatgggaggaaaggagataactgctcattaatacattggaatgaaatcttgtaaaaggtaagtctgacctgaagtagaaagccagccatttgggtgtcacaaaataagcttaattggatcagccagcgtgagtttttttaatccatgcattctcctgattaaatactttcagtgaacgcttgctgctctatggctggaaggacacatccctgcttgtcttgcaagcagctgcaggaactggcttccctgtccctcttgccacatatttgtcctccccgtcaagcttccacatcaagcttcatccccacacagggctttggtctcgctcttgctctgccccagattccttgctcttgcctttttttccatgactagcatcttctcctctttgttgaaatggccctcagaagacaggctctttctaattaccctacctactgccacttccccagttattcttaccccagcctcctgaatttccataacagcaccacttttgatctgtctttattctgcatgttcatttctctacttgtttattgcctgattcattcagtagaatgaaaactccagataacgaagcactagttattccaccctccgctgtacccacaggcaacacagcacttgttacataggaggtactcaaaagatgttgatccatgagcgaagttaaatagtaattcaatcaatatgcttcattttgacagtgatttaaaaaaaatggatataaactgttggccaggatggacaggcaccacatttatgggatattggatttttcagctgagattggattgttggctgtggacacacttattttcctgtatttgctctctgacaacctttctccaatgcaaaatgattacagattattaaacccaatgaggtttagagtttctctagtttttctaggttcgtgaagagaatgatgtcatggaaatactcaaagaagcagtgcagaaggtaggttctgagagggaactttcatctgcaggtgctactgaaagggagcggtggaggggatgccctggagttcctggggtactgccctcaggagaacgcgctgtggcccaacctgacagtgaggcagcacctggaggtgtacgccgccgtgaaagggctgaggaaaggggatgctgaggttgccatcacacggtacacagaggagccacatctgttctatacccaagggaggggtggaggaggttgagagtgatgaccctcacaggaaattcaggatgggagactctaaatgctgacccaggtcacactgggtagatttacaactagaaactcctttcctggatatcaaagtattaagtttctttctcatattaaataagaaaatttaaaaaggctgggcgcagtggctcatgcctctaaccccagcactttgggaggctgaggcaggtggactgcttgagctcgtgagtttcagaccagcctaggcaacttggtgaaacctcatctctaaatt

SEQ ID NO: 63 - DNA, 558 bp, Homo sapiens
  source 1..558: mol_type = unassigned DNA
tgatgagaagccagtcatcattgccagctgtctacgcaaggagtatgcagggaagaggaaaggctgtttttccaagaggaagaataagatagccacgagaaatgtctccttctgtgttagaaaaggtgaagttttaggattattaggacacaatggagctggtaaaagcacatccattaaggtgataactggagacacaaaaccaactgctggacaagtaggtgaattatgtggaaaatatgttatctaatggtgaaatagattgataagatttgatgaccttaaaaacaacagattccacttaatccttatataactgaagtgattaatgaactacccaagagaataaattcacgaattatcacataaatgcacacaaaagctaagcactgaaaggttgtcacagaatccttagggtgtcgcttttccagtcaaaacctctggagctggtggcgcctttgcccaagtttggctcagacccgctgggctcattctgtccactcagctcagcaggctgcactctgttcatgccaccagcctggatcccaagcctgccaa

SEQ ID NO: 64 - DNA, 3657 bp, Homo sapiens
  source 1..3657: mol_type = unassigned DNA
ctagatacatggtagagaccaggagaaaatatgaataactttcttctaaacaaggagctcagtggataaaccatacctctagattccttgcttccattttcccagaagaatggctgaattcattgctcctactactttgtttgtatatatatcctcatagtcatcaagtaaatgatttttcttcactgcttaccatggacctgggacgggtagatacatttaatgaatccagattttctgttgtatacacacctgtcaccaacacgacccaacagataatgaataaagtagcctctactcccttcctggcaggtaaagaggtcttgggactgccagatgaggaaagtattaaagaattcacagcaaattatcctgaagaaatagtaagagtcacctttactaatacatactcatatcatttgaagttcttgctaggacatggaatgccagcaaagaaggagcacaaggaccatacagctcattgttatgaaacaaatgaagatgtttactgtgaagtttcagtattttggaaggaaggttttgtggctcttcaagctgccattaatgctgctattatagaaatcacaacaaatcactcagtgatggaggagctgatgtcagttactggaaaaaatatgaagatgcattccttcattggtcaatcaggagttataactgatttgtaccttttttcctgcattatttcattttcctcattcatttactatgcatctgttaatgtcacaagagagaggaaaaggatgaaggccttgatgacaatgatgggtcttcgggattcagcgttctggctctcctggggtttgctctatgctggtttcatcttcattatggcccttttcttggcacttgttataagatctacccagtttatcattttgtctggcttcatggtagtcttcagcctctttctcctgtatggattatctttggtagctttggctttcttaatgagcatcttggtaaagaaatctttcctcaccggcctggtcgtgttcctcctcactgtcttttgggggtgtctggggttcacatcactgtacagacaccttcctgcatccttggagtggattttaagcttgcttagtccctttgccttcatgcttggaatggcccagcttttacacttggactatgatttgaattctaatgcatttcctcatccatcggacggctcaaatctcattgtagcaacaaatttcatgttggcatttgacacttgcctctatctggcattggcgatttactttgaaaaaattttgccaaatgaatatggacatcgacgtccacctttgtttttcctgaagtcctcattttggtctcaaacacaaaagactgatcacgtggcccttgaagatgaaatggatgccgatccttcatttcatgactcttttgaacaagcgcctccagaattccaagggaaagaagccatcagaatcagaaatgttacaaaagaatataaaggaaagcctgataaaatagaagccttgaaagatctggtatttgacatttacgaaggccaaatcactgcaatacttggtcacagtggagctggaaagtcaacactgctaaacattcttagtgggttgtctgttcccaccaaaggttcagtcaccatctataacaataagctttcagaaatggctgacctagaaaatctcagcaagctgaccggagtttgtccacaatccaatgtgcaatttgacttcctcactgtaagagaaaacctcagactctttgctaaaataaaagggattctgccacaagaagtggataaagagatacaaagggttctgctggaattggaaatgaaaaatattcaggatgttcttgctcaaaacttaagtggtggacagaaaagaaagctaacctttgggattgccattttaggagatcctcagattttcctgttggatgaaccaactgctggattggatcccttttcaagacaccaagtatggaaccttctgaaagaacgcaaaacagaccgcgtgatcctcttcagtacccagttcatggatgaggccgacatcctggcggacaggaaagtatttctctcccaagggaagctaaagtgcgcgggctcttctttgtttctaaagaagaaatgggggattggatatcacttaagcttgcagttaaatgaaatatgtgttgaggaaaacataacatcacttgttaaacagcacatccctgatgccaaattatcagccaaaagcgaaggaaaacttatttatacattacccttagaaagaacaaataaatttccagaactttacaaggatcttgatagctatcctgacctaggaattgagaattatggtgtttccatgacaactttgaatgaagtattcctgaagctagaaggaaaatctacaattaatgaatcggacattgctattttgggagaagtacaagcggaaaaagctgacgacactgaaaggcttgttgagatggaacaagtcctctcttcacttaacaagatgagaaagacaataggtggtgtggctctctggcgacagcaaatctgcgcaattgcaagggttcgcttgttaaagttaaagcatgaaagaaaagctcttttagcactgctattaattctaatggctggattttgccctcttcttgtggagtataccatggtgaaaatatatcaaaacagttacacctgggaactttctcctcatttgtatttccttgctcctggacaacaaccacatgaccctctcactcaactactgatcatcaataaaacaggggcaagcattgatgactttatacagtctgtggagcaccagaacatagctttagaagtggatgcatttggaactagaaatggcacagatgacccatcttataatggagccatcacagtgtgttgtaatgaaaagaattacagcttttcgttagcatgcaatgccaaaagattgaattgcttcccagttcttatggacattgttagtaatgggctacttggaatggttaaaccatcagtacatatccgaactgaaagaagtacatttttggagaatggacaggacaatccaatcggattcctggcatatatcatgttctggctggttttaacatcgagttgcccaccttacattgccatgagcagcatcgatgattataagaacagagctcggtcccagctacggatttccggactctccccttctgcttactggtttgggcaggcgctggtggatgtttccctgtacttcttggtcttcgtttttatatatttaatgagctacatttcaaacttcgaagacatgctacttacaataattcatattattcaaatcccatgtgctgttggttattccttttccctcatcttcatgacatacgtgatttccttcatctttcgcaaggggagaaaaaatagtggcatttggtcattttgtttctatgttgtaagtatatttcttgtggatgtatactgtatatatttgatatacaattctgagctaatcctttaaattttgccctctgtaggatgataatattatggtctataataaacacaagattacaaattcagttactgacatggtcaaaactagaaattacttcaccaaagtccctaataagaattaattccataaagcctctcttcttttgtctaaatta

SEQ ID NO: 65 - DNA, 2106 bp, Homo sapiens
  source 1..2106: mol_type = unassigned DNA
tcctgcatccttggagtggattttaagcttgcttagtccctttgccttcatgcttggaatggcccagcttttacacttggactatgatttgaattctaatgcatttcctcatccatcggacggctcaaatctcattgtagcaacaaatttcatgttggcatttgacacttgcctctatctggcattggcgatttactttgaaaaaattttgccaaatgaatatggacatcgacgtccacctttgtttttcctgaagtcctcattttggtctcaaacacaaaagactgatcacgtggcccttgaagatgaaatggatgccgatccttcatttcatgactcttttgaacaagcgcctccagaattccaagggaaagaagccatcagaatcagaaatgttacaaaagaatataaaggaaagcctgataaaatagaagccttgaaagatctggtatttgacatttacgaaggccaaatcactgcaatacttggtcacagtggagctggaaagtcaacactgctaaacattcttagtgggttgtctgttcccaccaaaggttcagtcaccatctataacaataagctttcagaaatggctgacctagaaaatctcagcaagctgaccggagtttgtccacaatccaatgtgcaatttgacttcctcactgtaagagaaaacctcagactctttgctaaaataaaagggattctgccacaagaagtggataaagagatacaaagggttctgctggaattggaaatgaaaaatattcaggatgttcttgctcaaaacttaagtggtggacagaaaagaaagctaacctttgggattgccattttaggagatcctcagattttcctgttggatgaaccaactgctggattggatcccttttcaagacaccaagtatggaaccttctgaaagaacgcaaaacagaccgcgtgatcctcttcagtacccagttcatggatgaggccgacatcctggcggacaggaaagtatttctctcccaagggaagctaaagtgcgcgggctcttctttgtttctaaagaagaaatgggggattggatatcacttaagcttgcagttaaatgaaatatgtgttgaggaaaacataacatcacttgttaaacagcacatccctgatgccaaattatcagccaaaagcgaaggaaaacttatttatacattacccttagaaagaacaaataaatttccagaactttacaaggatcttgatagctatcctgacctaggaattgagaattatggtgtttccatgacaactttgaatgaagtattcctgaagctagaaggaaaatctacaattaatgaatcggacattgctattttgggagaagtacaagcggaaaaagctgacgacactgaaaggcttgttgagatggaacaagtcctctcttcacttaacaagatgagaaagacaataggtggtgtggctctctggcgacagcaaatctgcgcaattgcaagggttcgcttgttaaagttaaagcatgaaagaaaagctcttttagcactgctattaattctaatggctggattttgccctcttcttgtggagtataccatggtgaaaatatatcaaaacagttacacctgggaactttctcctcatttgtatttccttgctcctggacaacaaccacatgaccctctcactcaactactgatcatcaataaaacaggggcaagcattgatgactttatacagtctgtggagcaccagaacatagctttagaagtggatgcatttggaactagaaatggcacagatgacccatcttataatggagccatcacagtgtgttgtaatgaaaagaattacagcttttcgttagcatgcaatgccaaaagattgaattgcttcccagttcttatggacattgttagtaatgggctacttggaatggttaaaccatcagtacatatccgaactgaaagaagtacatttttggaggtaaatatatataatcttacaattcctgactctcctctatcaggaatctcccagatcacccttttaagtgctggaatcttgtttttattgagtaaaccactgcataataaattaacatttggactcat

SEQ ID NO: 66 - DNA, 524 bp, Homo sapiens
  source 1..524: mol_type = unassigned DNA
tcctctcttcacttaacaagatgagaaagacaataggtggtgtggctctctggcgacagcaaatctgcgcaattgcaagggttcgcttgttaaagttaaagcatgaaagaaaagctcttttagcactgctattaattctaatggctggattttgccctcttcttgtggagtataccatggtgaaaatatatcaaaacagttacacctgggaactttctcctcatttgtatttccttgctcctggacaacaaccacatgaccctctcactcaactactgatcatcaataaaacaggggcaagcattgatgactttatacagtctgtggagcaccagaacatagctttagaagtggatgcatttggaactagaaatggcacagatgacccatcttataatggagccatcacagtgtgttgtaatgaaaaggtatgcaggtctctaataatctttctgaaaaatgtgaaaagctaacataatatcaatatactcaggcttccaacttaagaaataaaaatgaaaagc

SEQ ID NO: 67 - DNA, 925 bp, Homo sapiens
  source 1..925: mol_type = unassigned DNA
attgatttcatgtcttattgctcctcatgattctgtgggttgactgggcagtttttctattctggaccaaagtgacaggggctggatgatttaacatggcctcactcacatatctggggcttcagttaggacagctgcgtgtcttttcccacatggaaatatatctttcagaaggcctgctgggattcttcacccaatgatccccatgatcccagcagcaagcaaagacaaatcactaggtggaagctcttcatcagactctgcttgtatcacatttgctaggatactacagggtatataggcaaagctaaatgtgaggggcagacaaagggactacaccttgatgggaaaagctgcagatgagaacatattttgaatatactatgcaactaaagtagaagtttctaatgcctgaattgtataaactgtcaagataaagtcatacgtacatttaattaacagcgattttattaagaaatatcttaagccttatcttgatattaacttttcctttgttacaggttcagtcaccatctataacaataagctttcagaaatggctgacctagaaaatctcagcaagctgaccggagtttgtccacaatccaatgtgcaatttgacttcctcactgtaagagaaaacctcagactctttgctaaaataaaagggattctgccacaagaagtggataaagagatacaaagggttctgctggaattggaaatgaaaaatattcaggatgttcttgctcaaaacttaagtggtggacagaaaagaaagctaacctttgggattgccattttaggagatcctcagattttcctgttggatgaaccaactgctggattggatcccttttcaagacaccaagtatggaaccttctgaaagaacgcaaaacagaccgcgtgatcctcttcagtacc

SEQ ID NO: 68 - DNA, 1622 bp, Homo sapiens
  source 1..1622: mol_type = unassigned DNA
cagaagtcaaatagttaaagcaaattctagatacatggtagagaccaggagaaaatatgaataactttcttctaaacaaggagctcagtggataaaccatacctctagattccttgcttccattttcccagaagttttggtagcaggatgatgttggcctcataatgtgagttagagaggagtccctctttttcgactgtttggaattgtttcagaaggaatgctaccagctcctcttgtaccactggtagaattcagctgtgaatctgtctggtcctgggctttttttgattgacaagatgaggaagagaaagatcagtgtgtgtcaacaaacttgggccttattatgcaagaactttcttaaaaaatggagaatgaaaagagagtccttaatggaatggctgaattcattgctcctactactttgtttgtatatatatcctcatagtcatcaagtaaatgatttttcttcactgcttaccatggacctgggacgggtagatacatttaatgaatccagattttctgttgtatacacacctgtcaccaacacgacccaacagataatgaataaagtagcctctactcccttcctggcaggtaaagaggtcttgggactgccagatgaggaaagtattaaagaattcacagcaaattatcctgaagaaatagtaagagtcacctttactaatacatactcatatcatttgaagttcttgctaggacatggaatgccagcaaagaaggagcacaaggaccatacagctcattgttatgaaacaaatgaagatgtttactgtgaagtttcagtattttggaaggaaggttttgtggctcttcaagctgccattaatgctgctattatagaaatcacaacaaatcactcagtgatggaggagctgatgtcagttactggaaaaaatatgaagatgcattccttcattggtcaatcaggagttataactgatttgtaccttttttcctgcattatttcattttcctcattcatttactatgcatctgttaatgtcacaagagagaggaaaaggatgaaggccttgatgacaatgatgggtcttcgggattcagcgttctggtgagtcaaacgcagcacaaataaataaacggaggaactcaggaaaactgggaatcttcaatgcatctttttttttttgaaatggagtctcgctctgtcgcccaggctggagtgcagtggcgtgatctcagctcactgcaagctccgcctcacaggttcacgccattctcctgcctcggcctcccaagtagctgggactgcaggtgccgaccaccatgcctggataattttttgtattttctgtagagacggggtttcaccgtgttagccaggatggtctcgatctcctgacctcgtgatccacccacctcggcctcccaaagtgctgggattacaggcgcgagccaccacgcccggcctcttcaatgcgtctttattaaaacctgtttctccacaaccaaggggtacaaatgagagatacctacacagaataatttcagatcatgaacaaatttccacttagttaatttcagtggggagaaatgctctgcagtgatggacaaaaaaaaaaaaaaaaaaaaaaaaa

SEQ ID NO: 69 - DNA, 1502 bp, Homo sapiens
  source 1..1502: mol_type = unassigned DNA
ataacctccactctgaaagcagtcttcacagaaacttttcacagaagtcaaatagttaaagcaaattctagatacatggtagagaccaggagaaaatatgaataactttcttctaaacaaggagctcagtggataaaccatacctctagattccttgcttccattttcccagaaacaagatgaggaagagaaagatcagtgtgtgtcaacaaacttgggccttattatgcaagaactttcttaaaaaatggagaatgaaaagagagtccttaatggaatggctgaattcattgctcctactactttgtttgtatatatatcctcatagtcatcaagtaaatgatttttcttcactgcttaccatggacctgggacgggtagatacatttaatgaatccagattttctgttgtatacacacctgtcaccaacacgacccaacagataatgaataaagtagcctctactcccttcctggcaggtaaagaggtcttgggactgccagatgaggaaagtattaaagaattcacagcaaattatcctgaagaaatagtaagagtcacctttactaatacatactcatatcatttgaagttcttgctaggacatggaatgccagcaaagaaggagcacaaggaccatacagctcattgttatgaaacaaatgaagatgtttactgtgaagtttcagtattttggaaggaaggttttgtggctcttcaagctgccattaatgctgctattatagaaatcacaacaaatcactcagtgatggaggagctgatgtcagttactggaaaaaatatgaagatgcattccttcattggtcaatcaggagttataactgatttgtaccttttttcctgcattatttcattttcctcattcatttactatgcatctgttaatgtcacaagagagaggaaaaggatgaaggccttgatgacaatgatgggtcttcgggattcagcgttctggtgagtcaaacgcagcacaaataaataaacggaggaactcaggaaaactgggaatcttcaatgcatctttttttttttgaaatggagtctcgctctgtcgcccaggctggagtgcagtggcgtgatctcagctcactgcaagctccgcctcacaggttcacgccattctcctgcctcggcctcccaagtagctgggactgcaggtgccgaccaccatgcctggataattttttgtattttctgtagagacggggtttcaccgtgttagccaggatggtctcgatctcctgacctcgtgatccacccacctcggcctcccaaagtgctgggattacaggcgcgagccaccacgcccggcctcttcaatgcgtctttattaaaacctgtttctccacaaccaaggggtacaaatgagagatacctacacagaataatttcagatcatgaacaaatttccacttagttaatttcagtggggagaaatgctctgcagtgatggacaaaaaaaaaaaaaaaaaaaaaaaaa

SEQ ID NO: 70 - DNA, 509 bp, Homo sapiens
  source 1..509: mol_type = unassigned DNA
agcgtcctctcccccgccgtggtgagagcctgtctctgctttgtatccgtgctgggtccttgttgcaaatctcagctgcaaattatctttgcttgggaatgggaactggaagcttcctgccccacctgcagtggtagcaggctgttgctttttaccagacaagatgaggaagagaaagatcagtgtgtgtcaacaaacttgggccttattatgcaagaactttcttaaaaaatggagaatgaaaagagagtccttaatggaatggctgaattcattgctcctactactttgtttgtatatatatcctcatagtcatcaagtaaatgatttttcttcactgcttaccatggacctgggacgggtagatacatttaatgaatccagattttctgttgtatacacacctgtcaccaacacgacccaacagataatgaataaagtagcctctactcccttcctggcaggtaaagaggtcttgggactgccagatgaggaaagtattaaagaat

SEQ ID NO: 71 - DNA, 5823 bp, Homo sapiens
  source 1..5823: mol_type = unassigned DNA
ataacctccactctgaaagcagtcttcacagaaacttttcacagaagtcaaatagttaaagcaaattctagatacatggtagagaccaggagaaaatatgaataactttcttctaaacaaggagctcagtggataaaccatacctctagattccttgcttccattttcccagaaacaagatgaggaagagaaagatcagtgtgtgtcaacaaacttgggccttattatgcaagaactttcttaaaaaatggagaatgaaaagagagtccttaatggaatggctgaattcattgctcctactactttgtttgtatatatatcctcatagtcatcaagtaaatgatttttcttcactgcttaccatggacctgggacgggtagatacatttaatgaatccagattttctgttgtatacacacctgtcaccaacacgacccaacagataatgaataaagtagcctctactcccttcctggcaggtaaagaggtcttgggactgccagatgaggaaagtattaaagaattcacagcaaattatcctgaagaaatagtaagagtcacctttactaatacatactcatatcatttgaagttcttgctaggacatggaatgccagcaaagaaggagcacaaggaccatacagctcattgttatgaaacaaatgaagatgtttactgtgaagtttcagtattttggaaggaaggttttgtggctcttcaagctgccattaatgctgctattatagaaatcacaacaaatcactcagtgatggaggagctgatgtcagttactggaaaaaatatgaagatgcattccttcattggtcaatcaggagttataactgatttgtaccttttttcctgcattatttcattttcctcattcatttactatgcatctgttaatgtcacaagagagaggaaaaggatgaaggccttgatgacaatgatgggtcttcgggattcagcgttctggctctcctggggtttgctctatgctggtttcatcttcattatggcccttttcttggcacttgttataagatctacccagtttatcattttgtctggcttcatggtagtcttcagcctctttctcctgtatggattatctttggtagctttggctttcttaatgagcatcttggtaaagaaatctttcctcaccggcctggtcgtgttcctcctcactgtcttttgggggtgtctggggttcacatcactgtacagacaccttcctgcatccttggagtggattttaagcttgcttagtccctttgccttcatgcttggaatggcccagcttttacacttggactatgatttgaattctaatgcatttcctcatccatcggacggctcaaatctcattgtagcaacaaatttcatgttggcatttgacacttgcctctatctggcattggcgatttactttgaaaaaattttgccaaatgaatatggacatcgacgtccacctttgtttttcctgaagtcctcattttggtctcaaacacaaaagactgatcacgtggcccttgaagatgaaatggatgccgatccttcatttcatgactcttttgaacaagcgcctccagaattccaagggaaagaagccatcagaatcagaaatgttacaaaagaatataaaggaaagcctgataaaatagaagccttgaaagatctggtatttgacatttacgaaggccaaatcactgcaatacttggtcacagtggagctggaaagtcaacactgctaaacattcttagtgggttgtctgttcccaccaaaggttcagtcaccatctataacaataagctttcagaaatggctgacctagaaaatctcagcaagctgaccggagtttgtccacaatccaatgtgcaatttgacttcctcactgtaagagaaaacctcagactctttgctaaaataaaagggattctgccacaagaagtggataaagagatacaaagggttctgctggaattggaaatgaaaaatattcaggatgttcttgctcaaaacttaagtggtggacagaaaagaaagctaacctttgggattgccattttaggagatcctcagattttcctgttggatgaaccaactgctggattggatcccttttcaagacaccaagtatggaaccttctgaaagaacgcaaaacagaccgcgtgatcctcttcagtacccagttcatggatgaggccgacatcctggcggacaggaaagtatttctctcccaagggaagctaaagtgcgcgggctcttctttgtttctaaagaagaaatgggggattggatatcacttaagcttgcagttaaatgaaatatgtgttgaggaaaacataacatcacttgttaaacagcacatccctgatgccaaattatcagccaaaagcgaaggaaaacttatttatacattacccttagaaagaacaaataaatttccagaactttacaaggatcttgatagctatcctgacctaggaattgagaattatggtgtttccatgacaactttgaatgaagtattcctgaagctagaaggaaaatctacaattaatgaatcggacattgctattttgggagaagtacaagcggaaaaagctgacgacactgaaaggcttgttgagatggaacaagtcctctcttcacttaacaagatgagaaagacaataggtggtgtggctctctggcgacagcaaatctgcgcaattgcaagggttcgcttgttaaagttaaagcatgaaagaaaagctcttttagcactgctattaattctaatggctggattttgccctcttcttgtggagtataccatggtgaaaatatatcaaaacagttacacctgggaactttctcctcatttgtatttccttgctcctggacaacaaccacatgaccctctcactcaactactgatcatcaataaaacaggggcaagcattgatgactttatacagtctgtggagcaccagaacatagctttagaagtggatgcatttggaactagaaatggcacagatgacccatcttataatggagccatcacagtgtgttgtaatgaaaagaattacagcttttcgttagcatgcaatgccaaaagattgaattgcttcccagttcttatggacattgttagtaatgggctacttggaatggttaaaccatcagtacatatccgaactgaaagaagtacatttttggagaatggacaggacaatccaatcggattcctggcatatatcatgttctggctggttttaacatcgagttgcccaccttacattgccatgagcagcatcgatgattataagaacagagctcggtcccagctacggatttccggactctccccttctgcttactggtttgggcaggcgctggtggatgtttccctgtacttcttggtcttcgtttttatatatttaatgagctacatttcaaacttcgaagacatgctacttacaataattcatattattcaaatcccatgtgctgttggttattccttttccctcatcttcatgacatacgtgatttccttcatctttcgcaaggggagaaaaaatagtggcatttggtcattttgtttctatgttgtcactgtattctctgtggctggatttgcgttcagtatcttcgaaagtgatattccatttatcttcacttttttaataccacctgccacaatgattggctgtttgttcttatcttctcatcttctcttttcttctctcttttctgaagaacgaatggatgtacagccatttctggtattcctaattcctttccttcattttatcatttttctttttactcttcgatgtctggaatggaagtttggaaagaaatcaatgagaaaggatcctttctttagtagtgatgtgtgtcaaaatccagaagaaccagaaggagaggatgaagatgttcagatggaaagagtgagaacagcaaatgccttgaattctactaattttgatgagaagccagtcatcattgccagctgtctacgcaaggagtatgcagggaagaggaaaggctgtttttccaagaggaagaataagatagccacgagaaatgtctccttctgtgttagaaaaggtgaagttttaggattattaggacacaatggagctggtaaaagcacatccattaaggtgataactggagacacaaaaccaactgctggacaagtgctactgaaagggagcggtggaggggatgccctggagttcctggggtactgccctcaggagaacgcgctgtggcccaacctgacagtgaggcagcacctggaggtgtacgccgccgtgaaagggctgaggaaaggggatgctgaggttgccatcacacggttagtggatgcgctcaagctgcaggaccagctgaagtctcccgtgaagaccttgtcagagggaataaagagaaagctgtgctttgtcctgagcatactggggaacccgtcagtggtgcttctggatgagccgtcgaccgggatggaccccgaggggcagcagcaaatgtggcaggccatccgggccacctttagaaacacggaaaggggtgccctcctaaccacccactacatggcagaggctgaggccgtgtgtgaccgagtggccatcatggtatctgggaggttgagatgtatcggttccatccaacacctgaaaagcaaatttggcaaagattacctgctggagatgaaggtgaagaacctggcacaagtggagcccctccatgcagagatcctgaggcttttcccccaggctgctcggcaggaaaggtactcctctctgatggtttataagttgccagtggaagatgtgcaacctttagcccaagctttcttcaaattagagaaggttaaacagagctttgacctagaggagtacagcctctcacagtctaccctggagcaggttttcctggagctctccaaggagcaggagctgggtgattttgaggaggattttgatccctcagtgaagtggaagctcctcccccaggaagagccttaaaaccccaaattctgtgttcctgtttaaacccgtggttttttttaaatacatttatttttatagcagcaatgttctatttttagaaactatattataagtacagaaatggttctccgtgtggtgggaggaggaggttcgggtgctgggtaagtgccatgtcagtgtggacagaggcatttgactaagccaacctcctctcacagcctctgtatctctgcaggccatactggttccattgttctgtataatactgaataaataaatttacttttacatgatcgtataagtttctagataagataaacaaattttgtttaaatttttttaataaaaatcttaaaacactttttttctaacctagactgagaaattcatgtttacttttctaggtgtatgatactttgtaaagttgatactttcctaagaatttaacatgtcatatttttgaaatagatttaagtgtgcttcttattgctaaaaatactaaatgtcatgggtcatagtatctgatatcaatatcgttgataacatatccacaggtaacaccatgatgtaggcataaatggaaaacaaaaaccctactatttcaaatatattgtacttttttatttctgtaagccaactgtgtgccattttcactggacttttaaatctagactttagtgatgtctacattgtaaatgatcttttgtggatatttgtcacttggtttcagaaagttcacaaatgtagcaacagctcacatgactgagtaggtagaaaatgtgaaataaatctcatatatatagttttg

SEQ ID NO: 72 - DNA, 3264 bp, Homo sapiens
  source 1..3264: mol_type = unassigned DNA
actctgaaagcagtcttcacagaaacttttcacagaagtcaaatagttaaagcaaattctagatacatggtagagaccaggagaaaatatgaataactttcttctaaacaaggagctcagtggataaaccatacctctagattccttgcttccattttcccagaaacaagatgaggaagagaaagatcagtgtgtgtcaacaaacttgggccttattatgcaagaactttcttaaaaaatggagaatgaaaagagagtccttaatggaatggctgaattcattgctcctactactttgtttgtatatatatcctcatagtcatcaagtaaatgatttttcttcactgcttaccatggacctgggacgggtagatacatttaatgaatccagattttctgttgtatacacacctgtcaccaacacgacccaacagataatgaataaagtagcctctactcccttcctggcaggtaaagaggtcttgggactgccagatgaggaaagtattaaagaattcacagcaaattatcctgaagaaatagtaagagtcacctttactaatacatactcatatcatttgaagttcttgctaggacatggaatgccagcaaagaaggagcacaaggaccatacagctcattgttatgaaacaaatgaagatgtttactgtgaagtttcagtattttggaaggaaggttttgtggctcttcaagctgccattaatgctgctattatagaaatcacaacaaatcactcagtgatggaggagctgatgtcagttactggaaaaaatatgaagatgcattccttcattggtcaatcaggagttataactgatttgtaccttttttcctgcattatttcattttcctcattcatttactatgcatctgttaatgtcacaagagagaggaaaaggatgaaggccttgatgacaatgatgggtcttcgggattcagcgttctggctctcctggggtttgctctatgctggtttcatcttcattatggcccttttcttggcacttgttataagatctacccagtttatcattttgtctggcttcatggtagtcttcagcctctttctcctgtatggattatctttggtagctttggctttcttaatgagcatcttggtaaagaaatctttcctcaccggcctgcatccttggagtggattttaagcttgcttagtccctttgccttcatgcttggaatggcccagcttttacacttggactatgatttgaattctaatgcatttcctcatccatcggacggctcaaatctcattgtagcaacaaatttcatgttggcatttgacacttgcctctatctggcattggcgatttactttgaaaaaattttgccaaatgaatatggacatcgacgtccacctttgtttttcctgaagtcctcattttggtctcaaacacaaaagactgatcacgtggcccttgaagatgaaatggatgccgatccttcatttcatgactcttttgaacaagcgcctccagaattccaagggaaagaagccatcagaatcagaaatgttacaaaagaatataaaggaaagcctgataaaatagaagccttgaaagatctggtatttgacatttacgaaggccaaatcactgcaatattggtcacagtggagctggaaagtcaacactgctaaacattcttagtgggttgtctgttcccaccaaaggttcagtcaccatctataacaataagctttcagaaatggctgacctagaaaatctcagcaagctgaccggagtttgtccacaatccaatgtgcaatttgacttcctcactgtaagagaaaacctcagactctttgctaaaataaaagggattctgccacaagaagtggataaagagatacaaagggttctgctggaattggaaatgaaaaatattcaggatgttcttgctcaaaacttaagtggtggacagaaaagaaagctaacctttgggattgccattttaggagatcctcagattttcctgttggatgaaccaactgctggattggatcccttttcaagacaccaagtatggaaccttctgaaagaacgcaaaacagaccgcgtgatcctcttcagtacccagttcatggatgaggccgacatcctggcggacaggaaagtatttctctcccaagggaagctaaagtgcgcgggctcttctttgtttctaaagaagaaatgggggattggatatcacttaagcttgcagttaaatgaaatatgtgttgaggaaaacataacatcacttgttaaacagcacatccctgatgccaaattatcagccaaaagcgaaggaaaacttatttatacattacccttagaaagaacaaataaatttccagaactttacaaggatcttgatagctatcctgacctaggaattgagaattatggtgtttccatgacaactttgaatgaagtattcctgaagctagaaggaaaatctacaattaatgaatcggacattgctattttgggagaagtacaagcggaaaaagctgacgacactgaaaggcttgttgagatggaacaagtcctctcttcacttaacaagatgagaaagacaataggtggtgtggctctctggcgacagcaaatctgcgcaattgcaagggttcgcttgttaaagttaaagcatgaaagaaaagctcttttagcactgctattaattctaatggctggattttgccctcttcttgtggagtataccatggtgaaaatatatcaaaacagttacacctgggaactttctcctcatttgtatttccttgctcctggacaacaaccacatgaccctctcactcaactactgatcatcaataaaacaggggcaagcattgatgactttatacagtctgtggagcaccagaacatagctttagaagtggatgcatttggaactagaaatggcacagatgacccatcttataatggagccatcacagtgtgttgtaatgaaaagaattacagcttttcgttagcatgcaatgccaaaagattgaattgcttcccagttcttatggacattgttagtaatgggctacttggaatggttaaaccatcagtacatatccgaactgaaagaagtacatttttggaggtaaatatatataatcttacaattcctgactctcctctatcaggaatctcccagatcacccttttaagtgctggaatcttgtttttattgagtaaaccactgcataataaattaacatttggactc

SEQ ID NO: 73 - DNA, 933 bp, Homo sapiens
  source 1..933: mol_type = unassigned DNA
gtgagcgaatactccacgtgagaggtaggcgtggccttcgtgggtggtctcatcttggcactgctgctggtacccgtcaacaaagtgattgccacccgcatcatggccagcaaccaggaaatgctacagcacaaggatgcgcgggttaagcttgtgacagagctgctgagtggcattcgggtcatcaagttctgcgggtgggagcaggcactgggagcccgagtagaggcctgccgggctcgagagctggggcgactccgggtcatcaaatacctggatgcggcctgtgtatacctgtgggctgccctaccggttgtcatctccatcgttatcttcatcacctatgtcctcatggggcaccagctcactgccaccaaggtgttcacggccctggcactggtgcgaatgctcattcttcctctcaacaacttcccttgggtgatcaatggtctcctggaggccaaagtgtccttggaccggatccagcttttcctcgaccttccaaaccacaacccccaggcctactacagcccagatccccctgcagagccatctacagtattggagctgcatggagccttgttctcctgggacccagttggaaccagcctggagaccttcatcagtcatctcgaagtgaaaaagggtatgctggtgggcatcgtggggaaggtcggctgtgggaagagctccctgctggctgccatcgctggagagctccacaggctgcgtgggcatgtggcagtgcgggggctgtccaagggctttggcctggccacccaggaaccctggatccagtttgccaccatccgagacaacatcctctttgggaagacatttgatgcacagctgtacaaggaggtgctagaagcctgcgccctcaatgatgacctcagtatcctgcctgctggagaccagacagaggtgggggag

SEQ ID NO: 74 - DNA, 478 bp, Homo sapiens
  source 1..478: mol_type = unassigned DNA
gggcgtggcgaatagcgccggctaggtcttccaacctctaggtggggtgccagccggggcgggcccagcaccccggccgggcagtactttttttttttttgcatacaccagttctcaggatatcggaatccggtgcacagcagcttcttcaggtgaggcgtccatggaacgacttctggcccagctgtgcggcagcagcgcagcgtggccgctcccgctgtgggagggggacaccacaggccactgcttcacccagctggtgctcagcgccctgccccacgcgctcctcgccgtgctcagtgcctgttacttgggcaccccgagagtctctctttgtcacccaggctggagtacagtggcacgatctcagctcactgcaacctccgcctcccaggttcaagcgattctcgtgcctcagtgtcccaaagtagctgggattacaggagtccagattacatcctaccctgcagtcctggat

SEQ ID NO: 75 - DNA, 5033 bp, Homo sapiens
  source 1..5033: mol_type = unassigned DNA
ggcgaatagcgccggctaggtcttccaacctctaggtggggtgccagccggggcgggcccagcaccccggccgggcagtactttttttttttttgcatacaccagttctcaggatatcggaatccggtgcacagcagcttcttcaggtttgaggttccggatgcctgggggcggagaaacgggaggggaaaaacagatggcaaggtgaggcgtccatggaacgacttctggcccagctgtgcggcagcagcgcagcgtggccgctcccgctgtgggagggggacaccacaggccactgcttcacccagctggtgctcagcgccctgccccacgcgctcctcgccgtgctcagtgcctgttacttgggcaccccgaggagtccagattacatcctaccctgcagtcctggatggcgcctccgacttgcagcttccttcctgctttccgtcttcccgctgctagaccttcttccagttgctttgccaccaggggcaggcccaggacccatagggctagaggtgttggcagggtgcgtggcagctgtggcctggatcagccacagcctggccctgtgggtgttggcacattcccctcatggccactcccggggtcccttggccttggccctggtagccttgctgccagctccagccctagtgctgaccgtgttgtggcattgccagcgaggcacacttctgcccccacttctcccagggcccatggcccgcctatgcttgctcatcctgcagctggctgcactcttggcctatgcactgggatgggcagctcctgggggaccacgagaaccctgggctcaggagcccctcctgcccgaggatcaagaacctgaggtggctgaagatggggagagttggctgtcacgcttttcctatgcctggctggcacccttgctggcccgtggggcctgtggagagctccggcagcctcaggacatttgccgcctcccccacagactgcagccaacctacctggctcgtgtcttccaggcacactggcaggagggggcacggctgtggagggccttgtatggggcctttggacggtgctatctggcacttggactgctgaagctggtggggaccatgttgggattctcagggcccctgttgctctccctactggtgggcttcctggaagaggggcaggagccactaagccacggcctgctctatgctctggggctagccggtggggctgtgctgggtgctgtgctgcagaatcagtatgggtatgaggtatataaggtaacacttcaggcacggggggctgtgctgaacatcctgtactgcaaggctttacagctggggcccagccgccctcctactggggaggccctgaacctactaggcactgactctgaacggctgcttaactttgctgggagcttccatgaagcctggggcctgcccctgcaactggccatcaccctctacctgctgtaccagcaggtaggcgtggccttcgtgggtggtctcatcttggcactgctgctggtacccgtcaacaaagtgattgccacccgcatcatggccagcaaccaggaaatgctacagcacaaggatgcgcgggttaagcttgtgacagagctgctgagtggcattcgggtcatcaagttctgcgggtgggagcaggcactgggagcccgagtagaggcctgccgggctcgagagctggggcgactccgggtcatcaaatacctggatgcggcctgtgtatacctgtgggctgccctaccggttgtcatctccatcgttatcttcatcacctatgtcctcatggggcaccagctcactgccaccaaggtgttcacggccctggcactggtgcgaatgctcattcttcctctcaacaacttcccttgggtgatcaatggtctcctggaggccaaagtgtccttggaccggatccagcttttcctcgaccttccaaaccacaacccccaggcctactacagcccagatccccctgcagagccatctacagtattggagctgcatggagccttgttctcctgggacccagttggaaccagcctggagaccttcatcagtcatctcgaagtgaaaaagggtatgctggtgggcatcgtggggaaggtcggctgtgggaagagctccctgctggctgccatcgctggagagctccacaggctgcgtgggcatgtggcagtgcgggggctgtccaagggctttggcctggccacccaggaaccctggatccagtttgccaccatccgagacaacatcctctttgggaagacatttgatgcacagctgtacaaggaggtgctagaagcctgcgccctcaatgatgacctcagtatcctgcctgctggagaccagacagaggtgggggagaagggtgtcacccttagcggaggacagcgtgcccggattgcccttgctcgtgctgtctaccaggaaaaggagctctatctcctcgatgaccctctggccgctgtggatgcagatgtggccaaccacctgctgcacaggtgcatcctgggcatgctgagctacaccacacggctgctctgcacccaccgcactgagtacctggagagggctgacgcggtgctgctgatggaggccgggcgcctcatccgggctggacctccctctgagattctgccactggtacaagctgtccccaaagcctgggctgagaatggacaagagtctgactcagccacagcccagtcagtacagaacccagagaaaacaaaggaggggctggaggaggagcagagcacatctggtcgcctgctgcaggaagaaagcaagaaggagggcgccgtggccttgcacgtgtaccaagcttactggaaggccgtgggccagggcttggccttagccatcctcttctctctgcttctcatgcaagccacgcggaacgctgctgactggtggctctcccactggatctctcagctgaaggctgagaatagctcccaggaggcgcaaccctccaccagcccagcttctatggggctcttctctccgcagctgctcctcttttcccctggaaacctctacatcccagtgttcccactgcccaaagctgcccccaatggctcctcagacatccgtttctacctcaccgtgtatgcgaccattgctggtgtaaattccctctgcacccttctccgggcagtgctctttgcagcaggcacccttcaagcagctgccactctgcatcgccgcctgctgcatcgagtccttatggcaccagtgactttcttcaatgccacacccacgggccggatcctaaaccgcttctcctctgatgtggcctgtgcggatgacagcctgcccttcatcctcaacatcctcctggccaacgcggcaggcctgctggggctcctggccgtgctgggctctggcctgccctggctgctgctcctgctgccgcctttgagcatcatgtactatcacgtgcagcgccactacagggcctcctcacgggagctgcggcgcctgggcagcctcaccctgtctccactgtatagccatctggccgataccttggctggcctctctgtgctccgggccacaggggccacctacaggtttgaggaggagaacctgcgactccttgagctaaaccagaggtgccagtttgccaccagtgccacaatgcagtggctggacattcggctacagctcatgggggcggcagtggtcagcgctatcgcaggcatcgctctggtgcagcaccagcagggcctcgctaacccagggctggtgggcttgtcgctgtcttatgccctgtccctgacgggcctgctctcgggcctggtgagcagcttcacacagacagaggccatgctggtgagcgtcgagcggctggaagagtacacctgtgacctgccccaggaaccccagggccagccactgcagctgggcaccggctggctgacccaggggggcgtggagttccaggacgtggtgttggcgtaccggccagggctgccgaatgccctggatggagtgaccttctgcgtgcagcctggagagaagttgggcatcgtgggccgcacaggctccggcaagtcttccctgttgttggtgctcttccggctgctagagcccagttcagggcgagtgctgctggacggcgtggacaccagccagctggagctggcccagctcagatcccagttggctatcatcccccaggagccctttttgttcagtgggactgttcgggaaaacctggacccccagggcctacataaggacagggccttgtggcaggccctgaagcagtgccacctgagtgaggtgattacatccatgggtggtctggatggtgagctgggtgaggggggccggagcttatctcttgggcagaggcagctgttgtgtttggccagggctctcctcacagatgccaagatcctgtgtatcgatgaggccacagcaagtgtggaccagaagacagaccagctgctccagcagaccatctgcaaacgctttgccaacaagacagtgctgaccattgcccataggctcaacacgatcctgaactcagaccgggtgctggtgctacaagcggggagagtggtagagctggactccccggccaccctgcgcaaccagccccactccctgttccagcagctgctgcagagcagccagcagggagtccctgcctcactcggaggtccctgagcccaatcccacaccctgcagagttctcccctctctctgatccaggccgggcctatacagaggtgctggctgcttgtttacattctcctctggggctctacctctccacacttccccagaagggaaaagggcaccctggattactctttggaaatcactccttggtgggcagcatcctgaggcttccccagaaccaggcctctgctctggccctcttgcatctggaacgccaggtgggtttttctggcataggagcccacttgcattttcatagttttatttgataaaattccatcttacattctgtgtattaaaaaaataatatttctggtgtgaggc

SEQ ID NO: 76 - DNA, 774 bp, Homo sapiens
  source 1..774: mol_type = unassigned DNA
gacgggcggtcccggttccagggcggggctggagacagggagacccggctgggaagtgcaggcaaagccggctgttaccctgcacagccgtcaccctcaactttcccttcaggtaggcgtggccttcgtgggtggtctcatcttggcactgctgctggtacccgtcaacaaagtgattgccacccgcatcatggccagcaaccaggaaatgctacagcacaaggatgcgcgggttaagcttgtgacagagctgctgagtggcattcgggtcatcaagttctgcgggtgggagcaggcactgggagcccgagtagaggcctgccgggctcgagagctggggcgactccgggtcatcaaatacctggatgcggcctgtgtatacctgtgggctgccctaccggttgtcatctccatcgttatcttcatcacctatgtcctcatggggcaccagctcactgccaccaaggtgaggaccaggaaggaaggggaccagcatcaaggagacttcagcgaagtgaagacagaggcttgggccctcagtgctggctgagaaggagggagggatccctgactgcctcatctctcaaccaagggaaaactgaagaaacctttttgtgggggccttggatatataaccctcccctctgtgaaggagttcctttctttcctctcctctacctttcactccagcttctattcagttccaggcttggggttaggtctcttcatcctcgttctaatggccttaggaaaaaaatgtatgatgcaatcctg

SEQ ID NO: 77 - DNA, 5088 bp, Homo sapiens
  source 1..5088: mol_type = unassigned DNA
ttctaatgatcccatcaccaaagtagcaaacgtagtacccaggattttttttttcctagttagtcttcatgttaagtacaatcttacctcaaaattgttaatgtctgtggtttaaaaaaaaacatgaatcagaaatggtgtgggtagtttagaaaatgagttaggttcaggtggccggttagctcagttggtcagaaaatgagttaggttcatctgggaagacttcctgggagaaaagaccctgggttctgaggtaaagtggagtagggataagatgtgcaaggcaggaagggagttgattccttaggtaagtgaattattggaggtgaggggtatgtctggctcctgagtcagccacgatgtgcctccttgtcttcccccttgtccccaggagtccagattacatcctaccctgcagtcctggatggcgcctccgacttgcagcttccttcctgctttccgtcttcccgctgctagaccttcttccagttgctttgccaccaggggcaggcccaggacccatagggctagaggtgttggcagggtgcgtggcagctgtggcctggatcagccacagcctggccctgtgggtgttggcacattcccctcatggccactcccggggtcccttggccttggccctggtagccttgctgccagctccagccctagtgctgaccgtgttgtggcattgccagcgaggcacacttctgcccccacttctcccagggcccatggcccgcctatgcttgctcatcctgcagctggctgcactcttggcctatgcactgggatgggcagctcctgggggaccacgagaaccctgggctcaggagcccctcctgcccgaggatcaagaacctgaggtggctgaagatggggagagttggctgtcacgcttttcctatgcctggctggcacccttgctggcccgtggggcctgtggagagctccggcagcctcaggacatttgccgcctcccccacagactgcagccaacctacctggctcgtgtcttccaggcacactggcaggagggggcacggctgtggagggccttgtatggggcctttggacggtgctatctggcacttggactgctgaagctggtggggaccatgttgggattctcagggcccctgttgctctccctactggtgggcttcctggaagaggggcaggagccactaagccacggcctgctctatgctctggggctagccggtggggctgtgctgggtgctgtgctgcagaatcagtatgggtatgaggtatataaggtaacacttcaggcacggggggctgtgctgaacatcctgtactgcaaggctttacagctggggcccagccgccctcctactggggaggccctgaacctactaggcactgactctgaacggctgcttaactttgctgggagcttccatgaagcctggggcctgcccctgcaactggccatcaccctctacctgctgtaccagcaggtaggcgtggccttcgtgggtggtctcatcttggcactgctgctggtacccgtcaacaaagtgattgccacccgcatcatggccagcaaccaggaaatgctacagcacaaggatgcgcgggttaagcttgtgacagagctgctgagtggcattcgggtcatcaagttctgcgggtgggagcaggcactgggagcccgagtagaggcctgccgggctcgagagctggggcgactccgggtcatcaaatacctggatgcggcctgtgtatacctgtgggctgccctaccggttgtcatctccatcgttatcttcatcacctatgtcctcatggggcaccagctcactgccaccaaggtgttcacggccctggcactggtgcgaatgctcattcttcctctcaacaacttcccttgggtgatcaatggtctcctggaggccaaagtgtccttggaccggatccagcttttcctcgaccttccaaaccacaacccccaggcctactacagcccagattgtggtagattaggagcccaaatcaagtggcttctctgttcagatccccctgcagagccatctacagtattggagctgcatggagccttgttctcctgggacccagttggaaccagcctggagaccttcatcagtcatctcgaagtgaaaaagggtatgctggtgggcatcgtggggaaggtcggctgtgggaagagctccctgctggctgccatcgctggagagctccacaggctgcgtgggcatgtggcagtgcgggggctgtccaagggctttggcctggccacccaggaaccctggatccagtttgccaccatccgagacaacatcctctttgggaagacatttgatgcacagctgtacaaggaggtgctagaagcctgcgccctcaatgatgacctcagtatcctgcctgctggagaccagacagaggtgggggagaagggtgtcacccttagcggaggacagcgtgcccggattgcccttgctcgtgctgtctaccaggaaaaggagctctatctcctcgatgaccctctggccgctgtggatgcagatgtggccaaccacctgctgcacaggtgcatcctgggcatgctgagctacaccacacggctgctctgcacccaccgcactgagtacctggagagggctgacgcggtgctgctgatggaggccgggcgcctcatccgggctggacctccctctgagattctgccactggtacaagctgtccccaaagcctgggctgagaatggacaagagtctgactcagccacagcccagtcagtacagaacccagagaaaacaaaggaggggctggaggaggagcagagcacatctggtcgcctgctgcaggaagaaagcaagaaggagggcgccgtggccttgcacgtgtaccaagcttactggaaggccgtgggccagggcttggccttagccatcctcttctctctgcttctcatgcaagccacgcggaacgctgctgactggtggctctcccactggatctctcagctgaaggctgagaatagctcccaggaggcgcaaccctccaccagcccagcttctatggggctcttctctccgcagctgctcctcttttcccctggaaacctctacatcccagtgttcccactgcccaaagctgcccccaatggctcctcagacatccgtttctacctcaccgtgtatgcgaccattgctggtgtaaattccctctgcacccttctccgggcagtgctctttgcagcaggcacccttcaagcagctgccactctgcatcgccgcctgctgcatcgagtccttatggcaccagtgactttcttcaatgccacacccacgggccggatcctaaaccgcttctcctctgatgtggcctgtgcggatgacagcctgcccttcatcctcaacatcctcctggccaacgcggcaggcctgctggggctcctggccgtgctgggctctggcctgccctggctgctgctcctgctgccgcctttgagcatcatgtactatcacgtgcagcgccactacagggcctcctcacgggagctgcggcgcctgggcagcctcaccctgtctccactgtatagccatctggccgataccttggctggcctctctgtgctccgggccacaggggccacctacaggtttgaggaggagaacctgcgactccttgagctaaaccagaggtgccagtttgccaccagtgccacaatgcagtggctggacattcggctacagctcatgggggcggcagtggtcagcgctatcgcaggcatcgctctggtgcagcaccagcagggcctcgctaacccagggctggtgggcttgtcgctgtcttatgccctgtccctgacgggcctgctctcgggcctggtgagcagcttcacacagacagaggccatgctggtgagcgtcgagcggctggaagagtacacctgtgacctgccccaggaaccccagggccagccactgcagctgggcaccggctggctgacccaggggggcgtggagttccaggacgtggtgttggcgtaccggccagggctgccgaatgccctggatggagtgaccttctgcgtgcagcctggagagaagttgggcatcgtgggccgcacaggctccggcaagtcttccctgttgttggtgctcttccggctgctagagcccagttcagggcgagtgctgctggacggcgtggacaccagccagctggagctggcccagctcagatcccagttggctatcatcccccaggagccctttttgttcagtgggactgttcgggaaaacctggacccccagggcctacataaggacagggccttgtggcaggccctgaagcagtgccacctgagtgaggtgattacatccatgggtggtctggatggtgagctgggtgaggggggccggagcttatctcttgggcagaggcagctgttgtgtttggccagggctctcctcacagatgccaagatcctgtgtatcgatgaggccacagcaagtgtggaccagaagacagaccagctgctccagcagaccatctgcaaacgctttgccaacaagacagtgctgaccattgcccataggctcaacacgatcctgaactcagaccgggtgctggtgctacaagcggggagagtggtagagctggactccccggccaccctgcgcaaccagccccactccctgttccagcagctgctgcagagcagccagcagggagtccctgcctcactcggaggtccctgagcccaatcccacaccctgcagagttctcccctctctctgatccaggccgggcctatacagaggtgctggctgcttgtttacattctcctctggggctctacctctccacacttccccagaagggaaaagggcaccctggattactctttggaaatcactccttggtgggcagcatcctgaggcttccccagaaccaggcctctgctctggccctcttgcatctggaacgccaggtgggtttttctggcataggagcccacttgcattttcatagttttatttgataaaattccatcttacattctgtgtattaaaaaaataatatttctggtgt

SEQ ID NO: 78 - DNA, 4542 bp, Homo sapiens
  source 1..4542: mol_type = unassigned DNA
caacttcccttgggtgatcaatggtctcctggaggccaaagtgtccttggaccggatccagcttttcctcgaccttccaaaccacaacccccaggcctactacagcccagatccccctgcagagccatctacagtattggagctgcatggagccttgttctcctgggacccagttggaaccagcctggagaccttcatcagtcatctcgaagtgaaaaagggtatgctggtgggcatcgtggggaaggtcggctgtgggaagagctccctgctggctgccatcgctggagagctccacaggtaaccaacctcctatgcacccctgtccttactttgtcctttagcaaacactgagcccctcttatgtgttggacaccttttgggggtcaggggtactaagaagagcaacgcatggtccctttattgggagagttttcaatctggaaagaaggaggtggccaagaaagcgaatcattgtaatcattacaccagagtgttttaaatgctataatagtcagcaaaggaatggaaacatccagtgtcagctattctttcagaaatgtggctgtgcagagaagggatccagagaggagcataggtttgagggaggaccttgttttcagatgggaacaagtacaatgtggtggccatactctccactgagctcctgaacagatgtaagtacaacagctgcttggctgtagccaaagagctatttcttcccttcttcgcccagaatgggcttcattaggaccccttgacctcaggagctgccatctcagtcatgtgacatgaagggggaccctgtgtagaagacagcagcctggggaggcttctaggagtcaagggctgggcatggagggacccagaggagagctggtcctcatattgctcgcctggctctctgcaggctgcgtgggcatgtggcagtgcgggggctgtccaagggctttggcctggccacccaggaaccctggatccagtttgccaccatccgagacaacatcctctttgggaagacatttgatgcacagctgtacaaggaggtgctagaagcctgcgccctcaatgatgacctcagtatcctgcctgctggagaccagacagaggtgggggagaagggtgtcacccttagcggaggacagcgtgcccggattgcccttgctcgtgctgtctaccaggaaaaggagctctatctcctcgatgaccctctggccgctgtggatgcagatgtggccaaccacctgctgcacaggtgcatcctgggcatgctgagctacaccacacggctgctctgcacccaccgcactgagtacctggagagggctgacgcggtgctgctgatggaggccgggcgcctcatccgggctggtaatgggggcaggagccccgtgtgagggaggtgtctgcccaggtctggcaggggattgtgaagtacagactctgccccctgctgcatgtgtgccctgagccagtcattgctgcctcccgccttcacagaactggtgtgaggaactgggagaacaggagggaaaaggagtacgttggtaaaatgccagtgtatttgggactcatgggctttgtgactgggtgctcttgggaacttaaaggcccagggtctctgagaacattctcatatcttcagagaagagaaaggagtcaggtttagaatggtctttttgtaaaaacaaaaatttttaaactctgaaagatttttatgcagagggatgtgaccacctgcaagtttactgggagagaaataggaggaaatgaagctccagccagatattaggaattgagcgaagcatgagaaaaagctctgcagtaatgagaagtaaccctggacagagtggcaggcatagctctggcggtcctcttggggatggacattcgtccctctctgctggtcggaatcaaggtttacaaggatggacttgagtcctgctcgaggtctaggggtatccagagcagggtgggttagagagggaggcctaagagtcctgctcgaggtctaggggtatcctgctagggtgggttagacggggaggcctgagaggatgagaggtgggatctgcacacgcactgagaaaggcatagtatagactcagaacagtcctctcccaatctccccttctaccctccaggacctccctctgagattctgccactggtacaagctgtccccaaagcctgggctgagaatggacaagagtctgactcagccacagcccagtcagtacagaacccagagaaaacaaaggaggggctggaggaggagcagagcacatctggtcgcctgctgcaggaagaaagcaagaaggagggcgccgtggccttgcacgtgtaccaagcttactggaaggccgtgggccagggcttggccttagccatcctcttctctctgcttctcatgcaagccacgcggaacgctgctgactggtggctctcccactggatctctcagctgaaggctgagaatagctcccaggaggcgcaaccctccaccagcccagcttctatggggctcttctctccgcagctgctcctcttttcccctggaaacctctacatcccagtgttcccactgcccaaagctgcccccaatggctcctcagacatccgtttctacctcaccgtgtatgcgaccattgctggtgtaaattccctctgcacccttctccgggcagtgctctttgcagcaggcacccttcaagcagctgccactctgcatcgccgcctgctgcatcgagtccttatggcaccagtgactttcttcaatgccacacccacgggccggatcctaaaccgcttctcctctgatgtggcctgtgcggatgacagcctgcccttcatcctcaacatcctcctggccaacgcggcaggcctgctggggctcctggccgtgctgggctctggcctgccctggctgctgctcctgctgccgcctttgagcatcatgtactatcacgtgcagcgccactacagggcctcctcacgggagctgcggcgcctgggcagcctcaccctgtctccactgtatagccatctggccgataccttggctggcctctctgtgctccgggccacaggggccacctacaggtttgaggaggagaacctgcgactccttgagctaaaccagaggtgccagtttgccaccagtgccacaatgcagtggctggacattcggctacagctcatgggggcggcagtggtcagcgctatcgcaggcatcgctctggtgcagcaccagcagggcctcgctaacccagggctggtgggcttgtcgctgtcttatgccctgtccctgacgggcctgctctcgggcctggtgagcagcttcacacagacagaggccatgctggtgagcgtcgagcggctggaagagtacacctgtgacctgccccaggaaccccagggccagccactgcagctgggcaccggctggctgacccaggggggcgtggagttccaggacgtggtgttggcgtaccggccagggctgccgaatgccctggatggagtgaccttctgcgtgcagcctggagagaagttgggcatcgtgggccgcacaggctccggcaagtcttccctgttgttggtgctcttccggctgctagagcccagttcagggcgagtgctgctggacggcgtggacaccagccagctggagctggcccagctcagatcccagttggctatcatcccccaggagccctttttgttcagtgggactgttcgggaaaacctggacccccagggcctacataaggacagggccttgtggcaggccctgaagcagtgccacctgagtgaggtgattacatccatgggtggtctggatggtgagctgggtgaggggggccggagcttatctcttgggcagaggcagctgttgtgtttggccagggctctcctcacagatgccaagatcctgtgtatcgatgaggccacagcaagtgtggaccagaagacagaccagctgctccagcagaccatctgcaaacgctttgccaacaagacagtgctgaccattgcccataggctcaacacgatcctgaactcagaccgggtgctggtgctacaagcggggagagtggtagagctggactccccggccaccctgcgcaaccagccccactccctgttccagcagctgctgcagagcagccagcagggagtccctgcctcactcggaggtccctgagcccaatcccacaccctgcagagttctcccctctctctgatccaggccgggcctatacagaggtgctggctgcttgtttacattctcctctggggctctacctctccacacttccccagaagggaaaagggcaccctggattactctttggaaatcactccttggtgggcagcatcctgaggcttccccagaaccaggcctctgctctggccctcttgcatctggaacgccaggtgggtttttctggcataggagcccacttgcattttcatagttttatttgataaaattccatcttacattctgtgtattaaaaaaataatatttctggtgtg

SEQ ID NO: 79 - DNA, 285 bp, Homo sapiens
  source 1..285: mol_type = unassigned DNA
agacaacatcctctttgggaagacatttgatgcacagctgtacaaggaggtgctagaagcctgcgccctcaatgatgacctcagtatcctgcctgctggagaccagacagaggtgggggagaagggtgtcacccttagcggaggacagcgtgcccggattgcccttgctcgtgctgtctaccaggtcagttaaagatggaggttgcagtggcagggaggtggggggagtccagagccttgggaacttggctgagttaggaggataggaatattttccttagcatc

SEQ ID NO: 80 - DNA, 405 bp, Homo sapiens
  source 1..405: mol_type = unassigned DNA
cgacagccccctcctcaccacccagcatcccagtgttcccactgcccaaagctgcccccaatggctcctcagacatccgtttctacctcaccgtgtatgcgaccattgctggtgtaaattccctctgcacccttctccgggcagtgctctttgcagcaggcacccttcaagcagctgccactctgcatcgccgcctgctgcatcgagtccttatgggctggtgggcttgtcgctgtcttatgccctgtccctgacgggcctgctctcgggcctggtgagcagcttcacacagacagaggccatgctggtgagcgtcgagcggctggaagagtacacctgtgacctgccccaggaaccccagggccagccactgcaggtgggcctgtacccccaccccaggccaaa

SEQ ID NO: 81 - DNA, 733 bp, Homo sapiens
  source 1..733: mol_type = unassigned DNA
tttttttttttgagatggagtctcgctctgttgcccaggctggagtgcagtggcacgatctcggctcactgcaacctctgcctcctgggttcaagcaattctcctgtctcagcctcccaagtagctgggattacaggcgcctgccaccacgcccagctaatttttgtatttttagtagagacagggtttcaccatgttggccaggctggtctcaaactcctgacctcgtgatccacctgccttggcctcccaaagtgctggaattacaggcgtgagccaccgcgcccagcctctgttgcttcctttaaatgccagcagtccacagcctggggagtctcccacaaacgtcccggtgtccaagctctcccagcagctggtacttctctcccccagggctggtgggcttgtcgctgtcttatgccctgtccctgacgggcctgctctcgggcctggtgagcagcttcacacagacagaggccatgctggtgagcgtcgagcggctggaagagtacacctgtgacctgccccaggaaccccagggccagccactgcagctgggcaccggctggctgacccaggggggcgtggagttccaggacgtggtgttggcgtaccggccagggctgccgaatgccctggatggagtgaccttctgcgtgcagcctggagagaagttgggcatcgtgggccgcacaggctccggcaagtcttccctgttgttggtgctcttccg

SEQ ID NO: 82 - DNA, 721 bp, Homo sapiens
  source 1..721: mol_type = unassigned DNA
gaggagggcatagccaggaaggctttatataaactcacagcagccagggctgatcagggggctgaaatggaggacaggatgagcaggcaaggacagcgaactcctagtgcccagatcctgtgtatcgatgaggccacagcaagtgtggaccagaagacagaccagctgctccagcagaccatctgcaaacgctttgccaacaagacagtgctgaccattgcccataggctcaacacgatcctgaactcagaccgggtgctggtgctacaagcggggagagtggtagagctggactccccggccaccctgcgcaaccagccccactccctgttccagcagctgctgcagagcagccagcagggagtccctgcctcactcggaggtccctgagcccaatcccacaccctgcagagttctcccctctctctgatccaggccgggcctatacagaggtgctggctgcttgtttacattctcctctggggctctacctctccacacttccccagaagggaaaagggcaccctggattactctttggaaatcactccttggtgggcagcatcctgaggcttccccagaaccaggcctctgctctggccctcttgcatctggaacgccaggtgggtttttctggcataggagcccacttgcattttcatagttttatttgataaaattccatcttacattctgtgtattaaaaaaataatatttctgg

SEQ ID NO: 83 - DNA, 883 bp, Homo sapiens
  source 1..883: mol_type = unassigned DNA
cttgccttcttccgcatggtggacacgttcgaagggcacatcatcattgatggcattgacatcgccaaactgccgctgcacaccctgcgctcacgcctctccatcatcctgcaggaccccgtcctcttcagcggcaccatccggcccaggcagcctctggaaggggatcccccacccatgggtctaagatgctgtcccccacccactgccaccacctcggtgcttctcccagccagacctccaactcagtctgctctcgctcactgccctctttgccgcctggggatgcaggcaggaccctgctccctccctactggggctttctgtgccacttccagatttaacctggaccctgagaggaagtgctcagatagcacactgtgggaggccctggaaatcgcccagctgaagctggtggtgaaggcactgccaggaggcctcgatgccatcatcacagaaggcggggagaatttcagccagggacagaggcagctgttctgcctggcccgggccttcgtgaggaagaccagcatcttcatcatggacgaggccacggcttccattgacatggccacggaaaacatcctccaaaaggtggtgatgacagccttcgcagaccgcactgtggtcaccatcgcgcatcgagtgcacaccatcctgagtgcagacctggtgatcgtcctgaagcggggtgccatccttgagttcgataagccagagaagctgctcagccggaaggacagcgtcttcgcctccttcgtccgtgcagacaagtgacctgccagagcccaagtgccatcccacattcggaccctgcccatacccctgcctgggttttctaactgtaaatcacttgtaaataaatagatttgattatttccta

SEQ ID NO: 84 - DNA, 612 bp, Homo sapiens
  source 1..612: mol_type = unassigned DNA
agacatgacaggaggcccagcagtcaccgccttcccctgcaccctcactgggacccatgcagggcacatcatcattgatggcattgacatcgccaaactgccgctgcacaccctgcgctcacgcctctccatcatcctgcaggaccccgtcctcttcagcggcaccatccgatgccatcatcacagaaggcggggagaatttcagccagggacagaggcagctgttctgcctggcccgggccttcgtgaggaagaccagcatcttcatcatggacgaggccacggcttccattgacatggccacggaaaacatcctccaaaaggtggtgatgacagccttcgcagaccgcactgtggtcaccatcgcgcatcgagtgcacaccatcctgagtgcagacctggtgatcgtcctgaagcggggtgccatccttgagttcgataagccagagaagctgctcagccggaaggacagcgtcttcgcctccttcgtccgtgcagacaagtgacctgccagagcccaagtgccatcccacattcggaccctgcccatacccctgcctgggttttctaactgtaaatcacttgtaaataaatagatttgattatttccta

SEQ ID NO: 85 - DNA, 4921 bp, Homo sapiens
  source 1..4921: mol_type = unassigned DNA
agaggcgcggcaggcgcgcggagccagcggagccagctgagcccgagcccagcccgcgcccgcgccgccatgcccctggccttctgcggcagcgagaaccactcggccgcctaccgggtggaccagggggtcctcaacaacggctgctttgtggacgcgctcaacgtggtgccgcacgtcttcctactcttcatcaccttccccatcctcttcattggatggggaagtcagagctccaaggtgcacatccaccacagcacatggcttcatttccctgggcacaacctgcggtggatcctgaccttcatgctgctcttcgtcctggtgtgtgagattgcagagggcatcctgtctgatggggtgaccgaatcccaccatctgcacctgtacatgccagccgggatggcgttcatggctgctgtcacctccgtggtctactatcacaacatcgagacttccaacttccccaagctgctaattgccctgctggtgtattggaccctggccttcatcaccaagaccatcaagtttgtcaagttcttggaccacgccatcggcttctcgcagctacgcttctgcctcacagggctgctggtgatcctctatgggatgctgctcctcgtggaggtcaatgtcatcagggtgaggagatacatcttcttcaagacaccgagggaggtgaagcctcccgaggacctgcaagacctgggggtacgcttcctgcagcccttcgtgaatctgctgtccaaaggcacctactggtggatgaacgccttcatcaagactgcccacaagaagcccatcgacttgcgagccatcgggaagctgcccatcgccatgagggccctcaccaactaccaacggctctgcgaggcctttgacgcccaggtgcggaaggacattcagggcactcaaggtgcccgggccatctggcaggcactcagccatgccttcgggaggcgcctggtcctcagcagcactttccgcatcttggccgacctgctgggcttcgccgggccactgtgcatctttgggatcgtggaccaccttgggaaggagaacgacgtcttccagcccaagacacaatttctcggggtttactttgtctcatcccaagagttccttgccaatgcctacgtcttagctgtgcttctgttccttgccctcctactgcaaaggacatttctgcaagcatcctactatgtggccattgaaactggaattaacttgagaggagcaatacagaccaagatttacaataaaattatgcacctgtccacctccaacctgtccatgggagaaatgactgctggacagatctgtaatctggttgccatcgacaccaatcagctcatgtggtttttcttcttgtgcccaaacctctgggctatgccagtacagatcattgtgggtgtgattctcctctactacatactcggagtcagtgccttaattggagcagctgtcatcattctactggctcctgtccagtacttcgtggccaccaagctgtctcaggcccagcggagcacactggagtattccaatgagcggctgaagcagaccaacgagatgctccgcggcatcaagctgctgaagctgtacgcctgggagaacatcttccgcacgcgggtggagacgacccgcaggaaggagatgaccagcctcagggcctttgccatctatacctccatctccattttcatgaacacggccatccccattgcagctgtcctcataactttcgtgggccacgtcagcttcttcaaagaggccgacttctcgccctccgtggcctttgcctccctctccctcttccatatcttggtcacaccgctgttcctgctgtccagtgtggtccgatctaccgtcaaagctctagtgagcgtgcaaaagctaagcgagttcctgtccagtgcagagatccgtgaggagcagtgtgccccccatgagcccacacctcagggcccagccagcaagtaccaggcggtgcccctcagggttgtgaaccgcaagcgtccagcccgggaggattgtcggggcctcaccggcccactgcagagcctggtccccagtgcagatggcgatgctgacaactgctgtgtccagatcatgggaggctacttcacgtggaccccagatggaatccccacactgtccaacatcaccattcgtatcccccgaggccagctgactatgatcgtggggcaggtgggctgcggcaagtcctcgctccttctagccgcactgggggagatgcagaaggtctcaggggctgtcttctggagcagccttcctgacagcgagataggagaggaccccagcccagagcgggagacagcgaccgacttggatatcaggaagagaggccccgtggcctatgcttcgcagaaaccatggctgctaaatgccactgtggaggagaacatcatctttgagagtcccttcaacaaacaacggtacaagatggtcattgaagcctgctctctgcagccagacatcgacatcctgccccatggagaccagacccagattggggaacggggcatcaacctgtctggtggtcaacgccagcgaatcagtgtggcccgagccctctaccagcacgccaacgttgtcttcttggatgaccccttctcagctctggatatccatctgagtgaccacttaatgcaggccggcatccttgagctgctccgggacgacaagaggacagtggtcttagtgacccacaagctacagtacctgccccatgcagactggatcattgccatgaaggatggcaccatccagagggagggtaccctcaaggacttccagaggtctgaatgccagctctttgagcactggaagaccctcatgaaccgacaggaccaagagctggagaaggagactgtcacagagagaaaagccacagagccaccccagggcctatctcgtgccatgtcctcgagggatggccttctgcaggatgaggaagaggaggaagaggaggcagctgagagcgaggaggatgacaacctgtcgtccatgctgcaccagcgtgctgagatcccatggcgagcctgcgccaagtacctgtcctccgccggcatcctgctcctgtcgttgctggtcttctcacagctgctcaagcacatggtcctggtggccatcgactactggctggccaagtggaccgacagcgccctgaccctgacccctgcagccaggaactgctccctcagccaggagtgcaccctcgaccagactgtctatgccatggtgttcacggtgctctgcagcctgggcattgtgctgtgcctcgtcacgtctgtcactgtggagtggacagggctgaaggtggccaagagactgcaccgcagcctgctaaaccggatcatcctagcccccatgaggttttttgagaccacgccccttgggagcatcctgaacagattttcatctgactgtaacaccatcgaccagcacatcccatccacgctggagtgcctgagccgctccaccctgctctgtgtctcagccctggccgtcatctcctatgtcacacctgtgttcctcgtggccctcttgcccctggccatcgtgtgctacttcatccagaagtacttccgggtggcgtccagggacctgcagcagctggatgacaccacccagcttccacttctctcacactttgccgaaaccgtagaaggactcaccaccatccgggccttcaggtatgaggcccggttccagcagaagcttctcgaatacacagactccaacaacattgcttccctcttcctcacagctgccaacagatggctggaagtccgaatggagtacatcggtgcatgtgtggtgctcatcgcagcggtgacctccatctccaactccctgcacagggagctctctgctggcctggtgggcctgggccttacctacgccctaatggtctccaactacctcaactggatggtgaggaacctggcagacatggagctccagctgggggctgtgaagcgcatccatgggctcctgaaaaccgaggcagagagctacgaggggctcctggcaccatcgctgatcccaaagaactggccagaccaagggaagatccagatccagaacctgagcgtgcgctacgacagctccctgaagccggtgctgaagcacgtcaatgccctcatcgcccctggacagaagatcgggatctgcggccgcaccggcagtgggaagtcctccttctctcttgccttcttccgcatggtggacacgttcgaagggcacatcatcattgatggcattgacatcgccaaactgccgctgcacaccctgcgctcacgcctctccatcatcctgcaggaccccgtcctcttcagcggcaccatccgatttaacctggaccctgagaggaagtgctcagatagcacactgtgggaggccctggaaatcgcccagctgaagctggtggtgaaggcactgccaggaggcctcgatgccatcatcacagaaggcggggagaatttcagccagggacagaggcagctgttctgcctggcccgggccttcgtgaggaagaccagcatcttcatcatggacgaggccacggcttccattgacatggccacggaaaacatcctccaaaaggtggtgatgacagccttcgcagaccgcactgtggtcaccatcgcgcatcgagtgcacaccatcctgagtgcagacctggtgatcgtcctgaagcggggtgccatccttgagttcgataagccagagaagctgctcagccggaaggacagcgtcttcgcctccttcgtccgtgcagacaagtgacctgccagagcccaagtgccatcccacattcggaccctgcccatacccctgcctgggttttctaactgtaaatcacttgtaaataaatagatttgattatttccta

SEQ ID NO: 86 - DNA, 537 bp, Homo sapiens
  source 1..537: mol_type = unassigned DNA
gccgcaccggcagtgggaagtcctccttctctcttgccttcttccgcatggtggacacgttcgaaggaccccgtcctcttcagcggcaccatccgatttaacctggaccctgagaggaagtgctcagatagcacactgtgggaggccctggaaatcgcccagctgaagctggtggtgaaggcactgccaggaggcctcgatgccatcatcacagaaggcggggagaatttcagccagggacagaggcagctgttctgcctggcccgggccttcgtgaggaagaccagcatcttcatcatggacgaggccacggcttccattgacatggccacggaaaacatcctccaaaaggtggtgatgacagccttcgcagaccgcactgtggtcaccatcgcgcatcgagtgcacaccatcctgagtgcagacctggtgatcgtcctgaagcggggtgccatccttgagttcgataagccagagaagctgctcagccggaaggacagcgtcttcgcctccttcgtccgtgcagacaagtgacct

SEQ ID NO: 87 - DNA, 675 bp, Homo sapiens
  source 1..675: mol_type = unassigned DNA
cgcaccggcagtgggaagtcctccttctctcttgccttcttccgcatggtggacacgttcgaaggtgagttgtaaggcgggcaccccacgtgtacccacagccaccagatgaggcctcagccctggcacgtggtcagacatgacaggaggcccagcagtcaccgccttcccctgcaccctcactgggacccatgcagggcacatcatcattgatggcattgacatcgccaaactgccgctgcacaccctgcgctcacgcctctccatcatcctgcaggaccccgtcctcttcagcggcaccatccgatgccatcatcacagaaggcggggagaatttcagccagggacagaggcagctgttctgcctggcccgggccttcgtgaggaagaccagcatcttcatcatggacgaggccacggcttccattgacatggccacggaaaacatcctccaaaaggtggtgatgacagccttcgcagaccgcactgtggtcaccatcgcgccgcaggagggccaccctcagctgtggcccccaccgcgggtggtattcccaccatcctgacccgccccctcctgccctgcccagcatcgagtgcacaccatcctgagtgcagacctggtgatcgtcctgaagcggggtgccatccttgagttcgataagccagagaagctgc

SEQ ID NO: 88 - DNA, 611 bp, Homo sapiens
  source 1..611: mol_type = unassigned DNA
gacaggtggaggttggggagccacatgactgaccctccctgtgcctccagggagggctgctctgagcaggcagtggatggcagcaaaaggaatctggggccctggcccctctccagccttaagaagagccattctggtggctgaggacagaactaagcgaccatggagtgtgcgccactggcttgctccccacaggtctccaactacctcaactggatggtgaggaacctggcagacatggagctccagctgggggctgtgaagcgcatccatgggctcctgaaaaccgaggcagagagctacgaggggctcctgggtgagaggctcagggagaggggtggggaagagtccaaggaggagtgtgtctgggttgggggccacaagggagcctggggatggggtggcactttcggatactagctgtggcccatgcctggtggctgagcccagcccggcccccagcaccatcgctgatcccaaagaactggccagaccaagggaagatccagatccagaacctgagcgtgcgctacgacagctccctgaagccggtgctgaagcacgtcaatgccctcatcgcccctggacagaagatcgggatctgcggccgc

SEQ ID NO: 89 - DNA, 611 bp, Homo sapiens
  source 1..611: mol_type = unassigned DNA
ccagaagtacttccgggtggcgtccagggacctgcagcagctggatgacaccacccagcttccacttctctcacactttgccgaaaccgtagaaggactcaccaccatccgggccttcaggtatgaggcccggttccagcagaagcttctcgaatacacagactccaacaacattgcttccctcttcctcacagctgccaacagatggctggaagtccgaatggagtacatcggtgcatgtgtggtgctcatcgcagcggtgacctccatctccaactccctgcacagggagctctctgctggcctggtgggcctgggccttacctacgccctaatggtctccaactacctcaactggatggtgaggaacctggcagacatggagctccagctgggggctgtgaagcgcatccatgggctcctgaaaaccgaggcagagagctacgaggggctcctggcccggcccccagcaccatcgctgatcccaaagaactggccagaccaagggaagatccagatccagaacctgagcgtgcgctacgacagctccctgaagccggtgctgaagcacgtcaatgccctcatcgcccctggacagaagatcgggatct

SEQ ID NO: 90 - DNA, 4283 bp, Homo sapiens
  source 1..4283: mol_type = unassigned DNA
gcggagccagctgagcccgagcccagcccgcgcccgcgccgccatgcccctggccttctgcggcagcgagaaccactcggccgcctaccgggtggaccagggggtcctcaacaacggctgctttgtggacgcgctcaacgtggtgccgcacgtcttcctactcttcatcaccttccccatcctcttcattggatggggaagtcagagctccaaggtgcacatccaccacagcacatggcttcatttccctgggcacaacctgcggtggatcctgaccttcatgctgctcttcgtcctggtgtgtgagattgcagagggcatcctgtctgatggggtgaccgaatcccaccatctgcacctgtacatgccagccgggatggcgttcatggctgctgtcacctccgtggtctactatcacaacatcgagacttccaacttccccaagctgctaattgccctgctggtgtattggaccctggccttcatcaccaagaccatcaagtttgtcaagttcttggaccacgccatcggcttctcgcagctacgcttctgcctcacagggctgctggtgatcctctatgggatgctgctcctcgtggaggtcaatgtcatcagggtgaggagatacatcttcttcaagacaccgagggaggtgaagcctcccgaggacctgcaagacctgggggtacgcttcctgcagcccttcgtgaatctgctgtccaaaggcacctactggtggatgaacgccttcatcaagactgcccacaagaagcccatcgacttgcgagccatcgggaagctgcccatcgccatgagggccctcaccaactaccaacggctctgcgaggcctttgacgcccaggtgcggaaggacattcagggcactcaaggtgcccgggccatctggcaggcactcagccatgccttcgggaggcgcctggtcctcagcagcactttccgcatcttggccgacctgctgggcttcgccgggccactgtgcatctttgggatcgtggaccaccttgggaaggagaacgacgtcttccagcccaagacacaatttctcggggtttactttgtctcatcccaagagttccttgccaatgcctacgtcttagctgtgcttctgttccttgccctcctactgcaaaggacatttctgcaagcatcctactatgtggccattgaaactggaattaacttgagaggagcaatacagaccaagatttacaataaaattatgcacctgtccacctccaacctgtccatgggagaaatgactgctggacagatctgtaatctggttgccatcgacaccaatcagctcatgtggtttttcttcttgtgcccaaacctctgggctatgccagtacagatcattgtgggtgtgattctcctctactacatactcggagtcagtgccttaattggagcagctgtcatcattctactggctcctgtccagtacttcgtggccaccaagctgtctcaggcccagcggagcacactggagtattccaatgagcggctgaagcagaccaacgagatgctccgcggcatcaagctgctgaagctgtacgcctgggagaacatcttccgcacgcgggtggagacgacccgcaggaaggagatgaccagcctcagggcctttgccatctatacctccatctccattttcatgaacacggccatccccattgcagctgtcctcataactttcgtgggccacgtcagcttcttcaaagaggccgacttctcgccctccgtggcctttgcctccctctccctcttccatatcttggtcacaccgctgttcctgctgtccagtgtggtccgatctaccgtcaaagctctagtgagtgcagagatccgtgaggagcagtgtgccccccatgagcccacacctcagggcccagccagcaagtaccaggcggtgcccctcagggttgtgaaccgcaagcgtccagcccgggaggattgtcggggcctcaccggcccactgcagagcctggtccccagtgcagatggcgatgctgacaactgctgtgtccagatcatgggaggctacttcacgtggaccccagatggaatccccacactgtccaacatcaccattcgtatcccccgaggccagctgactatgatcgtggggcaggtgggctgcggcaagtcctcgctccttctagccgcactgggggagatgcagaaggtctcaggggctgtcttctggagcagccttcctgacagcgagataggagaggaccccagcccagagcgggagacagcgaccgacttggatatcaggaagagaggccccgtggcctatgcttcgcagaaaccatggctgctaaatgccactgtggaggagaacatcatctttgagagtcccttcaacaaacaacggtacaagatggtcattgaagcctgctctctgcagccagacatcgacatcctgccccatggagaccagacccagattggggaacggggcatcaacctgtctggtggtcaacgccagcgaatcagtgtggcccgagccctctaccagcacgccaacgttgtcttcttggatgaccccttctcagctctggatatccatctgagtgaccacttaatgcaggccggcatccttgagctgctccgggacgacaagaggacagtggtcttagtgacccacaagctacagtacctgccccatgcagactggatcattgccatgaaggatggcaccatccagagggagggtaccctcaaggacttccagaggtctgaatgccagctctttgagcactggaagaccctcatgaaccgacaggaccaagagctggagaagaggaggcagctgagagcgaggaggatgacaacctgtcgtccatgctgcaccagcgtgctgagatcccatggcgagcctgcgccaagtacctgtcctccgccggcatcctgctcctgtcgttgctggtcttctcacagctgctcaagcacatggtcctggtggccatcgactactggctggccaagtggaccgacagcgccctgaccctgacccctgcagccaggaactgctccctcagccaggagtgcaccctcgaccagactgtctatgccatggtgttcacggtgctctgcagcctgggcattgtgctgtgcctcgtcacgtctgtcactgtggagtggacagggctgaaggtggccaagagactgcaccgcagcctgctaaaccggatcatcctagcccccatgaggttttttgagaccacgccccttgggagcatcctgaacagattttcatctgactgtaacaccatcgaccagcacatcccatccacgctggagtgcctgagccgctccaccctgctctgtgtctcagccctggccgtcatctcctatgtcacacctgtgttcctcgtggccctcttgcccctggccatcgtgtgctacttcatccagaagtacttccgggtggcgtccagggacctgcagcagctggatgacaccacccagcttccacttctctcacactttgccgaaaccgtagaaggactcaccaccatccgggccttcaggtatgaggcccggttccagcagaagcttctcgaatacacagactccaacaacattgcttccctcttcctcacagctgccaacagatggctggaagtccgaatggagtacatcggtgcatgtgtggtgctcatcgcagcggtgacctccatctccaactccctgcacagggagctctctgctggcctggtgggcctgggccttacctacgccctaatggtctccaactacctcaactggatggtgaggaacctggcagacatggagctccagctgggggctgtgaagcgcatccatgggctcctgaaaaccgaggcagagagctacgaggggctcctgggtgagaggctcagggagaggggtggggaagagtccaaggaggagtgtgtctgggttgggggccacaagggagcctggggatggggtggcactttcggatactagctgtggcccatgcctggtggctgagcccagcccggcccccagcaccatcgctgatcccaaagaactggccagaccaagggaagatccagatccagaacctgagcgtgcgctacgacagctccctgaagccggtgctgaagcacgtcaatgccctcatcgcccctggacagaaggtcagagcacgggcccaacccaatgctgcaggacaggcgtgagcaggggatggggcatgcacggagctggatggcttcgcagtcacctcgtggccctccagggcc

SEQ ID NO: 91 - DNA, 440 bp, Homo sapiens
  source 1..440: mol_type = unassigned DNA
caccatccgggccttcaggtatgaggcccggttccagcagaagcttctcgaatacacagactccaacaacattgcttccctcttcctcacagctgccaacagatggctggaagtccgaatggagtacatcggtgcatgtgtggtgctcatcgcagcggtgacctccatctccaactccctgcacagggagctctctgctggcctggtgggcctgggccttacctacgccctaatggtctccaactacctcaactggatggtgaggaacctggcagacatggagctccagctgggggctgtgaagcgcatccatgggctcctgaaaaccgaggcagagagctacgaggggctcctggaccaagggaagatccagatccagaacctgagcgtgcgctacgacagctccctgaagccggtgctgaagcacgtcaatgccctca

SEQ ID NO: 92 - DNA, 665 bp, Homo sapiens
  source 1..665: mol_type = unassigned DNA
ctggccatcgtgtgctacttcatccagaagtacttccgggtggcgtccagggacctgcagcagctggatgacaccacccagcttccacttctctcacactttgccgaaaccgtagaaggactcaccaccatccgggccttcagctgccaacagatggctggaagtccgaatggagtacatcggtgcatgtgtggtgctcatcgcagcggtgacctccatctccaactccctgcacagggagctctctgctggcctggtgggcctgggccttacctacgccctaatggtctccaactacctcaactggatggtgaggaacctggcagacatggagctccagctgggggctgtgaagcgcatccatgggctcctgaaaaccgaggcagagagctacgaggggctcctgggtgagaggctcagggagaggggtggggaagagtccaaggaggagtgtgtctgggttgggggccacaagggagcctggggatggggtggcactttcggatactagctgtggcccatgcctggtggctgagcccagcccggcccccagcaccatcgctgatcccaaagaactggccagaccaagggaagatccagatccagaacctgagcgtgcgctacgacagctccctgaagccggtgctgaagcacgtcaatgccct

SEQ ID NO: 93 - DNA, 708 bp, Homo sapiens
  source 1..708: mol_type = unassigned DNA
cctcagagggatggaaatgtgtagccacagagtgggttcttgcggcctgcagaggaggcagctgagagcgaggaggatgacaacctgtcgtccatgctgcaccagcgtgctgagatcccatggcgagcctgcgccaagtacctgtcctccgccggcatcctgctcctgtcgttgctggtcttctcacagctgctcaagcacatggtcctggtggccatcgactactggctggccaagtggaccgacagcgccctgaccctgacccctgcagccaggaactgctccctcagccaggagtgcaccctcgaccagactgtctatgccatggtgttcacggtgctctgcagcctgggcattgtgctgtgcctcgtcacgtctgtcactgtggagtggacagggctgaaggtggccaagagactgcaccgcagcctgctaaaccggatcatcctagcccccatgaggttttttgagaccacgccccttgggagcatcctgaacagattttcatctgactgtaacaccatcgaccagcacatcccatccacgctggagtgcctgagccgctccaccctgctctgtgtctcagccctggccgtcatctcctatgtcacacctgtgttcctcgtggccctcttgcccctggccatcgtgtgctacttcatccagaagtacttccgggtggcgtccagggacctgcagcagctggat

SEQ ID NO: 94 - DNA, 958 bp, Homo sapiens
  source 1..958: mol_type = unassigned DNA
atgaccctctgcaagtgctcgggccaactctgaccaggctgaccagctgcatcccctgcctctacccacgccaggtacaagatggtcattgaagcctgctctctgcagccagacatcgacatcctgccccatggagaccagacccagattggggaacggggcatcaacctgtctggtggtcaacgccagcgaatcagtgtggcccgagccctctaccagcacgccaacgttgtcttcttggatgaccccttctcagctctggatatccatctgagtgaccacttaatgcaggccggcatccttgagctgctccgggacgacaagaggacagtggtcttagtgacccacaagctacagtacctgccccatgcagactggatcattgccatgaaggatggcaccatccagagggagggtaccctcaaggacttccagaggtctgaatgccagctctttgagcactggaagaccctcatgaaccgacaggaccaagagctggagaaggagactgtcacagagagaaaagccacagagccaccccagggcctatctcgtgccatgtcctcgagggatggccttctgcaggatgaggaagaggaggaagaggaggcagctgagagcgaggaggatgacaacctgtcgtccatgctgcaccagcgtgctgagatcccatggcgagcctgcgccaagtacctgtcctccgccggcatcctgctcctgtcgttgctggtcttctcacagctgctcaagcacatggtcctggtggccatcgactactggctggccaagtggaccgacagcgccctgaccctgacccctgcagccaggaactgctccctcagccaggagtgcaccctcgaccagactgtctatgccatggtgttcacggtgctctgcagcctgggcattgtgctgtgcctcgtcacgtctgtcactgtggagtggacagggctgaagg

SEQ ID NO: 95 - DNA, 836 bp, Homo sapiens
  source 1..836: mol_type = unassigned DNA
ctgctaaatgccactgtggaggagaacatcatctttgagagtcccttcaacaaacaacggtacaagatggtcattgaagcctgctctctgcagccagacatcgacatcctgccccatggagaccagacccagattggggaacggggcatcaacctgtctggtggtcaacgccagcgaatcagtgtggcccgagccctctaccagcacgccaacgttgtcttcttggatgaccccttctcagctctggatatccatctgagtgaccacttaatgcaggccggcatccttgagctgctccgggacgacaagaggacagtggtcttagtgacccacaagctacagtacctgccccatgcagactggatcattgccatgaaggatggcaccatccagagggagggtaccctcaaggacttccagaggtctgaatgccagctctttgagcactggaagaccctcatgaaccgacaggaccaagagctggagaaggagactgtcacagagagaaaagccacagagccaccccagggcctatctcgtgccatgtcctcgagggatggccttctgcaggatgaggaagaggaggaagaggaggcagctgagagcgaggaggatgacaacctgtcgtccatgctgcaccagcgtgctgagatcccatggcgagcctgcgccaagtacctgtcctccgccggcatcctgctcctgtcgttgctggtcttctcacagctgctcaagcacatggtcctggtggccatcgactactggctggccaagtggaccgacagcgccctgaccctgacccctgcagccaggaactgctccctcagccaggtgtg

SEQ ID NO: 96 - DNA, 547 bp, Homo sapiens
  source 1..547: mol_type = unassigned DNA
gctcgggccaactctgaccaggctgaccagctgcatcccctgcctctacccacgccagggcatcaacctgtctggtggtcaacgccagcgaatcagtgtggcccgagccctctaccagcacgccaacgttgtcttcttggatgaccccttctcagctctggatatccatctgagtgaccacttaatgcaggccggcatccttgagctgctccgggacgacaagaggacagtggtcttagtgacccacaagctacagtacctgccccatgcagactgggtgagggggaacaagggggtcaggctatagggggcagggctggggaggctgtcaggcatcttggcaggaaccaatccgttgtcttggtagcaactgctgagggccacaaagcataagagaccagcactggatggctttatgcatgctgggcatttcagggagaccctgtacaggccaggggtttggtatcacctagacccacagacactccccatcctggcccgggccccccatggtacactcaaggctggcaccaagaagtctcaggaa

SEQ ID NO: 97 - DNA, 727 bp, Homo sapiens
  source 1..727: mol_type = unassigned DNA
ggccagtctcccactcccctgctctggaagtgatccaggggctggaatcagtgtcttttggctttcatggaggaggggaagccagagactattcactgggaactggctgcctttctgttctctcctgggcggtgggacacgcctaatgaagatcatgggaggctacttcacgtggaccccagatggaatccccacactgtccaacatcaccattcgtatcccccgaggccagctgactatgatcgtggggcaggtgggctgcggcaagtcctcgctccttctagccgcactgggggagatgcagaaggtctcaggggctgtcttctggagcagcagccttcctgacagcgagataggagaggaccccagcccagagcgggagacagcgaccgacttggatatcaggaagagaggccccgtggcctatgcttcgcagaaaccatggctgctaaatgccactgtggaggagaacatcatctttgagagtcccttcaacaaacaacggtacaagatggtcattgaagcctgctctctgcagccagacatcgacatcctgccccatggagaccagacccagattggggaacggggcatcaacctgtctggtggtcaacgccagcgaatcagtgtggcccgagccctctaccagcacgccaacgttgtcttcttggatgaccccttctcagctctggatatccatctgagtgaccacttaatgcaggccggc

SEQ ID NO: 98 - DNA, 2098 bp, Homo sapiens
  source 1..2098: mol_type = unassigned DNA
gagcccgagcccagcccgcgcccgcgccgccatgcccctggccttctgcggcagcgagaaccactcggccgcctaccgggtggaccagggggtcctcaacaacggctgctttgtggacgcgctcaacgtggtgccgcacgtcttcctactcttcatcaccttccccatcctcttcattggatggggaagtcagagctccaaggtgcacatccaccacagcacatggcttcatttccctgggcacaacctgcggtggatcctgaccttcatgctgctcttcgtcctggtgtgtgagattgcagagggcatcctgtctgatggggtgaccgaatcccaccatctgcacctgtacatgccagccgggatggcgttcatggctgctgtcacctccgtggtctactatcacaacatcgagacttccaacttccccaagctgctaattgccctgctggtgtattggaccctggccttcatcaccaagaccatcaagtttgtcaagttcttggaccacgccatcggcttctcgcagctacgcttctgcctcacagggctgctggtgatcctctatgggatgctgctcctcgtggaggtcaatgtcatcagggtgaggagatacatcttcttcaagacaccgagggaggtgaagcctcccgaggacctgcaagacctgggggtacgcttcctgcagcccttcgtgaatctgctgtccaaaggcacctactggtggatgaacgccttcatcaagactgcccacaagaagcccatcgacttgcgagccatcgggaagctgcccatcgccatgagggccctcaccaactaccaacggctctgcgaggcctttgacgcccaggtgcggaaggacattcagggcactcaaggtgcccgggccatctggcaggcactcagccatgccttcgggaggcgcctggtcctcagcagcactttccgcatcttggccgacctgctgggcttcgccgggccactgtgcatctttgggatcgtggaccaccttgggaaggagaacgacgtcttccagcccaagacacaatttctcggggtttactttgtctcatcccaagagttccttgccaatgcctacgtcttagctgtgcttctgttccttgccctcctactgcaaaggacatttctgcaagcatcctactatgtggccattgaaactggaattaacttgagaggagcaatacagaccaagatttacaataaaattatgcacctgtccacctccaacctgtccatgggagaaatgactgctggacagatctgtaatctggttgccatcgacaccaatcagctcatgtggtttttcttcttgtgcccaaacctctgggctatgccagtacagatcattgtgggtgtgattctcctctactacatactcggagtcagtgccttaattggagcagctgtcatcattctactggctcctgtccagtacttcgtggccaccaagctgtctcaggcccagcggagcacactggagtattccaatgagcggctgaagcagaccaacgagatgctccgcggcatcaagctgctgaagctgtacgcctgggagaacatcttccgcacgcgggtggagacgacccgcaggaaggagatgaccagcctcagggcctttgccatctatacctccatctccattttcatgaacacggccatccccattgcagctgtcctcataactttcgtgggccacgtcagcttcttcaaagaggccgacttctcgccctccgtggcctttgcctccctctccctcttccatatcttggtcacaccgctgttcctgctgtccagtgtggtccgatctaccgtcaaagctctagtgaggtgaggggagggtccgggcgagggcactgggcaggcaggtcctgtgtcagcctcaaggcttgctcgagtgatggccaaaccacagctgtttggtcccggaacacacccccattgctgggccttgctgtagctggtcctggttggtcagagggacattggcctgtatggtttcccagctcgccatccctgagcaaggacttgcttacatacctcccaggagaggggactcactgtcactttcacgacaact

SEQ ID NO: 99 - DNA, 549 bp, Homo sapiens
  source 1..549: mol_type = unassigned DNA
cgcgggtggagacgacccgcaggaaggagatgaccagcctcagggcctttgccatctatacctccatctccattttcatgaacacggccatccccattgcagctgtcctcatatgctgagcgtttccagtgtgggagggacccacaccctgggccaccctggcctcacttgtgcctctgtccacagactttcgtgggccacgtcagcttcttcaaagaggccgacttctcgccctccgtggcctttgcctccctctccctcttccatatcttggtcacaccgctgttcctgctgtccagtgtggtccgatctaccgtcaaagctctagtgaggtgaggggagggtccgggcgagggcactgggcaggcaggtcctgtgtcagcctcaaggcttgctcgagtgatggccaaaccacagctgtttggtcccggaacacacccccattgctgggccttgctgtagctggtcctggttggtcagagggacattggcctgtatggtttcccagctcgccatccctgagcaaggacttgcttacatacctcccag

SEQ ID NO: 100 - DNA, 2011 bp, Homo sapiens
  source 1..2011: mol_type = unassigned DNA
gagcccgagcccagcccgcgcccgcgccgccatgcccctggccttctgcggcagcgagaaccactcggccgcctaccgggtggaccagggggtcctcaacaacggctgctttgtggacgcgctcaacgtggtgccgcacgtcttcctactcttcatcaccttccccatcctcttcattggatggggaagtcagagctccaaggtgcacatccaccacagcacatggcttcatttccctgggcacaacctgcggtggatcctgaccttcatgctgctcttcgtcctggtgtgtgagattgcagagggcatcctgtctgatggggtgaccgaatcccaccatctgcacctgtacatgccagccgggatggcgttcatggctgctgtcacctccgtggtctactatcacaacatcgagacttccaacttccccaagctgctaattgccctgctggtgtattggaccctggccttcatcaccaagaccatcaagtttgtcaagttcttggaccacgccatcggcttctcgcagctacgcttctgcctcacagggctgctggtgatcctctatgggatgctgctcctcgtggaggtcaatgtcatcagggtgaggagatacatcttcttcaagacaccgagggaggtgaagcctcccgaggacctgcaagacctgggggtacgcttcctgcagcccttcgtgaatctgctgtccaaaggcacctactggtggatgaacgccttcatcaagactgcccacaagaagcccatcgacttgcgagccatcgggaagctgcccatcgccatgagggccctcaccaactaccaacggctctgcgaggcctttgacgcccagcggaaggacattcagggcactcaaggtgcccgggccatctggcaggcactcagccatgccttcgggaggcgcctggtcctcagcagcactttccgcatcttggccgacctgctgggcttcgccgggccactgtgcatctttgggatcgtggaccaccttgggaaggagaacgacgtcttccagcccaagacacaatttctcggggtttactttgtctcatcccaagagttccttgccaatgcctacgtcttagctgtgcttctgttccttgccctcctactgcaaaggacatttctgcaagcatcctactatgtggccattgaaactggaattaacttgagaggagcaatacagaccaagatttacaataaaattatgcacctgtccacctccaacctgtccatgggagaaatgactgctggacagatctgtaatctggttgccatcgacaccaatcagctcatgtggtttttcttcttgtgcccaaacctctgggctatgccagtacagatcattgtgggtgtgattctcctctactacatactcggagtcagtgccttaattggagcagctgtcatcattctactggctcctgtccagtacttcgtggccaccaagctgtctcaggcccagcggagcacactggagtattccaatgagcggctgaagcagaccaacgagatgctccgcggcatcaagctgctgaagctgtacgcctgggagaacatcttccgcacgcgggtggagacgacccgcaggaaggagatgaccagcctcagggcctttgccatctatacctccatctccattttcatgaacacggccatccccattgcagctgtcctcataactttcgtgggccacgtcagcttcttcaaagaggccgacttctcgccctccgtggcctttgcctccctctccctcttccatatcttggtcacaccgctgttcctgctgtccagtgtggtccgatctaccgtcaaagctctagtgaggtgaggggagggtccgggcgagggcactgggcaggcaggtcctgtgtcagcctcaaggcttgctcgagtgatggccaaaccacagctgtttggtcccggaacacacccccattgctgggccttgctgtagctggtcctggttggtcagagggacattggcctgtat

SEQ ID NO: 101 - DNA, 598 bp, Homo sapiens
  source 1..598: mol_type = unassigned DNA
ggaaacctgggcaccaaggcttgtcccactctaggggactggggaaacagggattttgccagcacctcctggcagggcaaccatcaggtcaaagggacctgacccatgaccccttcctcagatcattgtgggtgtgattctcctctactacatactcggagtcagtgccttaattggagcagctgtcatcattctactggctcctgtccagtacttcgtggccaccaagctgtctcaggcccagcggagcacactggagtattccaatgagcggctgaagcagaccaacgagatgctccgcggcatcaagctgctgaagctgtacgcctgggagaacatcttccgcacgcgggtggagacgacccgcaggaaggagatgaccagcctcagggcctttgccatctatacctccatctccattttcatgaacacggccatccccattgcagctgtcctcataactttcgtgggccacgtcagcttcttcaaagaggccgacttctcgccctccgtggcctttgcctccctctccctcttccatatcttggtcacaccgctgttcctgctgtccagtgtggtccgatctaccgtcaaagct

SEQ ID NO: 102 - DNA, 4923 bp, Homo sapiens
  source 1..4923: mol_type = unassigned DNA
agaggcgcggcaggcgcgcggagccagcggagccagctgagcccgagcccagcccgcgcccgcgccgccatgcccctggccttctgcggcagcgagaaccactcggccgcctaccgggtggaccagggggtcctcaacaacggctgctttgtggacgcgctcaacgtggtgccgcacgtcttcctactcttcatcaccttccccatcctcttcattggatggggaagtcagagctccaaggtgcacatccaccacagcacatggcttcatttccctgggcacaacctgcggtggatcctgaccttcatgctgctcttcgtcctggtgtgtgagattgcagagggcatcctgtctgatggggtgaccgaatcccaccatctgcacctgtacatgccagccgggatggcgttcatggctgctgtcacctccgtggtctactatcacaacatcgagacttccaacttccccaagctgctaattgccctgctggtgtattggaccctggccttcatcaccaagaccatcaagtttgtcaagttcttggaccacgccatcggcttctcgcagctacgcttctgcctcacagggctgctggtgatcctctatgggatgctgctcctcgtggaggtcaatgtcatcagggtgaggagatacatcttcttcaagacaccgagggaggtgaagcctcccgaggacctgcaagacctgggggtacgcttcctgcagcccttcgtgaatctgctgtccaaaggcacctactggtggatgaacgccttcatcaagactgcccacaagaagcccatcgacttgcgagccatcgggaagctgcccatcgccatgagggccctcaccaactaccaacggctctgcgaggcctttgacgcccaggtgcggaaggacattcagggcactcaaggtgcccgggccatctggcaggcactcagccatgccttcgggaggcgcctggtcctcagcagcactttccgcatcttggccgacctgctgggcttcgccgggccactgtgcatctttgggatcgtggaccaccttgggaaggagaacgacgtcttccagcccaagacacaatttctcggggtttactttgtctcatcccaagagttccttgccaatgcctacgtcttagctgtgcttctgttccttgccctcctactgcaaaggacatttctgcaagcatcctactatgtggccattgaaactggaattaacttgagaggagcaatacagaccaagatttacaataaaattatgcacctgtccacctccaacctgtccatgggagaaatgactgctggacagatctgtaatctggttgccatcgacaccaatcagctcatgtggtttttcttcttgtgcccaaacctctgggctatgccagtacagatcattgtgggtgtgattctcctctactacatactcggagtcagtgccttaattggagcagctgtcatcattctactggctcctgtccagtacttcgtggccaccaagctgtctcaggcccagcggagcacactggagtattccaatgagcggctgaagcagaccaacgagatgctccgcggcatcaagctgctgaagctgtacgcctgggagaacatcttccgcacgcgggtggagacgacccgcaggaaggagatgaccagcctcagggcctttgccatctatacctccatctccattttcatgaacacggccatccccattgcagctgtcctcataactttcgtgggccacgtcagcttcttcaaagaggccgacttctcgccctccgtggcctttgcctccctctccctcttccatatcttggtcacaccgctgttcctgctgtccagtgtggtccgatctaccgtcaaagctctagtgagcgtgcaaaagctaagcgagttcctgtccagtgcagagatccgtgaggagcagtgtgccccccatgagcccacacctcagggcccagccagcaagtaccaggcggtgcccctcagggttgtgaaccgcaagcgtccagcccgggaggattgtcggggcctcaccggcccactgcagagcctggtccccagtgcagatggcgatgctgacaactgctgtgtccagatcatgggaggctacttcacgtggaccccagatggaatccccacactgtccaacatcaccattcgtatcccccgaggccagctgactatgatcgtggggcaggtgggctgcggcaagtcctcgctccttctagccgcactgggggagatgcagaaggtctcaggggctgtcttctggagcagcagccttcctgacagcgagataggagaggaccccagcccagagcgggagacagcgaccgacttggatatcaggaagagaggccccgtggcctatgcttcgcagaaaccatggctgctaaatgccactgtggaggagaacatcatctttgagagtcccttcaacaaacaacggtacaagatggtcattgaagcctgctctctgcagccagacatcgacatcctgccccatggagaccagacccagattggggaacggggcatcaacctgtctggtggtcaacgccagcgaatcagtgtggcccgagccctctaccagcacgccaacgttgtcttcttggatgaccccttctcagctctggatatccatctgagtgaccacttaatgcaggccggcatccttgagctgctccgggacgacaagaggacagtggtcttagtgacccacaagctacagtacctgccccatgcagactggatcattgccatgaaggatggcaccatccagagggagggtaccctcaaggacttccagaggtctgaatgccagctctttgagcactggaagaccctcatgaaccgacaggaccaagagctggagaaggagactgtcacagagagaaaagccacagagccaccccagggcctatctcgtgccatgtcctcgagggatggccttctgcaggatgaggaagaggaggaagaggaggcagctgagagcgaggaggatgacaacctgtcgtccatgctgcaccagcgtgctgagatcccatggcgagcctgcgccaagtacctgtcctccgccggcatcctgctcctgtcgttgctggtcttctcacagctgctcaagcacatggtcctggtggccatcgactactggctggccaagtggaccgacagcgccctgaccctgacccctgcagccaggaactgctccctcagccaggagtgcaccctcgaccagactgtctatgccatggtgttcacggtgctctgcagcctgggcattgtgctgtgcctcgtcacgtctgtcactgtggagtggacagggctgaaggtggccaagagactgcaccgcagcctgctaaaccggatcatcctagcccccatgaggttttttgagaccacgccccttgggagcatcctgaacagattttcatctgactgtaacaccatcgaccagcacatcccatccacgctggagtgcctgagccgctccaccctgctctgtgtctcagccctggccgtcatctcctatgtcacacctgtgttcctcgtggccctcttgcccctggccatcgtgtgctacttcatccagaagtacttccgggtggcgtccagggacctgcagcagctggatgacaccacccagcttccacttctctcacactttgccgaaaccgtagaaggactcaccaccatccgggccttcaggtatgaggcccggttccagcagaagcttctcgaatacacagactccaacaacattgcttccctcttcctcacagctgccaacagatggctggaagtccgaatggagtacatcggtgcatgtgtggtgctcatcgcagcggtgacctccatctccaactccctgcacagggagctctctgctggcctggtgggcctgggccttacctacgccctaatggtctccaactacctcaactggatggtgaggaacctggcagacatggagctccagctgggggctgtgaagcgcatccatgggctcctgaaaaccgaggcagagagctacgaggggctcctggcaccatcgctgatcccaaagaactggccagaccaagggaagatccagatccagaacctgagcgtgcgctacgacagctccctgaagccggtgctgaagcacgtcaatgccctcatcgcccctggacagaagatcgggatctgcggccgcaccggcagtgggaagtcctccttctctcttgccttcttccgcatggtggacacgttcgaagggcacatcatcattgatggcattgacatcgccaaactgccgctgcacaccctgcgctcacgcctctccatcatcctgcaggaccccgtcctcttcagcggcaccatccgatttaacctggaccctgagaggaagtgctcagatagcacactgtgggaggccctggaaatcgcccagctgaagctggtggtgaaggcactgccaggaggcctcgatgccatcatcacagaaggcggggagaatttcagccagggacagaggcagctgttctgcctggcccgggccttcgtgaggaagaccagcatcttcatcatggacgaggccacggcttccattgacatggccacggaaaacatcctccaaaaggtggtgatgacagccttcgcagaccgcactgtggtcaccatcgcgcatcgagtgcacaccatcctgagtgcagacctggtgatcgtcctgaagcggggtgccatccttgagttcgataagccagagaagctgctcagccggaaggacagcgtcttcgcctccttcgtccgtgcagacaagtgacctgccagagcccaagtgccatcccacattcggaccctgcccatacccctgcctgggttttctaactgtaaatcacttgtaaataaatagatttgattatttcct

SEQ ID NO: 103 - DNA, 183 bp, Homo sapiens
  source 1..183: mol_type = unassigned DNA
ccatgcccctggccttctgcggcagcgagaaccactcggccgcctaccgggtggaccagggggtcctcaacaacggctgctttgtggacgcgctcaacgtggtgccgcacgtcttcctactcttcatcaccttccccatcctcttcattgggtgaccgaatcccaccatctgcacctgtacat

SEQ ID NO: 104 - DNA, 4276 bp, Homo sapiens
  source 1..4276: mol_type = unassigned DNA
gaaaaaaggaacccaaggagataggagagctgttaatttcactcgggacatttcctcgaggctagtttactcggaaagcctcaatgttccctggtagctgcaggatctactttgggggctgccaagtttcctctctcattctttctcctgccccaagagcaggcaggaaggaaagttcctggactgatactcgtctgtttagtaggcgtgggtcctggttgaagtctgtctaggaaaactcctaagtgtagaaatcttcttcgtattaccactgtctctgcactgagatttgggctgctttgcttccagcgtcacacatcataactgagaaagataaaaactctccagatgtcttccagtaatgtcgaagtttttatcccagtgtcacaaggaaacaccaatggcttccccgcgacagcttccaatgacctgaaggcatttactgaaggagctgtgttaagttttcataacatctgctatcgagtaaaactgaagagtggctttctaccttgtcgaaaaccagttgagaaagaaatattatcgaatatcaatgggatcatgaaacctggtctcaacgccatcctgggacccacaggtggaggcaaatcttcgttattagatgtcttagctgcaaggaaagatccaagtggattatctggagatgttctgataaatggagcaccgcgacctgccaatttcaaatgtaattcaggttacgtggtacaagatgatgttgtgatgggcactctgacggtgagagaaaacttacagttctcagcagctcttcggcttgcaacaactatgacgaatcatgaaaaaaacgaacggattaacagggtcattcaagagttaggtctggataaagtggcagactccaaggttggaactcagtttatccgtggtgtgtctggaggagaaagaaaaaggactagtataggaatggagcttatcactgatccttccatcttgttcttggatgagcctacaactggcttagactcaagcacagcaaatgctgtccttttgctcctgaaaaggatgtctaagcagggacgaacaatcatcttctccattcatcagcctcgatattccatcttcaagttgtttgatagcctcaccttattggcctcaggaagacttatgttccacgggcctgctcaggaggccttgggatactttgaatcagctggttatcactgtgaggcctataataaccctgcagacttcttcttggacatcattaatggagattccactgctgtggcattaaacagagaagaagactttaaagccacagagatcatagagccttccaagcaggataagccactcatagaaaaattagcggagatttatgtcaactcctccttctacaaagagacaaaagctgaattacatcaactttccgggggtgagaagaagaagaagatcacagtcttcaaggagatcagctacaccacctccttctgtcatcaactcagatgggtttccaagcgttcattcaaaaacttgctgggtaatccccaggcctctatagctcagatcattgtcacagtcgtactgggactggttataggtgccatttactttgggctaaaaaatgattctactggaatccagaacagagctggggttctcttcttcctgacgaccaaccagtgtttcagcagtgtttcagccgtggaactctttgtggtagagaagaagctcttcatacatgaatacatcagcggatactacagagtgtcatcttatttccttggaaaactgttatctgatttattacccatgaggatgttaccaagtattatatttacctgtatagtgtacttcatgttaggattgaagccaaaggcagatgccttcttcgttatgatgtttacccttatgatggtggcttattcagccagttccatggcactggccatagcagcaggtcagagtgtggtttctgtagcaacacttctcatgaccatctgttttgtgtttatgatggtctgttggtcaatctcacaaccattgcatcttggctgtcatggcttcagtacttcagcattccacgatatggatttacggctttgcagcataatgaatttttgggacaaaacttctgcccaggactcaatgcaacaggaaacaatccttgtaactatgcaacatgtactggcgaagaatatttggtaaagcagggcatcgatctctcaccctggggcttgtggaagaatcacgtggccttggcttgtatgattgttattttcctcacaattgcctacctgaaattgttatttcttaaaaaatattcttaaatttccccttaattcagtatgatttatcctcacataaaaaagaagcactttgattgaagtattcaatcaagtttttttgttgttttctgttcccttgccatcacactgttgcacagcagcaattgttttaaagagatacatttttagaaatcacaacaaactgaattaaacatgaaagaacccaagacatcatgtatcgcatattagttaatctcctcagacagtaaccatggggaagaaatctggtctaatttattaatctaaaaaaggagaattgaattctggaaactcctgacaagttattactgtctctggcatttgtttcctcatctttaaaatgaataggtaggttagtagcccttcagtcttaatactttatgatgctatggtttgccattatttaataaatgacaaatgtattaatgctatactggaaatgtaaaattgaaaatatgttggaaaaaagattctgtcttatagggtaaaaaaagccaccgtgatagaaaaaaaatctttttgataagcacattaaagttaatagaacttactgatattcctgtctagtggtataatatctcaggaatcttggctgagggtttggaactgtgggtagagtagagggccaggagtccagtaatagaattcttgcaccatttctggaacattctagctctgggaggtcacgtaaccttcttggggtagttcagtggtttagtggtttataatccaggtgtgcgtcagaatcatctgaggaactttgctaaaatacaaaaatctggcctaagtagctccagatctaccttcataaaggaatctgaccactcctggatttggtaatttccaagttctgaaaattttacttaggatttaataactattaacatctgtccctacataggttttctttcctacttatataccttatgttctcttcattctaaccttcatcagtaatagggaaatgttttaattttatttttttagttgaagggtaatgtaccaaaaaatatagttcagtgaattaaaatgaacacacatgtgcaaccatcaattcaggtcaagaaatagaagattgtagcacacaaaagcctactcagccattctcccagtcactacttccttccttacccctgggttatttttgaaatgacacttgatgtatttccctctgttgctgttatgagaacattgctacagccaagtgttgtgtttctgtgtgcataggttgatacttaattatctccccactttttaataaacttttaatttggaaataattttagattgacagaaaagttgcaaagatagtgaggaaagttcctgtctactctttgctcagcttcccttaatgttaacattttatatagcaagatgcatttgtcaaagctaacaagttaacattggtacaatcactgttaattaaactgcacacaatattcagatttcaccacttttccactaatattctttcattgttctaggattcaattcaggagaccacatttcatctagccctcttttttaaaagtaaatacttttcagcacttacaggagttaactgagctggggcatcatggtgtatagacgccctgacactggtcatcttggaattcatttagtttgtcagtgggtgccctgacattctgtcacaacatcaatttgggaacatggcattatatttttatctttgaacttttttctttttggatgacatttgattaatgcgtcatcttggaacacattatcttttttcttggttatgtgatcaggaagattaatcagtttttcctgttcttggtataattcctgcttttcacatacctgtcccttacagttctctatatatacccttcccttattacacagagagaaatatctatctatactttttacacaaaatatacttcaaaagaaacaaaacagccacaattattaactttttaaataaatgagaatttaattatatccta

SEQ ID NO: 105 - DNA, 4479 bp, Homo sapiens
  source 1..4479: mol_type = unassigned DNA
actgcgttcagctctggcggtccacagcccgaagcgcggcttaggaagttcgtgtcagcgctgcctgagctcgtcccctggatgtccgggtctccccaggcggccacccgccggctcccatcgtgacctccagccgcagcgcctcccacgccggccgccgcgcgaggggagcgctcgggcgcgccgggtgtggttgggggaaggggttgtgccgcgcgcgggctgcgtgctgtgcccactcaaaaggttccgggcgcgcaggagggaagaggcagtgcccgccactcccactgagattgagagacgcggcaaggaggcagcctgtggaggaactgggtaggatttaggaacgcaccgtgcacatgcttggtggtcttgttaagtggaaactgctgctttagagtttgtttggaaggtccgggtgactcatcccaacatttacatccttaattgttaaagcgctgcctccgagcgcacgcatcctgagatcctgagcctttggttaagaccgagctctattaagctgaaaagataaaaactctccagatgtcttccagtaatgtcgaagtttttatcccagtgtcacaaggaaacaccaatggcttccccgcgacagcttccaatgacctgaaggcatttactgaaggagctgtgttaagttttcataacatctgctatcgagtaaaactgaagagtggctttctaccttgtcgaaaaccagttgagaaagaaatattatcgaatatcaatgggatcatgaaacctggtctcaacgccatcctgggacccacaggtggaggcaaatcttcgttattagatgtcttagctgcaaggaaagatccaagtggattatctggagatgttctgataaatggagcaccgcgacctgccaatttcaaatgtaattcaggttacgtggtacaagatgatgttgtgatgggcactctgacggtgagagaaaacttacagttctcagcagctcttcggcttgcaacaactatgacgaatcatgaaaaaaacgaacggattaacagggtcattcaagagttaggtctggataaagtggcagactccaaggttggaactcagtttatccgtggtgtgtctggaggagaaagaaaaaggactagtataggaatggagcttatcactgatccttccatcttgttcttggatgagcctacaactggcttagactcaagcacagcaaatgctgtccttttgctcctgaaaaggatgtctaagcagggacgaacaatcatcttctccattcatcagcctcgatattccatcttcaagttgtttgatagcctcaccttattggcctcaggaagacttatgttccacgggcctgctcaggaggccttgggatactttgaatcagctggttatcactgtgaggcctataataaccctgcagacttcttcttggacatcattaatggagattccactgctgtggcattaaacagagaagaagactttaaagccacagagatcatagagccttccaagcaggataagccactcatagaaaaattagcggagatttatgtcaactcctccttctacaaagagacaaaagctgaattacatcaactttccgggggtgagaagaagaagaagatcacagtcttcaaggagatcagctacaccacctccttctgtcatcaactcagatgggtttccaagcgttcattcaaaaacttgctgggtaatccccaggcctctatagctcagatcattgtcacagtcgtactgggactggttataggtgccatttactttgggctaaaaaatgattctactggaatccagaacagagctggggttctcttcttcctgacgaccaaccagtgtttcagcagtgtttcagccgtggaactctttgtggtagagaagaagctcttcatacatgaatacatcagcggatactacagagtgtcatcttatttccttggaaaactgttatctgatttattacccatgaggatgttaccaagtattatatttacctgtatagtgtacttcatgttaggattgaagccaaaggcagatgccttcttcgttatgatgtttacccttatgatggtggcttattcagccagttccatggcactggccatagcagcaggtcagagtgtggtttctgtagcaacacttctcatgaccatctgttttgtgtttatgatgattttttcaggtctgttggtcaatctcacaaccattgcatcttggctgtcatggcttcagtacttcagcattccacgatatggatttacggctttgcagcataatgaatttttgggacaaaacttctgcccaggactcaatgcaacaggaaacaatccttgtaactatgcaacatgtactggcgaagaatatttggtaaagcagggcatcgatctctcaccctggggcttgtggaagaatcacgtggccttggcttgtatgattgttattttcctcacaattgcctacctgaaattgttatttcttaaaaaatattcttaaatttccccttaattcagtatgatttatcctcacataaaaaagaagcactttgattgaagtattcaatcaagtttttttgttgttttctgttcccttgccatcacactgttgcacagcagcaattgttttaaagagatacatttttagaaatcacaacaaactgaattaaacatgaaagaacccaagacatcatgtatcgcatattagttaatctcctcagacagtaaccatggggaagaaatctggtctaatttattaatctaaaaaaggagaattgaattctggaaactcctgacaagttattactgtctctggcatttgtttcctcatctttaaaatgaataggtaggttagtagcccttcagtcttaatactttatgatgctatggtttgccattatttaataaatgacaaatgtattaatgctatactggaaatgtaaaattgaaaatatgttggaaaaaagattctgtcttatagggtaaaaaaagccaccgtgatagaaaaaaaatctttttgataagcacattaaagttaatagaacttactgatattcctgtctagtggtataatatctcaggaatcttggctgagggtttggaactgtgggtagagtagagggccaggagtccagtaatagaattcttgcaccatttctggaacattctagctctgggaggtcacgtaaccttcttggggtagttcagtggtttagtggtttataatccaggtgtgcgtcagaatcatctgaggaactttgctaaaatacaaaaatctggcctaagtagctccagatctaccttcataaaggaatctgaccactcctggatttggtaatttccaagttctgaaaattttacttaggatttaataactattaacatctgtccctacataggttttctttcctacttatataccttatgttctcttcattctaaccttcatcagtaatagggaaatgttttaattttatttttttagttgaagggtaatgtaccaaaaaatatagttcagtgaattaaaatgaacacacatgtgcaaccatcaattcaggtcaagaaatagaagattgtagcacacaaaagcctactcagccattctcccagtcactacttccttccttacccctgggttatttttgaaatgacacttgatgtatttccctctgttgctgttatgagaacattgctacagccaagtgttgtgtttctgtgtgcataggttgatacttaattatctccccactttttaataaacttttaatttggaaataattttagattgacagaaaagttgcaaagatagtgaggaaagttcctgtctactctttgctcagcttcccttaatgttaacattttatatagcaagatgcatttgtcaaagctaacaagttaacattggtacaatcactgttaattaaactgcacacaatattcagatttcaccacttttccactaatattctttcattgttctaggattcaattcaggagaccacatttcatctagccctcttttttaaaagtaaatacttttcagcacttacaggagttaactgagctggggcatcatggtgtatagacgccctgacactggtcatcttggaattcatttagtttgtcagtgggtgccctgacattctgtcacaacatcaatttgggaacatggcattatatttttatctttgaacttttttctttttggatgacatttgattaatgcgtcatcttggaacacattatcttttttcttggttatgtgatcaggaagattaatcagtttttcctgttcttggtataattcctgcttttcacatacctgtcccttacagttctctatatatacccttcccttattacacagagagaaatatctatctatactttttacacaaaatatacttcaaaagaaacaaaacagccacaattattaactttttaaataaatgagaatttaattata

SEQ ID NO: 106 - DNA, 451 bp, Homo sapiens
  source 1..451: mol_type = unassigned DNA
aaaaggttccgggcgcgcaggagggaagaggcagtgcccgccactcccactgagattgagagacgcggcaaggaggcagcctgtggaggaactggaaagataaaaactctccagatgtcttccagtaatgtcgaagtttttatcccagtgtcacaaggaaacaccaatggcttccccgcgacagcttccaatgacctgaaggcatttactgaaggagctgtgttaagttttcataacatctgctatcgagtaaaactgaagagtggctttctaccttgtcgaaaaccagttgagaaagaaatattatcgaatatcaatgggatcatgaaacctggtctcaacgccatcctgggacccacaggtggaggcaaatcttcgttattagatgtcttagctgcaaggaaagatccaagtggattatctggagatgttctgataaatggagcaccgc

SEQ ID NO: 107 - DNA, 391 bp, Homo sapiens
  source 1..391: mol_type = unassigned DNA
agtgacggcgaccaaacccagctaggtcagacgagaaagataaaaactctccagatgtcttccagtaatgtcgaagtttttatcccagtgtcacaaggaaacaccaatggcttccccgcgacagcttccaatgacctgaaggcatttactgaaggagctgtgttaagttttcataacatctgctatcgagtaaaactgaagagtggctttctaccttgtcgaaaaccagttgagaaagaaatattatcgaatatcaatgggatcatgaaacctggtctcaacgccatcctgggacccacaggtggaggcaaatcttcgttattagatgtcttagctgcaaggaaagatccaagtggattatctggagatgttctgataaatggagcaccgc

SEQ ID NO: 108 - DNA, 558 bp, Homo sapiens
  source 1..558: mol_type = unassigned DNA
aaagcagtttcaggctcatagaattttagaaatgggcctagtttcccagccggatgagcttttaggtttgtttgaataagagatctgacctgaccggcccaactgtacaactcttcaaggaaaattcgtatttgcagtgggaagaataagtaacattgatcaagatgaatgccatgctggagactcccgaactcccagccgtgtttgatggagtgaagctggctgcagtggctgctgtgctgtacgtgatcgtccggtgtttgaacctgaagagccccacagccccacctgacctctacttccaggactcggggctctcacgctttctgctcaagtcctgtcctcttctgaccaaagaatacattccaccgttgatctgggggaaaagtggacacatccagacagccttgtatgggaagatgggaagggtgaggtcgccacatccttatgggcaccggaagttcatcactatgtctgatggagccacttctacattcgacctcttcgagcccttggctgagcactgtgttggagatgatatcaccatggtcatctgcc

SEQ ID NO: 109 - DNA, 8735 bp, Homo sapiens
  source 1..8735: mol_type = unassigned DNA
agccctcctcccctttccccgcccactccgggctggccttatccagtagcgtctgggtccctggactaaagccgtcaaatgtaaccaattgctgaggagctctcccctaagaatcccgcctccactctgaggaacagcttcgctgatcaatggatcccctcctagacgcaatgagcgcgcggggcaagtggagaagcggctgaactgcccaatgaacaagcggtttccgtggttaggggcgtggcagaagcggtcgtcaggggcgtggcggcagttacttgggcggggccggtagcggcgggagctgcactggccaggggttccggctgtatatccatgagcgccgctggcagccggggagctgcaggaaccagactgggggcgagctgagcacctgtagtcaatcacacgcagcttttaggtttgtttgaataagagatctgacctgaccggcccaactgtacaactcttcaaggaaaattcgtatttgcagtgggaagaataagtaacattgatcaagatgaatgccatgctggagactcccgaactcccagccgtgtttgatggagtgaagctggctgcagtggctgctgtgctgtacgtgatcgtccggtgtttgaacctgaagagccccacagccccacctgacctctacttccaggactcggggctctcacgctttctgctcaagtcctgtcctcttctgaccaaagaatacattccaccgttgatctgggggaaaagtggacacatccagacagccttgtatgggaagatgggaagggtgaggtcgccacatccttatgggcaccggaagttcatcactatgtctgatggagccacttctacattcgacctcttcgagcccttggctgagcactgtgttggagatgatatcaccatggtcatctgccctggaattgccaatcacagcgagaagcaatacatccgcactttcgttgactacgcccagaaaaatggctatcggtgcgccgtgctgaaccacctgggtgccctgcccaacattgaattgacctcgccacgcatgttcacctatggctgcacgtgggaatttggagccatggtgaactacatcaagaagacatatcccctgacccagctggtcgtcgtgggcttcagcctgggtggtaacattgtgtgcaaatacttgggggagactcaggcaaaccaagagaaggtcctgtgctgcgtcagcgtgtgccaggggtacagtgcactgagggcccaggaaaccttcatgcaatgggatcagtgccggcggttctacaacttcctcatggctgacaacatgaagaagatcatcctctcgcacaggcaagctctttttggagaccatgttaagaaaccccagagcctggaagacacggacttgagccggctctacacagcaacatccctgatgcagattgatgacaatgtgatgaggaagtttcacggctataactccctgaaggaatactatgaggaagaaagttgcatgcggtacctgcacaggatttatgttcctctcatgctggttaatgcagctgacgatccgttggtgcatgaaagtcttctaaccattccaaaatctctttcagagaaacgagagaacgtcatgtttgtgctgcctctgcatgggggccacttgggcttctttgagggctctgtgctgttccccgagcccctgacatggatggataagctggtggtggagtacgccaacgccatttgccaatgggagcgtaacaagttgcagtgctctgacacggagcaggtggaggccgacctggagtgaggcctccggactctggcacgctccagcagccctcctctggaagctgcgtcccctcaccccctgtttcaggtctcccatctccctcagtgacctggatctgacctcacaccatcagcagggggcacccaccatgcacacctgtctcggagtaggcagctcttcctgggagctccaggctatttttgtgcttagttactggttttctccattgcattgttaggcatggtgacaagtgacagagttcttgccctctgtccagtttcagcatctggttgcttttaagccaagtacatctagtttccctattaaaaatgtgtctgaatagcgattttgctttgccaccaaaaggcttttccctgagaacagtgaaggatgtatgtcattttgtggtggttgtatgtgtccttacatagaccttaaaaagagctcacccttccaggccaatgctgaagacacagctccgcttgggagcctgagaacccaggcttcccaggccagagtgtggcttcttaaacggcaaaggaaattcctttgagtcacaagccaagttttcgccctgtctcctgagaccatttccctacgctttgctgctgctgagagttacgtgaggcacttgttaaaaattcagcctcccaggtccctcccctcggagaggctgattcactgggtctgggaaggagcctggggattttaatttttcacaagtgccccagatgattctcatcaccaagcaaattttggaaatgctgttcaacagcgcccttaaattggaaacatctttgcagctcgttttattgaaattcataatcaggggtgtcctctagctcccacggtctccagagcagcaaggccggctatggagctgccgtcgtgtgaccacagtgtgatgtctcagaagggctctgggtgggctgagcatctgggctgtgccctggctctgcttttcaccctggacaaagtcgctgtggacttcaatttcttcacctctaaaatgggggacttggaccaggtagattgctgagctcactaccaggttcaaagttcaatgacaaactcagtttactgaggtttgagagaacatccctccaggggagcctgggagctgctctcccagtctaagcatgtagatatcatcgtttgccttttgtgtgtgtgtgtcccttatttgataaaaagatgttttgagttgttttttttttaagcactcacttgtaattttagtttttaaacccaagtccctctaactttgcctttgataccaaacaattcaaaagttggatctgagtttggagaaagatatttccaacctaagtgggtattattttgaaaccagatttttaatttaatagcctatatttgtagtctgttggataggtgtttccaaagtgtgtcttctcaagtgaaaacgcaactctaggtttcaagtactccttttctccgatcctgtggtacttgaatatccaaaaaccctgcactttgaacaatcagctgttgctatctggaactaaacagaactatgagtaaaattgcctggatactttaaaaagatatttttcctccttcatctcctttgactccaggacagactggaatataagtagtgggtctgcatggatgtttcagggatcaaaggagccacctgggcgcctgagtgccaaccctcagggccacaggtgggtgtggtttgggcacgggtccaagtgactgtgacgggacccgtgggcatgggtccaggtctgtaacctgaagaagttgttttctgacaatcaccaaatcatccgaatgacatcaaaagcagcccttatctcagagactgagatttctgtggtctcaacttcgctttggtataatttctggcactcaccagcctctatcattatgactttccccccagtgtattatttctctaataggtttccttttcacgttcttttagcacagactggcactttaccctctcagtttggaagttagcccctctcctctgttacttttcccttcacccaactacagctgtgatctagaacattcatagtcatatttctgctactactaccttcatttatcaagactttttatgagaataggtaaaccaagcaataacttcctaggactgaatcaccaccccagaagagcgagaggctcctttcatatgcctgaggccacaccccttaacctgttctgacaaaatagtggctggcccatgtaccagctccattcagaaattcaggaagagaaaagacagccctgttgtcacacaaaccggtgtgggggagggtggagcctggtctgcacggcagtcctggtggcccctgtggaggacaggcagggctggcagcatagcctttgttgccacacaaccggaatttgctcccccaggactgtgggagccagtgtcccagctgaaatctttttagtgtgtggctctgaatggcactcacattccattttggctcacatgaaactaactgaagccctttgttcaagcttcaggctcttaggcatggaaatgagaatgtgactgtggctgtcttacaggaaaattcttgtttgtccctgaatgagagcacagaggcattgaattcacagagctgcaaacttgcctgataaatgagggagtggcagtttatagataggtcatcttttttccttcctccaggtgtccttgcctttcttcccaaagtcattcatttctgatgagtatatgaatccccctcttgctagtaaggttctatttgggctaaaacaaggctgaatttttaaagagtatttgaatatattttagaatcaaattgaggctataaattgcatcaatctggacaattccattgcaggaataatatgttaaaaaccaatggggagaagcacccacatctctcctgtagcactccgtgtctcataagcaatttgaagacacttacaagtaactgattccagtcaaattaggattaactgactcaaaaaatggtgtcaagtttctttaatgtttttatgttagaagtgagtttaacagacttgaagaaaactgttatcttttcctgctgtgagtttacacaaatgattccagagcagaatgaaagcagaaagctgttggttacaatattcttttaacctctctgcagcattttacacttactgggaaccttatgattcaccgtaagagtggaaatatacctgagttcgtgtcctaatggtctctaattcacattggatcgtgggcaaatcacctcacctctctgagcctgttccctcctcttagaccatctctaagaccacttcatctatttacacatcatttgcttgaacattgctgaacatctgcgtgaacttggcctctccagcccttgcaggtggaaacagctgtgtcaaggctcaaggctcacgctgaggggacttggagggagggggcttctgcattaagctttcctggtgaagacccttgatcttgtccaaagccctgtgtctttgactggcttctcttcagagtccccgttgtcatcgtaagacccttgctgtttggagggtggtcttgtgactgtggcagctgctggccgctggaatgaggagcctatctccatcctccagtgtgactcaggcagagcattgagaattcccagggcagaaatccttcctgctcaggctttcattctaaaactacagtcttcattaaagctgaactttctgggtagctgagcttatatgcccggcatctgaatgagagctctctttgtaactgtgtgacttgagatctagtttgccagctcctgggaaacaatacatgtgttcttgtttgtgtttgctcagcaagcagatgtctgagatgtaagaagcttttcttttcctgtggcattgattctgacttagagctgaagtaaaagatcactgaaacatcacgtcaagttgaagtcactcataggtctttgtcctttaggcaggacaggagagtcattaagaagcatttcactgtagcattctatcacaatatcatctggaattgttttctttgcccagaaagccttaacttgcctctagagaatccctggtattacaacgatattgcggcattagaattccaactcttctgctgtggaagtttgaagcgaagctgcagcaaaaccagagaatttcctcaagtggcctgtaggctccttgttatcttatgcccccacccctccctcaacaatatgagtgatccagaactggcccaaacacctcagctctggtccctttttgcccttcttggccttactctgttgttcaaagccactttggattgcttggatgcttcgaacagccatgaaaagtagcctgcctgtggcatttagaggccaagcaattgacagaaagggtttcttctacctctgttatctaagcagagggaagtaaacctctcaccgccccccacccctcactgcccccgattaccctagaattgctttcgccaaattgtagttgaagctaaggaaggggaatctggcccctgctgggagagggaactggaatgccacacaaggcaaggcctgcttccttccttcccctctgctgctgctgcctcggaacgctgcagcccaggcttcctcccacagtggcccttggaagcaggccgcagagtagacagctgctccttttggaagagtcagtcccctgtgttttctgaactgtttttcctagcatgtatgtgggtagagctttcatgcatctctagtaataataagctgaaattagttttttttttaattctccaatttaaaacttttaattaaaaagtaaattttaatgtcgaaaatgcaaacttggggagggcagaaagatcacacacaaggctgtcacttcatacttgcaggattgcacagcagccgggcagaggcgctcctcacttcccagatggggcggcgggcagcagagacgcacctcacttcctagacagtgcggcagccaggcacaggcacacctcacttcccagacagttgggcggccaggcaagcgctcctcacttcccagatggggcggctcccgggaagcggggctcctcacttcccagacagggtggccaggcagaggtgctcctcacttcccagaacaattctttatgaatttgataaaggactgaagtgcaactgaaagctgctagtgatgatctggtaatatacaatttgtccagtagccagtttgtttttattgtgttttctaaccataagagatcattaaaggcaaagcctgtatgacgctgtacacacacaaaaaaatggtcaccgcaggccatactaccaatgaaatggtaggtaaacaaatcttctggtcaagagaaaaaaaaaagaaatagcactctgcatgctttgctctacaagacgaatttccctagaaagaatccaatgaaggccgggcatagtggctcactcctgtaatcccagcactttggaggccgaggcgggtagatcacctgaggttaggagttcaagaccagcctggccaacatggtgaaaccccttctctactaaaaatgcaaaaattagctgggtgtggtggcgggcgcctgtaatcccagctactcgggaggctgaggtgggagaattgcttgaacccaggagacggaggttgcagtgagccgagatcacgcctctgcactccagcctgggcaacaagagtgagactccgtctccaaaaaaagaaaaggaatccagtgaaaatggctgcaattacaacaagaagtgaaggaagaagactggtgacatctctgaaggatgcagttgaggttgatccaggtttatccgaatatgctacctttctgagccttaaaccttcatctctcaggtgttgatttgcttctgatagcttcatcatttctccctgaagtcttttacactcttctgttagtttccttgtttcagtatcatgaagtgaagcactgtgtggttgtggcgtgggcccgtcttgcttagatgcattcagtgggacagctttgctgggttccatgtcattcaatttatcattttcattggggatctccatttggaatccattaattcatgaggttttgcctcattccacacagcttccatatctgaagtgtttagtggagcaaaaattgtaccataaacttgtgtttactcttttcattcggatcatagtcaaagggctgtagcattactgaaacagtcacagttgaccctgggtcaataattccactgttgggcctcacacagtaccggtgaggcacggtagtcttcactttgaaacacacttttctatccgatggatttcgcaatttaagatttgtagtgactacatctgtgaaggggcctttgaatttgaggtctatgggcgggtcgaggaccaggatctgctcgtgcttcgccgtggccccggaggcagacgccattggagagacagcgcagagcagggggcggcttgctcgctgggggcgggggacgatggcgagaggggagggggagcgagttcgcatctctccttttcctggttagactctgttcaaccacattcttatgttggcagatctgcttccagattgatttttagagcaccatcactttcacattcctgattctgattttgttttgttttgtttgggttttctgaaacttaaaatgctgccccgaaaatactatatttttgagtttgtgttctgaaagcctccgtgctgctggatctttggggggaaatacaggatccttcagcactgaggtgtttaagatttgcaactagcaatgcaattttttctaaatatggggatatttacctttattaagaaattatactaaacattgatgtccttgatcattttatgttctcatattacttttgattctactatgattgtgtggtggtgaacaaagatcattacaaacaaaaactgtaattttgttatatttgattcaatggaatttacctaaaaaataaagactaaaaatgtggtgtg

SEQ ID NO: 110 - DNA, 542 bp, Homo sapiens
  source 1..542: mol_type = unassigned DNA
agttacttgggcggggccggtagcggcgggagctgcactggccaggggttccggctgtatatccatgagcgccgctggcagccggggagctgcaggaaccagactgggggcgagctgagcacctgtagtcaatcacacgcaggttctgtcctcttcatttgcaagccactgctttatccacgagggtgctccctacttatgccagtgaattaatttttggcacagatgaatccttcatatttatctggatttagctggtagcatttgtctcctaagacttggtcacagaggaatccatgtgaccttcaggccttctgctctaaactggcaggagatcctgtttctactcacagcgtccgagggtctggtggccgagccctgaggggcgctgttgctcccaggtggcagaattcagcatcagagagccacacagctgaaagagatggatggcttttaggtttgtttgaataagagatctgacctgaccggcccaactgtacaactcttcaaggaaaattcgtatttgcagtgggaagaataag

SEQ ID NO: 111 - DNA, 557 bp, Homo sapiens
  source 1..557: mol_type = unassigned DNA
agttacttgggcggggccggtagcggcgggagctgcactggccaggggttccggctgtatatccatgagcgccgctggcagccggggagctgcaggaaccagactgggggcgagctgagcacctgtagtcaatcacacgcaggcacagatgaatccttcatatttatctggatttagctggtagcatttgtctcctaagacttggtcacagaggaatccatgtgaccttcaggccttctgctctaaactggcaggagatcctgtttctactcacagcgtccgagcttttaggtttgtttgaataagagatctgacctgaccggcccaactgtacaactcttcaaggaaaattcgtatttgcagtgggaagaataagtaacattgatcaagatgaatgccatgctggagactcccgaactcccagccgtgtttgatggagtgaagctggctgcagtggctgctgtgctgtacgtgatcgtccggtgtttgaacctgaagagccccacagccccacctgacctctacttccaggactcggggctctcacgctttctgct

SEQ ID NO: 112 - DNA, 845 bp, Homo sapiens
  source 1..845: mol_type = unassigned DNA
acttgggcggggccggtagcggcgggagctgcactggccaggggttccggctgtatatccatgagcgccgctggcagccggggagctgcaggaaccagactgggggcgagctgagcacctgtagtcaatcacacgcaggcacagatgaatccttcatatttatctggatttagctggtagcatttgtctcctaagacttggtcacagaggaatccatgtgaccttcaggccttctgctctaaactggcaggagatcctgtttctactcacagcgtccgagggtctggtggccgagccctgaggggcgctgttgctcccaggtggcagaattcagcatcagagagccacacagctgaaagagatggatggcttttaggtttgtttgaataagagatctgacctgaccggcccaactgtacaactcttcaaggaaaattcgtatttgcagtgggaagaataagtaacattgatcaagatgaatgccatgctggagactcccgaactcccagccgtgtttgatggagtgaagctggctgcagtggctgctgtgctgtacgtgatcgtccggtgtttgaacctgaagagccccacagccccacctgacctctacttccaggactcggggctctcacgctttctgctcaagtcctgtcctcttctgaccaaagaatacattccaccgttgatctgggggaaaagtggacacatccagacagccttgtatgggaagatgggaagggtgaggtcgccacatccttatgggcaccggaagttcatcactatgtctgatggagccacttctacattcgacctcttcgagcccttggctgagcactgtgttggag

SEQ ID NO: 113 - DNA, 2347 bp, Homo sapiens
  source 1..2347: mol_type = unassigned DNA
gggcggggccggtagcggcgggagctgcactggccaggggttccggctgtatatccatgagcgccgctggcagccggggagctgcaggaaccagactgggggcgagctgagcacctgtagtcaatcacacgcagaaataataatgatacttatgttagaagattgttttgagaagtgcatggagttactacatctgaagcatttagaacagtacctggcacaggaggttagagtgatgtctttcgtccctgtggggagtgaggtggaatgtcaggagggcgtagtttgcaaaacatccctcccagtggtactgatgccttttcgcaggttctgtcctcttcatttgcaagccactgctttatccacgagggtgctccctacttatgccagtgaattaatttttggcacagatgaatccttcatatttatctggatttagctggtagcatttgtctcctaagacttggtcacagaggaatccatgtgaccttcaggccttctgctctaaactggcaggagatcctgtttctactcacagcgtccgagggtctggtggccgagccctgaggggcgctgttgctcccaggtggcagaattcagcatcagagagccacacagctgaaagagatggatggcttttaggtttgtttgaataagagatctgacctgaccggcccaactgtacaactcttcaaggaaaattcgtatttgcagtgggaagaataagtaacattgatcaagatgaatgccatgctggagactcccgaactcccagccgtgtttgatggagtgaagctggctgcagtggctgctgtgctgtacgtgatcgtccggtgtttgaacctgaagagccccacagccccacctgacctctacttccaggactcggggctctcacgctttctgctcaagtcctgtcctcttctgaccaaagaatacattccaccgttgatctgggggaaaagtggacacatccagacagccttgtatgggaagatgggaagggtgaggtcgccacatccttatgggcaccggaagttcatcactatgtctgatggagccacttctacattcgacctcttcgagcccttggctgagcactgtgttggagatgatatcaccatggtcatctgccctggaattgccaatcacagcgagaagcaatacatccgcactttcgttgactacgcccagaaaaatggctatcggtgcgccgtgctgaaccacctgggtgccctgcccaacattgaattgacctcgccacgcatgttcacctatggctgcacgtgggaatttggagccatggtgaactacatcaagaagacatatcccctgacccagctggtcgtcgtgggcttcagcctgggtggtaacattgtgtgcaaatacttgggggagactcaggcaaaccaagagaaggtcctgtgctgcgtcagcgtgtgccaggggtacagtgcactgagggcccaggaaaccttcatgcaatgggatcagtgccggcggttctacaacttcctcatggctgacaacatgaagaagatcatcctctcgcacaggcaagctctttttggagaccatgttaagaaaccccagagcctggaagacacggacttgagccggctctacacagcaacatccctgatgcagattgatgacaatgtgatgaggaagtttcacggctataactccctgaaggaatactatgaggaagaaagttgcatgcggtacctgcacaggatttatgttcctctcatgctggttaatgcagctgacgatccgttggtgcatgaaagtcttctaaccattccaaaatctctttcagagaaacgagagaacgtcatgtttgtgctgcctctgcatgggggccacttgggcttctttgagggctctgtgctgttccccgagcccctgacatggatggataagctggtggtggagtacgccaacgccatttgccaatgggagcgtaacaagttgcagtgctctgacacggagcaggtggaggccgacctggagtgaggcctccggactctggcacgctccagcagccctcctctggaagctgcgtcccctcaccccctgtttcaggtctcccatctccctcagtgacctggatctgacctcacaccatcagcagggggcacccaccatgcacacctgtctcggagtaggcagctcttcctgggagctccaggctatttttgtgcttagttactggttttctccattgcattgttaggcatggtgacaagtgacagagttcttgccctctgtccagtttcagcatctggttgcttttaagccaagtacatctagtttccctattaaaaatgtgtctgaatagcga

SEQ ID NO: 114 - DNA, 583 bp, Homo sapiens
  source 1..583: mol_type = unassigned DNA
atccatgagcgccgctggcagccggggagctgcaggaaccagactgggggcgagctgagcacctgtagtcaatcacacgcaggttctgtcctcttcatttgcaagccactgctttatccacgagggtgctccctacttatgccagtgaattaatttttggcacagatgaatccttcatatttatctggatttagctggtagcatttgtctcctaagacttggtcacagaggaatccatgtgaccttcaggccttctgctctaaactggcaggagatcctgtttctactcacagcgtccgagggtctggtggccgagccctgaggggcgctgttgctcccaggtggcagaattcagcatcagagagccacacagctgaaagagatggatggcttgggcgacaagagcgaaactccatctcaaaaacaaacaaacccagagtatttgagcaccgtgatgactccattccacagaaccctctgtgggaggacacgtggtcctagaccaacaccgatttgctaaaaggtttgtttgaataagagatctgacctgaccggcccaactgtacaactcttcaaggaaaat

SEQ ID NO: 115 - DNA, 787 bp, Homo sapiens
  source 1..787: mol_type = unassigned DNA
gctgcaggaaccagactgggggcgagctgagcacctgtagtcaatcacacgcaggaaaaaccagctctcacacctgctcctctgtaaagcgtcttccccaagcccacacgtaattttgttgctgtccttgaaagtatttcccaagatctccaaaccgctttaaacttccaaggtctgagcctgacctggcctcgctaacaaagggttccactgatgccgactctaagaagaaagttttcaaggttcttcgtatttgaactttctatggctaggcttatgtttaaaataaccacactgatttaaacatggtcttatagtcttcagtggctcccaggtcttgcctctcgggttttttttcctctttcctttgaatgtgccttaaccttcgtcttgcttttatttacctctgagtctggtttagagccacctggaaattgaatggaatctttagtctattagtctaatctagagtccttaccttctggcctttgctcattgcagagcccccacattattagtcagttgtaccacagatactgtgttacataaggtgaggagagggaggtggtgttatcagttccactttttccaggctagagtgcagtggcccgatctcggtgcactgcaacctctgcttcccgggttcaagcgattttcctgcctcagcctctcattttatcttggataaaagagaagctttgaaagattgcctccctatgtgtacagtcactgtaggcatgtatttgtgtactgtttacttagtcatgtcaatgagggcaataaaaaa

SEQ ID NO: 116 - DNA, 588 bp, Homo sapiens
  source 1..588: mol_type = unassigned DNA
tcctcttctgaccaaagaatacattccaccgttgatctgggggaaaagtggacacatccagacagccttgtatgggaagatgggaagggtgaggtcgccacatccttatgggcaccggaagttcatcactatgtctgatggagccacttctacattcgacctcttcgagcccttggctgagcactgtgttggagatgatatcaccatggtcatctgccctggaattgccaatcacagcgagaagcaatacatccgcactttcgttgactacgcccagaaaaatggctatcggtgcgccgtgctgaaccacctgggtgccctgcccaacattgaattgacctcgccacgcatgttcacctatggctgcacgtgggaatttggagccatggtgaactacatcaagaagacatatcccctgacccagctggtcgtcgtgggcttcagcctgggtggtaacattgtgtgcaaatacttgggggagactcaggcaaaccaagagaaggtcctgtgctgcgtcagcgtgtgccaggggtacagtgcactgagtttgctgttgttggtattgaagacatcagtccttttcaaaaa

SEQ ID NO: 117 - DNA, 502 bp, Homo sapiens
  source 1..502: mol_type = unassigned DNA
ttcttccagggcccaggaaaccttcatgcaatgggatcagtgccggcggttctacaacttcctcatggctgacaacatgaagaagatcatcctctcgcacaggcaagctctttttggagaccatgttaagaaaccccagagcctggaagacacggacttgagccggctctacacagcaacatccctgatgcagattgatgacaatgtgatgaggaagtttcacggctataactccctgaaggaatactatgaggaagaaagttgcatgcggtacctgcacaggatttatgttcctctcatgctggttaatgcagctgacgatccgttggtgcatgaaagtcttctaaccattccaaaatctctttcaggtaagtgtttcttcctgctgccctctcaacagctcagcaagttgccacagtaaattctgtcaccttcaccatgctgtcatctcctggagaccaccctctttagggaaagacatctcatagcagtcagtgttctt

SEQ ID NO: 118 - DNA, 2064 bp, Homo sapiens
  source 1..2064: mol_type = unassigned DNA
gtcggaagccgcgctccgccaggcaggagacactgtggtcgggagtaggcagcggcgccgcgtccgctctcgcccgctctcgcccgctcgccagccggctctcctcccgccgcaggacccgcgcgccgcgctcgggggccatgcagcgcctggccatggacctgcggatgttgtcccgggagctctccctctacctggaacaccaagtccgggtggggttcttcggctcgggggtgggcttatcccttatcctgggcttcagcgtcgcttatgccttctactacctgagcagcattgccaagaaaccccagttagtgaccgggggtgagagtttcagccgcttccttcaagaccactgtcccgtggttacagaaacgtactacccgacggtctggtgctgggagggtcgaggacagaccctgcttagacctttcatcacttcgaagcccccggtgcagtacaggaatgaacttattaaaactgcagatggaggacagatttcactggactggtttgataatgataacagtacgtgttatatggatgccagcaccagacctactatcttattgttgcctggcctcacgggaacaagcaaggagtcatatatccttcatatgatccatcttagtgaagaattaggatacagatgtgtggtttttaacaacagaggagtggcgggggagaatctcttgacgccaaggacttattgttgtgctaacactgaagacttggagacagttattcaccatgtacacagcctgtacccttctgctcctttcctggcagcaggggtttcaatgggaggaatgctgcttctaaattacttgggcaaaattgggtccaaaacgcctttgatggcagctgcaactttttccgttggttggaacaccttcgcttgctcagagtcattggaaaaaccactgaactggctactttttaattactatttgacaacctgccttcagtcttcagttaataagcaccgacatatgtttgtaaaacaagttgatatggatcatgtcatgaaggctaaatccatcagagagtttgataagcgattcacttcagtcatgtttggataccaaacaattgatgattattatactgatgccagtccgagtcctagactgaagtcagtaggaattccagtattgtgtctaaattctgtggatgatgttttctcacccagtcatgctattccaatagaaactgctaagcaaaatcctaatgttgctttggtccttacttcttatggaggccatattggttttctggagggaatctggccaagacagtccacttacatggatcgtgtcttcaagcaatttgtgcaagccatggttgagcatggacatgaactctcttaacatgtagttctttgggtgcattttgtctgaaccacaattgtgaaggcagctcagcttagtgcacaaattttaactgttgtatataaagcaaataagccagcagatgggtgaagaggtccagaatgatatgcaaaaactactttttagagaaacaaaacaactttgtagcaacaaattaaatatagtattagattgttacttacgtagattttatttttactatgccttaccaagtacatccttaaacaaagtagtatgtacatgaaattgcacttaaccaaaactattgtgtaaaacaaattttaattcctcagggttttaatttaaactagtatttttttagattatttgttttaggtgatttaatggtactttaataactactaagaaatattggctatttcaatgtaagttataaggtggtacattcctaagggtatttatagttgatgataacatgaaaactgaaataagataaaatacaacgtgctaaatcttttatgtattctaactttaaaagacaagtgcaacaaagttagactgacttctatatgtgctcttttactctgataatattaaattaggactaacttatgttttataatgattataatttacatgcttatttttaaaatagtatatgtggacacatatatatcattatattaaaataaattctaccattttaaattgg

SEQ ID NO: 119 - DNA, 1836 bp, Homo sapiens
  source 1..1836: mol_type = unassigned DNA
tcgggagtaggcagcggcgccgcgtccgctctcgcccgctctcgcccgctcgccagccggctctcctcccgccgcaggacccgcgcgccgcgctcgggggccatgcagcgcctggccatggacctgcggatgttgtcccgggagctctccctctacctggaacaccaagtccgggtggggttcttcggctcgggggtgggcttatcccttatcctgggcttcagcgtcgcttatgccttctactacctgagcagcattgccaagaaaccccagttagtgaccgggggtgagagtttcagccgcttccttcaagaccactgtcccgtggttacagaaacgtactacccgacggtctggtgctgggagggtcgaggacagaccctgcttagacctttcatcacttcgaagcccccggtgcagtacaggaatgaacttattaaaactgcagatggaggacagatttcactggactggtttgataatgataacagtacgtgttatatggatgccagcaccagacctactatcttattgttgcctggcctcacgggaacaagcaaggagtcatatatccttcatatgatccatcttagtgaagaattaggatacagaatgctgcttctaaattacttgggcaaaattgggtccaaaacgcctttgatggcagctgcaactttttccgttggttggaacaccttcgcttgctcagagtcattggaaaaaccactgaactggctactttttaattactatttgacaacctgccttcagtcttcagttaataagcaccgacatatgtttgtaaaacaagttgatatggatcatgtcatgaaggctaaatccatcagagagtttgataagcgattcacttcagtcatgtttggataccaaacaattgatgattattatactgatgccagtccgagtcctagactgaagtcagtaggaattccagtattgtgtctaaattctgtggatgatgttttctcacccagtcatgctattccaatagaaactgctaagcaaaatcctaatgttgctttggtccttacttcttatggaggccatattggttttctggagggaatctggccaagacagtccacttacatggatcgtgtcttcaagcaatttgtgcaagccatggttgagcatggacatgaactctcttaacatgtagttctttgggtgcattttgtctgaaccacaattgtgaaggcagctcagcttagtgcacaaattttaactgttgtatataaagcaaataagccagcagatgggtgaagaggtccagaatgatatgcaaaaactactttttagagaaacaaaacaactttgtagcaacaaattaaatatagtattagattgttacttacgtagattttatttttactatgccttaccaagtacatccttaaacaaagtagtatgtacatgaaattgcacttaaccaaaactattgtgtaaaacaaattttaattcctcagggttttaatttaaactagtatttttttagattatttgttttaggtgatttaatggtactttaataactactaagaaatattggctatttcaatgtaagttataaggtggtacattcctaagggtatttatagttgatgataacatgaaaactgaaataagataaaatacaacgtgctaaatcttttatgtattctaactttaaaagacaagtgcaacaaagttagactgacttctatatgtgctcttttactctgataatattaaattaggactaacttatgttttataatgattataatttacatgcttatttttaaaatagtatatgtggacacatatatatcatta

SEQ ID NO: 120 - DNA, 2080 bp, Homo sapiens
  source 1..2080: mol_type = unassigned DNA
aagtctttgccggtttctggtttacggttggcagaaactttgctctgggcccttctctgatactgcttttcccttcagaaaccccagttagtgaccgggggtgagagtttcagccgcttccttcaagaccactgtcccgtggttacagaaacgtactacccgacggtctggtgctgggagggtcgaggacagaccctgcttagacctttcatcacttcgaagcccccggtgcagtacaggaatgaacttattaaaactgcagatggaggacagatttcactggactggtttgataatgataacagtacgtgttatatggatgccagcaccagacctactatcttattgttgcctggcctcacgggaacaagcaaggagtcatatatccttcatatgatccatcttagtgaagaattaggatacagatgtgtggtttttaacaacagaggagtggcgggggagaatctcttgacgccaaggacttattgttgtgctaacactgaagacttggagacagttattcaccatgtacacagcctgtacccttctgctcctttcctggcagcaggggtttcaatgggagggtaaggttttccctttctaaaataatctctgagagggaagctattttattggctgtctctttgagaggactataagctagctgtatggacactttttaaataaatgtctgattatgtttatcatattttattaaatgcggttgattgaatgaacgaaggaaggaaagaattaattcaggtgaattttaatatttttcttaactacgggtctctgtgactgcggattttgtgagcctgaaggtttgtctgaagcccatgaagtcgattgcatcactcaccggctgccatgttgaccttctgattcctgacgcactcccagccatccctggagctgcgttctgaagctgaacttgtagcatgactttcatcactccagttacagaaataatcacttattgctctctccagctgcagtggccttcaaaattatttttccccagaatgctgcttctaaattacttgggcaaaattgggtccaaaacgcctttgatggcagctgcaactttttccgttggttggaacaccttcgcttgctcagagtcattggaaaaaccactgaactggctactttttaattactatttgacaacctgccttcagtcttcagttaataagcaccgacatatgtttgtaaaacaagttgatatggatcatgtcatgaaggctaaatccatcagagagtttgataagcgattcacttcagtcatgtttggataccaaacaattgatgattattatactgatgccagtccgagtcctagactgaagtcagtaggaattccagtattgtgtctaaattctgtggatgatgttttctcacccagtcatgctattccaatagaaactgctaagcaaaatcctaatgttgctttggtccttacttcttatggaggccatattggttttctggagggaatctggccaagacagtccacttacatggatcgtgtcttcaagcaatttgtgcaagccatggttgagcatggacatgaactctcttaacatgtagttctttgggtgcattttgtctgaaccacaattgtgaaggcagctcagcttagtgcacaaattttaactgttgtatataaagcaaataagccagcagatgggtgaagaggtccagaatgatatgcaaaaactactttttagagaaacaaaacaactttgtagcaacaaattaaatatagtattagattgttacttacgtagattttatttttactatgccttaccaagtacatccttaaacaaagtagtatgtacatgaaattgcacttaaccaaaactattgtgtaaaacaaattttaattcctcagggttttaatttaaactagtatttttttagattatttgttttaggtgatttaatggtactttaataactactaagaaatattggctatttcaatgtaagttataaggtggtacattcctaagggtatttatagttgatgataacatgaaaactgaaataagataaaatacaacgtgctaaa

SEQ ID NO: 121 - DNA, 877 bp, Homo sapiens
  source 1..877: mol_type = unassigned DNA
gacacgtttgagtatggtactttgtttaattgaaggtatttgtattggtcttgccccatctgcatcaagccttccttgcatgttcatggtctttttgttagtgccaactctaactgtgctgactttaaatggcatgtatgtgcgctgcaagacaggaaaatgataaattattaatactacagtatgtgcaaacaaaggttattttctcatatgtatgactccttgctcctgtttacatttctgcattttacaaatcattaacctcacattgtaatttttgtgctttacttgtcactacttccagacgccaaggacttattgttgtgctaacactgaagacttggagacagttattcaccatgtacacagcctgtacccttctgctcctttcctggcagcaggggtttcaatgggaggaatgctgcttctaaattacttgggcaaaattgggtccaaaacgcctttgatggcagctgcaactttttccgttggttggaacaccttcgcttgctcagagtcattggaaaaaccactgaactggctactttttaattactatttgacaacctgccttcagtcttcagttaataagcaccgacatatgtttgtaaaacaagttgatatggatcatgtcatgaaggctaaatccatcagagagtttgataagcgattcacttcagtcatgtttggataccaaacaattgatgattattatactgatgccagtccgagtcctagactgaagtcagtaggaattccagtattgtgtctaaattctgtggatgatgttttctcacccagtcatgctattccaatagaaactgctaagcaaaatcctaatgttgctttggtccttacttcttatggaggccatatt

SEQ ID NO: 122 - DNA, 291 bp, Homo sapiens
  source 1..291: mol_type = unassigned DNA
attatactgatgccagtccgagtcctagactgaagtcagtaggaattccagtattgtgtctaaattctgtggatgatgttttctcacccagtcatggtaatcttagaagctgaaacttacagccttgaccacaatttagaaaatgaaactctgaactttaatatcagttgacttacatggtgattgttttagcatattttcattggattaaggaagtccagtatttctctacccgtttttatatttcactgccctttttaccaataaaaagttcccaacattttaacctta

SEQ ID NO: 123 - DNA, 1311 bp, Homo sapiens
  source 1..1311: mol_type = unassigned DNA
actgtggtcgggagtaggcagcggcgccgcgtccgctctcgcccgctctcgcccgctcgccagccggctctcctcccgccgcaggacccgcgcgccgcgctcgggggccatgcagcgcctggccatggacctgcggatgttgtcccgggagctctccctctacctggaacaccaagtccgggtggggttcttcggctcgggggtgggcttatcccttatcctgggcttcagcgtcgcttatgccttctactacctgagcagcattgccaagaaacgtactacccgacggtctggtgctgggagggtcgaggacagaccctgcttagacctttcatcacttcgaagcccccggtgcagtacaggaatgaacttattaaaactgcagatggaggacagatttcactggactggtttgataatgataacagtacgtgttatatggatgccagcaccagacctactatcttattgttgcctggcctcacgggaacaagcaaggagtcatatatccttcatatgatccatcttagtgaagaattaggatacagatgtgtggtttttaacaacagaggagtggcgggggagaatctcttgacgccaaggacttattgttgtgctaacactgaagacttggagacagttattcaccatgtacacagcctgtacccttctgctcctttcctggcagcaggggtttcaatgggagggtaaggttttccctttctaaaataatctctgagagggaagctattttattggctgtctctttgagaggactataagctagctgtatggacactttttaaataaatgtctgattatgtttatcatattttattaaatgcggttgattgaatgaacgaaggaaggaaagaattaattcaggtgaattttaatatttttcttaactacgggtctctgtgactgcggattttgtgagcctgaaggtttgtctgaagcccatgaagtcgattgcatcactcaccggctgccatgttgaccttctgattcctgacgcactcccagccatccctggagctgcgttctgaagctgaacttgtagcatgactttcatcactccagttacagaaataatcacttattgctctctccagctgcagtggccttcaaaattatttttccccagaatgctgcttctaaattacttgggcaaaattgggtccaaaacgcctttgatggcagctgcaactttttccgttggttggaacaccttcgcttgctcagagtcattggaaaaaccactgaactggctactttttaattactatttgacaacctgccttcagtctt

SEQ ID NO: 124 - DNA, 865 bp, Homo sapiens
  source 1..865: mol_type = unassigned DNA
ggatgttgtcccgggagctctccctctacctggaacaccaagtccgggtggggttcttcggctcgggggtgggcttatcccttatcctgggcttcagcgtcgcttatgccttctactacctgagcagcattgccaagaaaccccagttagtgaccgggggtgagagtttcagccgcttccttcaagaccactgtcccgtggttacagaaacgtactacccgacggtctggtgctgggagggtcgaggacagaccctgcttagacctttcatcacttcgaagcccccggtgcagtacaggaatgaacttattaaaactgcagatggaggacagatttcactggactggtttgataatgataacagtacgtgttatatggatgccagcaccagacctactatcttattgttgcctggcctcacgggaacaagcaaggagtcatatatccttcatatgatccatcttagtgaagaattaggatacagacgccaaggacttattgttgtgctaacactgaagacttggagacagttattcaccatgtacacagcctgtacccttctgctcctttcctggcagcaggggtttcaatgggagggtaaggttttccctttctaaaataatctctgagagggaagctattttattggctgtctctttgagaggactataagctagctgtatggacactttttaaataaatgtctgattatgtttatcatattttattaaatgcggttgattgaatgaacgaaggaaggaaagaattaattcaggtgaattttaatatttttcttaactacgggtctctgtgactgcggattttgtgagcctgaaggtttgtctgaagcccatgaagtcgattg

SEQ ID NO: 125 - DNA, 440 bp, Homo sapiens
  source 1..440: mol_type = unassigned DNA
cgtggttacagaaacgtactacccgacggtctggtgctgggagggtcgaggacagaccctgcttagacctttcatcacttcgaagcccccggtgcagtacaggaatgaacttattaaaactgcagatggaggacagatttcactggactggtttgataatgataacagtacgtgttatatggatgccagcaccagacctactatcttattgttgcctggcctcacgggaacaagcaaggagtcatatatccttcatatgatccatcttagtgaagaattaggatacagatgtgtggtttttaacaacagaggagtggcgggggagaatctcttgtgacttaggcactggaggaaatgaagatcaacacgatttcgaaagcaaaagttgcagagtgttatggtcttactcaagtgccttgtaataaatagcttgacgtgaa

SEQ ID NO: 126 - DNA, 604 bp, Homo sapiens
  source 1..604: mol_type = unassigned DNA
ggggtgggcttatcccttatcctgggcttcagcgtcgcttatgccttctactacctgagcagcattgccaagaaaccccagttagtgaccgggggtgagagtttcagccgcttccttcaagaccactgtcccgtggttacagaaacgtactacccgacggtctggtgctgggagggtcgaggacagaccctgcttagacctttcatcacttcgaagcccccggtgcagtacaggaatgaacttattaaaactgcagatggaggacagatttcactggactggtttgataatgataacagtacgtgttatatggatgccagcaccagacctactatcttattgttgcctggcctcacgggaacaagcaaggagtcatatatccttcatatgatccatcttagtgaagaattaggatacagatgtgtggtttttaacaacagaggagtggcgggggagaatctcttggtaagtaaatttaaatgacaacagtcttaactttttaaagaatcatttctagttttataacaaaaagcatattctttttatttaaaataactctgtttatgtaagcaatacaaatttattatacaaaaatacagatatg

SEQ ID NO: 127 - DNA, 1664 bp, Homo sapiens
  source 1..1664: mol_type = unassigned DNA
ggagacactgtggtcgggagtaggcagcggcgccgcgtccgctctcgcccgctctcgcccgctcgccagccggctctcctcccgccgcaggacccgcgcgccgcgctcgggggccatgcagcgcctggccatggacctgcggatgttgtcccgggagctctccctctacctggaacaccaagtccgggtggggttcttcggctcgggggtgggcttatcccttatcctgggcttcagcgtcgcttatgccttctactacctgagcagcattgccaagaaaccccagttagtgaccgggggtgagagtttcagccgcttccttcaagaccactgtcccgtggttacagaaacgtactacccgacggtctggtgctgggagggtcgaggacagaccctgcttagacctttcatcacttcgaagcccccggtgcagtacaggaatgaacttattaaaactgcagatggaggacagatttcactggactggtttgataatgataacagtacgtgttatatggatgccagcaccagacctactatcttattgttgcctggcctcacgggaacaagcaaggagtcatatatccttcatatgatccatcttagtgaagaattaggatacaggtaccagtaaaagatttcttttttttcacttgatccattccaaatgaagtacaaatatatctacatgtttgtttcagaaatacttagtacttcttgcatagaaaagcagtcccttaaattattatttttctctgcattctttttttcctctttcttttcaggaagatgcataactgaatcatctcacaagaaatgtcacttagcatagtagacactctgcagatttaggctgagttaatgaatgaaattagaatcatctgagcattgactgagcccttccccccatccccaccccaatggagagtgtgttatggagggagaacagcaattacagacccctgagagagtacacagtggccgtcatgccacattctggggcctggattcactaatcttgtcgccctggctcagctcccaagtgcaaaaaatattcagaatcagcttgtaggttgtccctatttatcaaaggtgatctctgcctcttctgaccacctgagtttgcaggtgcacttggctagtctccagttgttgatgccacagcttttctgagtaaccattattaagctcagtcaccaggtacaatttaattttttgcaagtgattagcaactttgagtttcaagttcagctctagaatcttagagtcattataaaaggtactgcttttttgtgcctcagcttttttttttagctgataattattgtaatggaacactctgtgagttgtatttaaagtagagttgtatcttttgttaaacttgaaacacttgtgtgaaaagctgatggtaagtttaccttaaaaaaataattttaggctggtcacagtggctcatgcctgtaatcccagcactttggaaggcgtaaagccggtggattgcttgagcccaggagttcgagaccagcctgggcaacatggtgagacctagtctacaaaaattagcagggcatggtggcatgcacctatagttccagctactgacaaggctgaggtaggacgatcagttgagcccgggaggtagagactgtagtgaaccatgatcg

SEQ ID NO: 128 - DNA, 876 bp, Homo sapiens
  source 1..876: mol_type = unassigned DNA
gcaatggtgcgatctcggctcaccgcaacctccgcctcccgagttcaagcgattctcctacctcaggctcccgagtagctggaattacaggtatctagagagtcgagtgggagggaaattgctggctctggccactacagtaacatcagcacctagagcagtgctcaactgactgaaggctcctgtgagtcgccctctccccctggccccccaacccgcggggaaaggctggcgggacgccacacagcacctcgattacgccatttcatttgccactgcaccatctatcggacactagctaggctcttccaggaccggacgcacctccgtccccaaggtgccacctgacagccaacaccgacggggtgatgcatgaatacagtcattattcaaattagctaaaacacctaactcattcgggtcaggatggctaactggttggctccccacatggtgccctacgtctatatcacaccttaaagaagctgaagagaagatgttaaaatgtgtgccttgcacatacaaaaaagaacctgttcgtatatctaatggaaataaaatatggacactgaagttctctcataatatttcaaataagactccacttgtccttctccatggttttggaggaggtcttgggctctgggcactgaattttggagatctttgcaccaacagacctgtctatgcttttgacctattgggttttggacgaagtagtagacccaggtttgacagtgatgcagaagaagtggagaatcagtttgtggaatccattgaagagtggagatgtgccctaggattggacaaaatgatcttgcttgggcacaacctaggtggattcttggctgctgcttactcgctgaagtacccatc

SEQ ID NO: 129 - DNA, 1690 bp, Homo sapiens
  source 1..1690: mol_type = unassigned DNA
agtgcgcggaagacgcatgcgctggcggcctgcgccgccttaagtgccgcgccagcccggggcggcccagtcggcctgtcagccggcttcgagataagtcccggcgcttgcgcggcggcggctatggcggcggaggaggaggaggtggactctgccgacaccggagagaggtcaggatggctaactggttggctccccacatggtgccctacgtctatatcacaccttaaagaagctgaagagaagatgttaaaatgtgtgccttgcacatacaaaaaagaacctgttcgtatatctaatggaaataaaatatggacactgaagttctctcataatatttcaaataagactccacttgtccttctccatggttttggaggaggtcttgggctctgggcactgaattttggagatctttgcaccaacagacctgtctatgcttttgacctattgggttttggacgaagtagtagacccaggtttgacagtgatgcagaagaagtggagaatcagtttgtggaatccattgaagagtggagatgtgccctaggattggacaaaatgatcttgcttgggcacaacctaggtggattcttggctgctgcttactcgctgaagtacccatcaagggttaatcatctcattttagtggagccttggggtttccctgaacgaccagaccttgctgatcaagacagaccaattccagtttggatcagagccttgggagcagcattgactccctttaaccctttagctggcctaaggattgcaggaccctttggtttaagtctagtgcagcgtttaaggcctgatttcaaacgaaagtattcttcaatgttcgaagacgatactgtgacagaatacatctaccactgtaatgtgcagactccaagtggtgagacagctttcaagaatatgactattccttatggatgggcaaaaaggccaatgctccagcgaattggtaaaatgcaccctgacattccagtttcagtgatctttggcgcccgatcctgcatagatggcaattctggcaccagcatccagtccttacgaccacattcatatgtgaagacaatagctattcttggggcaggacattatgtatatgcagatcaaccagaagaattcaaccagaaagtaaaggagatctgcgacactgtggactgaacacactgaagctctgatgggaaaacctggtgactgatatagttgttcagcaataattcatagtctgtgatgaagagtagtgaatacaacacacaaccaggcagccttcttgactatactttgcacatgttttctttaggaattcactcacacatttaaaccagttagtgccttctagaagaatggctttcctttctcctacacaaaattgaaatatacaagtctctaaatataatacctttaaataaaaggttatttgtccctctgatgtactgaaaaactgtaatttttcagctgaaaattttttaatctaactttgctagttatttttatattgcaatctatattaccaatttaggaagtgatttctgagtctcttacactgtaaaggtgcactttattttctttgtcttccccatcatgtatttattgtgtcttgataactgatattaatctaaattcaatgtgtttttatgtaaaaatttgtcagttgtttagaatatttcactttgttttt

SEQ ID NO: 130 - DNA, 618 bp, Homo sapiens
  source 1..618: mol_type = unassigned DNA
tggcggcctgcgccgccttaagtgccgcgccagcccggggcggcccagtcggcctgtcagccggcttcgagataagtcccggcgcttgcgcggcggcggctatggcggcggaggaggaggaggtggactctgccgacaccggagagaggtcaggatggctaactggttggctccccacatggtgccctacgtctatatcacaccttaaagaagctgaagagaagatgttaaaatgtaaggctttcttcttgtaagttaaatgagctgtgtactaagataggtccaatatatctcattgccctgaaactggaggtaagattctgtggtgtgttcattgttggcaaaataacttttttccttttccttgtcattagaaagtacagaaatgaatgtcgggggctggcaggtaggagttctaaaactttttggtcttgggcccctgttatactcttaaattagtaaggaccccaaggagatttgtttatgggcttattatcaatatttatcatttctaatacaattagaaattaaaattgaataatcaaaaatgttaatttattaatttctttaaaaataatagtaaacccattacagattaaaataaataaaatttgtacc

SEQ ID NO: 131 - DNA, 833 bp, Homo sapiens
  source 1..833: mol_type = unassigned DNA
gccggcttcgagataagtcccggcgcttgcgcggcggcggctatggcggcggaggaggaggaggtggactctgccgacaccggagagaggtcaggatggctaactggttggctccccacatggtgccctacgtctatatcacaccttaaagaagctgaagagaagatgttaaaataaagtacagaaatgaatgtcgggggctggcaggagtataataccctcatttgacagatgtggaaagaagttagaaggtaatatgacttgccaaagaccttgatcacaggttacttgaggtttgtctgaggtgtgccttgcacatacaaaaaagaacctgttcgtatatctaatggaaataaaatatggacactgaagttctctcataatatttcaaataagactccacttgtccttctccatggttttggaggaggtcttgggctctgggcactgaattttggagatctttgcaccaacagacctgtctatgcttttgacctattgggttttggacgaagtagtagacccaggtttgacagtgatgcagaagaagtggagaatcagtttgtggaatccattgaagagtggagatgtgccctaggattggacaaaatgatcttgcttgggcacaacctaggtggattcttggctgctgcttactcgctgaagtacccatcaagggttaatcatctcattttagtggagccttggggtttccctgaacgaccagaccttgctgatcaagacagaccaattccagtttggatcagagccttgggagcagcattgactccctttaaccctttagctggcctaaggattgcaggaccctttgg

SEQ ID NO: 132 - DNA, 464 bp, Homo sapiens
  source 1..464: mol_type = unassigned DNA
gtctgagccggactccggccgcgccgggaggccgccttgaccccgcgcggagggtccgccccgttgttgtataagccaccccgcgggccggcgacggagctggccgcggcggccgcaccggctcgggctctgccaagggacccggcctgccccaatgccgccggcgggcggtgcccggtcgaccctgcacctgactgcgaggcgcgggaaatgaccgggtctgtcagcctcccatcgcggcttccgtctacaggtcaggatggctaactggttggctccccacatggtgccctacgtctatatcacaccttaaagaagctgaagagaagatgttaaaatgtgtgccttgcacatacaaaaaagaacctgttcgtatatctaatggaaataaaatatggacactgaagttctctcataatatttcaaataagactccacttgtccttctccatggttttggagga

SEQ ID NO: 133 - DNA, 525 bp, Homo sapiens
  source 1..525: mol_type = unassigned DNA
agggttaatcatctcattttagtggagccttggggtttccctgaacgaccagaccttgctgatcaagacagaccaattccagtttggatcagagccttgggagcagcattgactccctttaaccctttagctggcctaaggattgcaggaccctttggtttaagtctagtgcagcgtttaaggcctgatttcaaacgaaagtattcttcaatgttcgaagacgatactgtgacagaatacatctaccactgtaatgtgcagactccaagtttcagtgatctttggcgcccgatcctgcatagatggcaattctggcaccagcatccagtccttacgaccacattcatatgtgaagacaatagctattcttggggcaggacattatgtatatgcagatcaaccagaagaattcaaccagaaagtaaaggagatctgcgacactgtggactgaacacactgaagctctgatgggaaaacctggtgactgatatagttgttcagcaataattcatagtctgtgatgaa

SEQ ID NO: 134 - DNA, 631 bp, Homo sapiens
  source 1..631: mol_type = unassigned DNA
aagtggtgagacagctttcaagaatatgactattccttatggatgggcaaaaaggccaatgctccagcgaattggtaaaatgcaccctgacattccagtttcagtgatctttggcgcccgatcctgcatagatggcaattctggcaccagcatccagtccttacgaccacattcatatgtgaagacaatagctattcttggggcaggacattatgtatatgcagatcaaccagaagaattcaaccagaaagtaaaggagatctgcgacactgtggactgaacacactgaagctctgatgggaaaacctgtgtgctttctggtgaccatgaatggatgctgtcagtagatgccttggtgctctttacggtgctggtgcaactacccccaactgtcaggaagatgtcccctagtggcttatagctgtctcctctgcagaattgcccttggccaaacagctgcttcctcacctgggagatcacacccctgcagccgatgattgactgacacgtgggtgcagaaagcctgccctcttgcctccaggtgggacccagtctgtggtgcaatttgtgttcctgggcacctgtgggactggctgaagttaaacttcagattaaactacatccttaatta

SEQ ID NO: 135 - DNA, 2109 bp, Homo sapiens
  source 1..2109: mol_type = unassigned DNA
tcctatccaccctccactcccctgtcccttggtgactcatccctgagcttcccaaggaagcccccaccctctgccctttcctcccgccttccatgagtggaaaatccacctccgccccctatagcaggccagcccccttcctccccagtctccgaccccatcccccagccgaccagtttcctctccaggaccagggagcaatcacagctgccccgaccttggcttcctctgctgggtgggattgggggctgggcccccaaatgggcccctggcttcccccttcctctgggcaggggacagagagacacaggctcggggagcaggactgacttcctcttgtcccggaatgagcatgcctgccctttgcaagcaggtttgggtctcacgcagaggaaaccaaaagcaataagagggagggaaggcagagcaaccaatcaagggcagggtgagactcaaaacgagcgggctccctggggagccagacagaggctgggggtgatggcggagctacagcagctgcaggagtttgagatccccactggccgggaggctctgaggggcaaccacagtgccctgctgcgggtcgctgactactgcgaggacaactatgtgcaggccacagacaagcggaaggcgctggaggagaccatggccttcactacccaggcactggccagcgtggcctaccaggtgggcaacctggccgggcacactctgcgcatgttggacctgcagggggccgccctgcggcaggtggaagcccgtgtaagcacgctgggccagatggtgaacatgcatatggagaaggtggcccgaagggagatcggcaccttagccactgtccagcggctgccccccggccagaaggtcatcgccccagagaacctaccccctctcacgccctactgcaggagacccctcaactttggctgcctggacgacattggccatgggatcaaggacctcagcacgcagctgtcaagaacaggcaccctgtctcgaaagagcatcaaggcccctgccacacccgcctccgccaccttggggagaccaccccggattcccgagccagtgcacctgccggtggtgcccgacggcagactctccgccgcctcctctgcgttttccctggcctcggccggcagcgccgaaggtgtcggtggggcccccacgcccaaggggcaggcagcacctccagccccacctctccccagctccttggacccacctcctccaccagcagccgtcgaggtgttccagcggcctcccacgctggaggagttgtccccacccccaccggacgaagagctgcccctgccactggacctgcctcctcctccacccctggatggagatgaattggggctgcctccacccccaccaggatttgggcctgatgagcccagctgggtgcctgcctcatacttggagaaagtggtgacactgtacccatacaccagccagaaggacaatgagctctccttctctgagggcactgtcatctgtgtcactcgccgctactccgatggctggtgcgagggcgtcagctcagaggggactggattcttccctgggaactatgtggagcccagctgctgacagcccagggctctctgggcagctgatgtctgcactgagtgggtttcatgagccccaagccaaaaccagctccagtcacagctggactgggtctgcccacctcttgggctgtgagctgtgttctgtccttcctcccatcggagggagaaggggtcctggggagagagaatttatccagaggcctgctgcagatggggaagagctggaaaccaagaagtttgtcaacagaggacccctactccatgcaggacagggtctcctgctgcaagtcccaactttgaataaaacagatgatgtcctgtgactgccccacagagataaggggccaggagggattgaaaggcatcccagttctaaggctgctgctaattacagcccccaacctccaacccaccagctgacctagaagcagcatcttcccatttcctcagtacccacaaagtgcagcccacattggaccccagacacccctctgcagccattgactgcaacttgttcttttgcccattg

SEQ ID NO: 136 - DNA, 1718 bp, Homo sapiens
  source 1..1718: mol_type = unassigned DNA
ccaggaccagggagcaatcacagctgccccgaccttggcttcctctgctgggtgggattgggggctgggcccccaaatgggcccctggcttcccccttcctctgggcaggggacagagagacacaggctcggggagcaggactgacttcctcttgtcccggaatgagcatgcctgccctttgcaagcaggtttgggtctcacgcagaggaaaccaaaagcaataagagggagggaaggcagagcaaccaatcaagggcagggtgagactcaaaacgagcgggctccctggggagccagacagaggctgggggtgatggcggagctacagcagctgcaggagtttgagatccccactggccgggaggctctgaggggcaaccacagtgccctgctgcgggtcgctgactactgcgaggacaactatgtgcaggccacagacaagcggaaggcgctggaggagaccatggccttcactacccaggcactggccagcgtggcctaccaggtgggcaacctggccgggcacactctgcgcatgttggacctgcagggggccgccctgcggcaggtggaagcccgtatggtgaacatgcatatggagaaggtggcccgaagggagatcggcaccttagccactgtccagcggctgccccccggccagaaggtcatcgccccagagaacctaccccctctcacgccctactgcaggagacccctcaactttggctgcctggacgacattggccatgggatcaaggacctcagcacgcagctgtcaagaacaggcaccctgtctcgaaagagcatcaaggcccctgccacacccgcctccgccaccttggggagaccaccccggattcccgagccagtgcacctgccggtggtgcccgacggcagactctccgccgcctcctctgcgttttccctggcctcggccggcagcgccgaaggtgtcggtggggcccccacgcccaaggggcaggcagcacctccagccccacctctccccagctccttggacccacctcctccaccagcagccgtcgaggtgttccagcggcctcccacgctggaggagttgtccccacccccaccggacgaagagctgcccctgccactggacctgcctcctcctccacccctggatggagatgaattggggctgcctccacccccaccaggatttgggcctgatgagcccagctgggtgcctgcctcatacttggagaaagtggtgacactgtacccatacaccagccagaaggacaatgagctctccttctctgagggcactgtcatctgtgtcactcgccgctactccgatggctggtgcgagggcgtcagctcagaggggactggattcttccctgggaactatgtggagcccagctgctgacagcccagggctctctgggcagctgatgtctgcactgagtgggtttcatgagccccaagccaaaaccagctccagtcacagctggactgggtctgcccacctcttgggctgtgagctgtgttctgtccttcctcccatcggagggagaaggggtcctggggagagagaatttatccagaggcctgctgcagatggggaagagctggaaaccaagaagtttgtcaacagaggacccctactccatgcaggacagggtctcctgctgcaagtcccaactttgaataaaacagatgatgtcctgtgactgccccacagagataa

SEQ ID NO: 137 - DNA, 810 bp, Homo sapiens
  source 1..810: mol_type = unassigned DNA
aacaggcaccctgtctcgaaagagcatcaaggcccctgccacacccgcctccgccaccttggggagaccaccccggattcccgagccagtgcacctgccggtggtgcccgacggcagactctccgccgcctcctctgcgttttccctggcctcggccggcagcgccgaaggtgtcggtggggcccccacgcccaaggggcaggcagcacctccagccccacctctccccagctccttggacccacctcctccaccagcagccgtcgaggtgttccagcggcctcccacgctggaggagttgtccccacccccaccggcctttctgcttttcccccaagacgaagagctgcccctgccactggacctgcctcctcctccacccctggatggagatgaattggggctgcctccacccccaccaggatttgggcctgatgagcccagctgggtgcctgcctcatacttggagaaaggtacctgacttctgggactgaggggcaccggatcccacttcctctgttgccctgatccccattctcctccctctgcaaaggtgtgaatctatcccccgggccccccacacaatttttctgacgaactgacagaactggggagagggcagctggcctggtattaaatattaactaagctggggaggggtcctgaaggcttgcaagaaggcccccaagatggcccctagagtctagtacttgagaccgtgcatccccatggtggtggggggtgagggggagagggcaagaggcattatctcacggcaccctcttctcttgccctgcagtggtgacactg

SEQ ID NO: 138 - DNA, 866 bp, Homo sapiens
  source 1..866: mol_type = unassigned DNA
gagaccaccccggattcccgagccagtgcacctgccggtggtgcccgacggcagactctccgccgcctcctctgcgttttccctggcctcggccggcagcgccgaaggtgtcggtggggcccccacgcccaaggggcaggcagcacctccagccccacctctccccagctccttggacccacctcctccaccagcagccgtcgaggtgttccagcggcctcccacgctggaggagttgtccccacccccaccggcctttctgcttttcccccaagacgaagagctgcccctgccactggacctgcctcctcctccacccctggatggagatgaattggggctgcctccacccccaccaggatttgggcctgatgagcccagctgggtgcctgcctcatacttggagaaagtggtgacactgtacccatacaccagccagaaggacaatgagctctccttctctgagggcactgtcatctgtgtcactcgccgctactccgatggctggtgcgagggcgtcagctcagaggggactggattcttccctgggaactatgtggagcccagctgctgacagcccagggctctctgggcagctgatgtctgcactgagtgggtttcatgagccccaagccaaaaccagctccagtcacagctggactgggtctgcccacctcttgggctgtgagctgtgttctgtccttcctcccatcggagggagaaggggtcctggggagagagaatttatccagaggcctgctgcagatggggaagagctggaaaccaagaagtttgtcaacagaggacccctactccatgcaggacagggtctcctgctgcaagtcccaactttgaataaaacagat

SEQ ID NO: 139 - DNA, 6783 bp, Homo sapiens
  source 1..6783: mol_type = unassigned DNA
gtgagtaagcccacggcacagctaagtgcagccgcccgcctctgtcactgggagacagtccacttaaatgcagctccagggttgcgaggcacccaccagcatcattccccatgcgaggtggcaaatgcaacatgctctccagtttggggtgtctacttctctgtggaagtattacactagccctgggaaatgcacagaaattgccaaaaggtaaaaggccaaacctcaaagtccacatcaataccacaagtgactccatcctcttgaagttcttgcgtccaagtccaaatgtaaagcttgaaggtcttctcctgggatatggcagcaatgtatcaccaaaccagtacttccctcttcccgctgaagggaaattcacagaagctatagttgatgcagagccgaaatatctgatagttgtgcgacctgctccacctccaagtcaaaagaagtcatgttcaggtaaaactcgttctcgcaaacctctgcagctggtggttggcactctgacaccgagctcggtcttcctgtcctggggtttcctcatcaacccacaccatgactggacattgccaagtcactgtcccaatgacagattttatacaattcgctatcgagaaaaggataaagaaaagaagtggatttttcaaatctgtccagccactgaaacaattgtggaaaacctaaagcccaacacagtttatgaatttggagtgaaagacaatgtggaaggtggaatttggagtaagattttcaatcacaagactgttgttggaagtaaaaaagtaaatgggaaaatccaaagtacctatgaccaagaccacacagtgccagcatatgtcccaaggaaactaatcccaataacaatcatcaagcaagtgattcagaatgttactcacaaggattcagctaaatccccagaaaaagctccactgggaggagtgatactagtccaccttattattccaggtcttaatgaaactactgtaaaacttcctgcatccctaatgtttgagatttcagatgcactcaagacacaattagctaagaatgaaaccttggcattacctgccgaatctaaaacaccagaggttgaaaaaatctcagcacgacccacaacagtgactcctgaaacagttccaagaagcactaaacccactacgtctagtgcattagatgtttcagaaacaacactggttctcagcaaaaggaccccggaaacattgcaaactattctaatacctcagtttgaattgccactgagcactctagctccaaaaagccttccagaatttcctgaggcaaaaacacccttcccttttgagaaacctaggggcacattggcttcaagtgaaaagccatggattgtgcctacagctaaaatatctgaagattccaaagttctgcagcctcaaactgcaacttatgatgttttctcaagccctacaacatcagatgagcctgagatatcagattcctacacagcaacaagtgatcgtattctggattctatcccacctaaaacttctagaactcttgaacagccaagggcaacactggctccaagtgaaacaccatttgttcctcaaaaactggaaatctttaccagtccagaaatgcagcctacgacacctgctccccagcaaactacatctatcccttctacacctaaacgacgcccccggcccaaaccgccaagaaccaaacctgaaagaaccacaagtgccggaacaattacacctaaaatttctaaaagccctgaacctacatggacaacaccggctcccggtaaaacacaatttatttctctgaaacctaaaatccctctcagcccagaagtgacacacaccaaacctgccccagaacctcagactctactgccatcacagtcaacaataggacctgaaacaccaggaaccaaaccttcaacaacattagcaccacgaaagaccaaaagaccaggtcgtcgcccccgcccccgtccccgccctaaaaccacacctagtccagaagtgcccaagtccaaacccgctctggaacctgccacgatacaaccggagcccttggtgcccacaactgcctcaaaaccatctgagagacctaaaaccacacacagaccagatgcacctcaaattcagcctggttcaaaaccaccaaaacaattacttcctaaaccccaaaccacagcagaaccagacatgccaccaactaaatccgtctctgagcctgttccatttgaaactgaagctccctcaatgaccatagttcccaccacagacattgagcctgtaactgtgagaactgaggctacagtgacaacattagctccaaaaacatcgcaacgaacaagaacacgtcgtccacgtcccaaacataaaaccacgccacgcccagagacactgcagaccaaactagactttggacctattactcctgggacatcttcagctccaacaacaacaacaaaaagaacccgtcgtccacatcccaaacctaaaaccacgccccatccagaagtacctcaaactaaactggttcctgccacaatcctcgaaccagttcttagaactgaggcttcagggacaacagcagctcccaaagtgcctcaacgaactcatcgtccacatcccaaacctaaaaccacactgagtcccgaagagcttcagactgaactggttcctgctacaatctttgaaccagtttctcctataaaagaggctccagggacaacattcgttcctgttacagacctcgagcctgttacttttagaactgagatccctgcaacaaccttagctaccaaaacatcaaaaagaacccgccctccacgtcccagacctaaaactacaccgagccctcaggcacctgagaccaaacctgttcctgctacagtcctagaacctgtcactcttagacctgaggcctcaacaacattagcttccaaaacatcacaacggacacgtcgtccacgtctcagaacaaaaaccacaccacgtcctgaagcacctgaatccaaaccagttcctactgcggagctcaaacctgttacactcagaactgagacttgggtgacaacacaagctcctaaaacatcacaacgaactcgtcgtccacgtcccaaaactaaaaccacaccaagtcctgaggttcctcaaaccaaactggttccttctacagatcttgaacctggtactctcagaactgaagctccaaaaaccatggttgttactacagtccttgaacctgacacttttagaaccaagtttccagaaacaacgttagctcctaaaacacaacggacacgtcgtccccgtcccagacccaaaactacatcaagtcctgaagtacctcagaacaaatcggtttctgttacaggctttgaacctgttgttcatagtactgatgctccaggaacaacatttgctctgactgaactgcaaactcttattttgaaaccagtgacatcaccaagcctagaaatgacagaaagtcaacctgtttctgatgttctggaatcggttacacttagtactgagtcaccaaaggagaccatagcaccagccaaaacagactatgtatatcccactgccaaagcaccactctggccagaggagccaaagactgaagttgtggaatctattacatatgtatctgaaccacctgagaccacactagaaacgtcgcctctgccttctcaatctataaccctacccagcccagatgagcctcagactgaacctgctcccaagcagacaccacgtgctcctcctaagccaaaaacatcaccacgcccaagaatcccacaaacacaaccagttcctaaggtgccccagcgtgttactgcaaaaccaaaaacgtcaccaagtccagaagtgtcatacaccacacctgctccaaaagatgtgctccttcctcataaaccataccctgaggtctctcagagcgaacctgctcctctagagacacgaggcatcccttttatacccatgatttccccaagtcctagtcaagaggaactacagaccactctggaagaaacagaccaatccacccaagaacctttcacaactaagattccacgaacaactgaactagcaaagacaactcaggcgccacacagattttatactactgtgaggcccagaacatctgacaagccacacatcagacctgttctgaataggacaactacaagacctactaggcccaaacccagtgggatgcccagtgggaatggagtgggaacaggggtcaagcaagcacccaggccatcaggtgctgatagaaatgtatcagtggactctacccaccccactaaaaagccagggactcgccgcccacccttgccacccagacctacacacccacgaagaaaacctttaccaccaaataatgtcactggaaagccaggaagtgcaggaatcatttcatcaggcccaataactacaccacccctgaggtcaacacccaggcctactggaactcccttggagagaatagagacagatataaagcaaccaacagttcctgcctctggagaagaactggaaaatataactgactttagctcaagcccaacaagagaaactgatcctcttgggaagccaagattcaaaggacctcatgtgcgatacatccaaaagcctgacaacagtccctgctccattactgactctgtcaaacggttccccaaagaggaggccacagaggggaatgccaccagcccaccacagaacccacccaccaacctcactgtggtcaccgtggaagggtgcccctcatttgtcatcttggactgggaaaagccactaaatgacactgtcactgaatatgaagttatatccagagaaaatgggtcattcagtgggaagaacaagtccattcaaatgacaaatcagacattttccacagtagaaaatctgaaaccaaacacgagttatgaattccaggtgaaacccaaaaacccgcttggtgaaggcccggtcagcaacacagtggcattcagtactgaatcagcggacccaagagtgagtgagccagtttctgcaggaagagatgccatctggactgaaagaccctttaattcagactcttactcagagtgtaagggcaaacaatatgtcaaaaggacatggtataaaaaatttgtaggagtgcagctgtgcaactctctcagatacaagatttacttgagcgactccctcacaggaaaattttataacataggtgatcagaggggccatggagaagatcactgccagtttgtggattcatttttagatggacgcactgggcagcaactcacttctgaccagttaccaatcaaagaaggttatttcagagcagttcgccaggaacctgtccaatttggagaaataggtggtcacacccaaatcaattatgttcagtggtatgaatgtgggactacaattcctggaaaatggtagatgctgcacaaagttaccttctgtttcatcattgcaaacaaaaatcattgaaaatactatgccgcattcatttaaagctattttgtttactatgtataaaagtctacaatctaattaatagcaatactagatgtttattattagaaaagattgctgagagtatttatcaggttttacaaagtcattttaagaaagcaagatactgatgttaacagaataacatttttggggaagctggctccctattcatggtattttaagagatcatttgtatattatttatcacactgttgtaatgatgttttgagatacttttataacaaaattaacatcaaaaaggtatatactttttaaaaaaaatttacttttattgatgtgtactcttcctattgatgagttaattccataaatctctacttagtttaacttattggatcaaattatcttcagcatgtatatctggggaaaaaaggtccgaattttcacatttatatttaaacttcaattttttatatttaaacttcaattttttagcaacagctgaatagctttgcggaggagtttaatagttacacattcatgctaatatacatttcctttaaacatccacaaattcttaaaaagattgaatcagtaaatttcatttcagctaaaaatggagtctaatatattgtttcaaaagatacatttttacccaccataaatgttacaatatctgaatatgctttgtcaaactatccctttatgcaatcgtcttcatattgtttttatgattctaatcaagctgtatgtagagactgaatgtgaagtcaagtctgagcacaaaaagataatgcacgatgagattgcctaccattttataggatatttactatgtatttatacgttaagacctctatgaatgaatgtatcagagaatgtctttgtaactgtttaattcaatctgtaataaaaatctaactaactaactcatttatttctattaaaaaggtattgtcctttaggcggggaatgggaatccttgctgcactgttgcagtcattctgaaaggacctttccctgtacttacctttcaacatgcttcaatcttatcaacgctacattttgtatttttcaaacaagtataaattctgcaataaagagatgtagtttttttttaagattgagtttttgtttgttatttctgaatggttcatcagtatgttaactataccttttatcgagaaggaaaatcactaagttttattcaggctctaccaacccccattatatctactgtttgtttatgtcctaaattaacctttcatcctatgaagtaataaagttcattttaaaccaa

SEQ ID NO: 140 - DNA, 2984 bp, Homo sapiens
  source 1..2984: mol_type = unassigned DNA
ccatttaatgtatagtttatttctaggttttccttctgtgtttttagacactgaaatgcctaaatattgatttgtttattattttgtttctttatttttccagctcccggtaaaacacaatttatttctctgaaacctaaaatccctctcagcccagaagtgacacacaccaaacctgctcccaagcagacaccacgtgctcctcctaagccaaaaacatcaccacgcccaagaatcccacaaacacaaccagttcctaaggtgccccagcgtgttactgcaaaaccaaaaacgtcaccaagtccagaagtgtcatacaccacacctgctcctctagagacacgaggcatcccttttatacccatgatttccccaagtcctagtcaagaggaactacagaccactctggaagaaacagaccaatccacccaagaacctttcacaactaagattccacgaacaactgaactagcaaagacaactcaggcgccacacagattttatactactgtgaggcccagaacatctgacaagccacacatcagacctgttctgaataggacaactacaagacctactaggcccaaacccagtgggatgcccagtgggaatggagtgggaacaggggtcaagcaagcacccaggccatcaggtgctgatagaaatgtatcagtggactctacccaccccactaaaaagccagggactcgccgcccacccttgccacccagacctacacacccacgaagaaaacctttaccaccaaataatgtcactggaaagccaggaagtgcaggaatcatttcatcaggcccaataactacaccacccctgaggtcaacacccaggcctactggaactcccttggagagaatagagacagatataaagcaaccaacagttcctgcctctggagaagaactggaaaatataactgactttagctcaagcccaacaagagaaactgatcctcttgggaagccaagattcaaaggacctcatgtgcgatacatccaaaagcctgacaacagtccctgctccattactgactctgtcaaacggttccccaaagaggaggccacagaggggaatgccaccagcccaccacagaacccacccaccaacctcactgtggtcaccgtggaagggtgcccctcatttgtcatcttggactgggaaaagccactaaatgacactgtcactgaatatgaagttatatccagagaaaatgggtcattcagtgggaagaacaagtccattcaaatgacaaatcagacattttccacagtagaaaatctgaaaccaaacacgagttatgaattccaggtgaaacccaaaaacccgcttggtgaaggcccggtcagcaacacagtggcattcagtactgaatcagcggacccaagagtgagtgagccagtttctgcaggaagagatgccatctggactgaaagaccctttaattcagactcttactcagagtgtaagggcaaacaatatgtcaaaaggacatggtataaaaaatttgtaggagtgcagctgtgcaactctctcagatacaagatttacttgagcgactccctcacaggaaaattttataacataggtgatcagaggggccatggagaagatcactgccagtttgtggattcatttttagatggacgcactgggcagcaactcacttctgaccagttaccaatcaaagaaggttatttcagagcagttcgccaggaacctgtccaatttggagaaataggtggtcacacccaaatcaattatgttcagtggtatgaatgtgggactacaattcctggaaaatggtagatgctgcacaaagttaccttctgtttcatcattgcaaacaaaaatcattgaaaatactatgccgcattcatttaaagctattttgtttactatgtataaaagtctacaatctaattaatagcaatactagatgtttattattagaaaagattgctgagagtatttatcaggttttacaaagtcattttaagaaagcaagatactgatgttaacagaataacatttttggggaagctggctccctattcatggtattttaagagatcatttgtatattatttatcacactgttgtaatgatgttttgagatacttttataacaaaattaacatcaaaaaggtatatactttttaaaaaaaatttacttttattgatgtgtactcttcctattgatgagttaattccataaatctctacttagtttaacttattggatcaaattatcttcagcatgtatatctggggaaaaaaggtccgaattttcacatttatatttaaacttcaattttttatatttaaacttcaattttttagcaacagctgaatagctttgcggaggagtttaatagttacacattcatgctaatatacatttcctttaaacatccacaaattcttaaaaagattgaatcagtaaatttcatttcagctaaaaatggagtctaatatattgtttcaaaagatacatttttacccaccataaatgttacaatatctgaatatgctttgtcaaactatccctttatgcaatcgtcttcatattgtttttatgattctaatcaagctgtatgtagagactgaatgtgaagtcaagtctgagcacaaaaagataatgcacgatgagattgcctaccattttataggatatttactatgtatttatacgttaagacctctatgaatgaatgtatcagagaatgtctttgtaactgtttaattcaatctgtaataaaaatctaactaactaactcatttatttctattaaaaaggtattgtcctttaggcggggaatgggaatccttgctgcactgttgcagtcattctgaaaggacctttccctgtacttacctttcaacatgcttcaatcttatcaacgctacattttgtatttttcaaacaagtataaattctgcaataaagagatgtagtttttttttaa

SEQ ID NO: 141 - DNA, 4498 bp, Homo sapiens
  source 1..4498: mol_type = unassigned DNA
gtgagtaagcccacggcacagctaagtgcagccgcccgcctctgtcactgggagacagtccacttaaatgcagctccagggttgcgaggcacccaccagcatcattccccatgcgaggtggcaaatgcaacatgctctccagtttggggtgtctacttctctgtggaagtattacactagccctgggaaatgcacagaaattgccaaaaggtaaaaggccaaacctcaaagtccacatcaataccacaagtgactccatcctcttgaagttcttgcgtccaagtccaaatgtaaagcttgaaggtcttctcctgggatatggcagcaatgtatcaccaaaccagtacttccctcttcccgctgaagggaaattcacagaagctatagttgatgcagagccgaaatatctgatagttgtgcgacctgctccacctccaagtcaaaagaagtcatgttcaggtaaaactcgttctcgcaaacctctgcagctggtggttggcactctgacaccgagctcggtcttcctgtcctggggtttcctcatcaacccacaccatgactggacattgccaagtcactgtcccaatgacagattttatacaattcgctatcgagaaaaggataaagaaaagaagtggatttttcaaatctgtccagccactgaaacaattgtggaaaacctaaagcccaacacagtttatgaatttggagtgaaagacaatgtggaaggtggaatttggagtaagattttcaatcacaagactgttgttggaagtaaaaaagtaaatgggaaaatccaaagtacctatgaccaagaccacacagtgccagcatatgtcccaaggaaactaatcccaataacaatcatcaagcaagtgattcagaatgttactcacaaggattcagctaaatccccagaaaaagctccactgggaggagtgatactagtccaccttattattccaggtcttaatgaaactactgtaaaacttcctgcatccctaatgtttgagatttcagatgcactcaagacacaattagctaagaatgaaaccttggcattacctgccgaatctaaaacaccagaggttgaaaaaatctcagcacgacccacaacagtgactcctgaaacagttccaagaagcactaaacccactacgtctagtgcattagatgtttcagaaacaacactggcttcaagtgaaaagccatggattgtgcctacagctaaaatatctgaagattccaaagttctgcagcctcaaactgcaacttatgatgttttctcaagccctacaacatcagatgagcctgagatatcagattcctacacagcaacaagtgatcgtattctggattctatcccacctaaaacttctagaactcttgaacagccaagggcaacactggctccaagtgaaacaccatttgttcctcaaaaactggaaatctttaccagtccagaaatgcagcctacgacacctgctccccagcaaactacatctatcccttctacacctaaacgacgcccccggcccaaaccgccaagaaccaaacctgaaagaaccacaagtgccggaacaattacacctaaaatttctaaaagccctgaacctacatggacaacaccggctcccggtaaaacacaatttatttctctgaaacctaaaatccctctcagcccagaagtgacacacaccaaacctgctcccaagcagacaccacgtgctcctcctaagccaaaaacatcaccacgcccaagaatcccacaaacacaaccagttcctaaggtgccccagcgtgttactgcaaaaccaaaaacgtcaccaagtccagaagtgtcatacaccacacctgctccaaaagatgtgctccttcctcataaaccataccctgaggtctctcagagcgaacctgctcctctagagacacgaggcatcccttttatacccatgatttccccaagtcctagtcaagaggaactacagaccactctggaagaaacagaccaatccacccaagaacctttcacaactaagattccacgaacaactgaactagcaaagacaactcaggcgccacacagattttatactactgtgaggcccagaacatctgacaagccacacatcagacctggggtcaagcaagcacccaggccatcaggtgctgatagaaatgtatcagtggactctacccaccccactaaaaagccagggactcgccgcccacccttgccacccagacctacacacccacgaagaaaacctttaccaccaaataatgtcactggaaagccaggaagtgcaggaatcatttcatcaggcccaataactacaccacccctgaggtcaacacccaggcctactggaactcccttggagagaatagagacagatataaagcaaccaacagttcctgcctctggagaagaactggaaaatataactgactttagctcaagcccaacaagagaaactgatcctcttgggaagccaagattcaaaggacctcatgtgcgatacatccaaaagcctgacaacagtccctgctccattactgactctgtcaaacggttccccaaagaggaggccacagaggggaatgccaccagcccaccacagaacccacccaccaacctcactgtggtcaccgtggaagggtgcccctcatttgtcatcttggactgggaaaagccactaaatgacactgtcactgaatatgaagttatatccagagaaaatgggtcattcagtgggaagaacaagtccattcaaatgacaaatcagacattttccacagtagaaaatctgaaaccaaacacgagttatgaattccaggtgaaacccaaaaacccgcttggtgaaggcccggtcagcaacacagtggcattcagtactgaatcagcggacccaagagtgagtgagccagtttctgcaggaagagatgccatctggactgaaagaccctttaattcagactcttactcagagtgtaagggcaaacaatatgtcaaaaggacatggtataaaaaatttgtaggagtgcagctgtgcaactctctcagatacaagatttacttgagcgactccctcacaggaaaattttataacataggtgatcagaggggccatggagaagatcactgccagtttgtggattcatttttagatggacgcactgggcagcaactcacttctgaccagttaccaatcaaagaaggttatttcagagcagttcgccaggaacctgtccaatttggagaaataggtggtcacacccaaatcaattatgttcagtggtatgaatgtgggactacaattcctggaaaatggtagatgctgcacaaagttaccttctgtttcatcattgcaaacaaaaatcattgaaaatactatgccgcattcatttaaagctattttgtttactatgtataaaagtctacaatctaattaatagcaatactagatgtttattattagaaaagattgctgagagtatttatcaggttttacaaagtcattttaagaaagcaagatactgatgttaacagaataacatttttggggaagctggctccctattcatggtattttaagagatcatttgtatattatttatcacactgttgtaatgatgttttgagatacttttataacaaaattaacatcaaaaaggtatatactttttaaaaaaaatttacttttattgatgtgtactcttcctattgatgagttaattccataaatctctacttagtttaacttattggatcaaattatcttcagcatgtatatctggggaaaaaaggtccgaattttcacatttatatttaaacttcaattttttatatttaaacttcaattttttagcaacagctgaatagctttgcggaggagtttaatagttacacattcatgctaatatacatttcctttaaacatccacaaattcttaaaaagattgaatcagtaaatttcatttcagctaaaaatggagtctaatatattgtttcaaaagatacatttttacccaccataaatgttacaatatctgaatatgctttgtcaaactatccctttatgcaatcgtcttcatattgtttttatgattctaatcaagctgtatgtagagactgaatgtgaagtcaagtctgagcacaaaaagataatgcacgatgagattgcctaccattttataggatatttactatgtatttatacgttaagacctctatgaatgaatgtatcagagaatgtctttgtaactgtttaattcaatctgtaataaaaatctaactaactaactcatttatttctattaaaaaggtattgtcctttaggcggggaatgggaatccttgctgcactgttgcagtcattctgaaaggacctttccctgtacttacctttcaacatgcttcaatcttatcaacgctacattttgtatttttcaaacaagtataaattctgcaataaagagatgtagtttttttttaa

SEQ ID NO: 142 - DNA, 3650 bp, Homo sapiens
  source 1..3650: mol_type = unassigned DNA
ttatttctctgaaacctaaaatccctctcagcccagaagtgacacacaccaaacctgccccagaacctcagactctactgccatcacagtcaacaataggacctgaaacaccaggaaccaaaccttcaacaacattagctctggaacctgccacgatacaaccggagcccttggtgcccacaactgcctcaaaaccatctgagagacctaaaaccacacacagaccagatgcacctcaaattcagcctggttcaaaaccaccaaaacaattacttcctaaaccccaaaccacagcagaaccagacatgccaccaactaaatccgtctctgagcctgttccatttgaaactgaagctccctcaatgaccatagttcccaccacagacattgagcctgtaactgtgagaactgaggctacagtgacaacattagctccaaaaacatcgcaacgaacaagaacacgtcgtccacgtcccaaacataaaaccacgccacgcccagagacactgcagaccaaactagactttggacctattactcctgggacatcttcagctccaacaacaacaacaaaaagaacccgtcgtccacatcccaaacctaaaaccacgccccatccagaagtacctcaaactaaactggttcctgccacaatcctcgaaccagttcttagaactgaggcttcagggacaacagcagttcctgctacaatctttgaaccagtttctcctataaaagaggctccagggacaacattcgttcctgttacagacctcgagcctgttacttttagaactgagatccctgcaacaaccttagctaccaaaacatcaaaaagaacccgccctccacgtcccagacctaaaactacaccgagccctcaggcacctgagaccaaacctgttcctgctacagtcctagaacctgtcactcttagacctgaggcctcaacaacattagcttccaaaacatcacaacggacacgtcgtccacgtctcagaacaaaaaccacaccacgtcctgaagcacctgaatccaaaccagttcctactgcggagctcaaacctgttacactcagaactgagacttgggtgacaacacaagctcctaaaacatcacaacgaactcgtcgtccacgtcccaaaactaaaaccacaccaagtcctgaggttcctcaaaccaaactggttccttctacagatcttgaacctggtactctcagaactgaagctccaaaaaccatggttgttactacagtccttgaacctgacacttttagaaccaagtttccagaaacaacgttagctcctaaaacacaacggacacgtcgtccccgtcccagacccaaaactacatcaagtcctgaagtacctcagaacaaatcggtttctgttacaggctttgaacctgttgttcatagtactgatgctccaggaacaacatttgctctgactgaactgcaaactcttattttgaaaccagtgacatcaccaagcctagaaatgacagaaagtcaacctgtttctgatgttctggaatcggttacacttagtactgagtcaccaaaggagaccatagcaccagccaaaacagactatgtatatcccactgccaaagcaccactctggccagaggagccaaagactgaagttgtggaatctattacatatgtatctgaaccacctgagaccacactagaaacgtcgcctctgccttctcaatctataaccctacccagcccagatgagcctcagactgaacctgctcccaagcagacaccacgtgctcctcctaagccaaaaacatcaccacgcccaagaatcccacaaacacaaccagttcctaaggtgccccagcgtgttactgcaaaaccaaaaacgtcaccaagtccagaagtgtcatacaccacacctgctccaaaagatgtgctccttcctcataaaccataccctgaggtctctcagagcgaacctgctcctctagagacacgaggcatcccttttatacccatgatttccccaagtcctagtcaagaggaactacagaccactctggaagaaacagaccaatccacccaagaacctttcacaactaagattccacgaacaactgaactagcaaagacaactcaggcgccacacagattttatactactgtgaggcccagaacatctgacaagccacacatcagacctggggtcaagcaagcacccaggccatcaggtgctgatagaaatgtatcagtggactctacccaccccactaaaaagccagggactcgccgcccacccttgccacccagacctacacacccacgaagaaaacctttaccaccaaataatgtcactggaaagccaggaagtgcaggaatcatttcatcaggcccaataactacaccacccctgaggtcaacacccaggcctactggaactcccttggagagaatagagacagatataaagcaaccaacagttcctgcctctggagaagaactggaaaatataactgactttagctcaagcccaacaagagaaactgatcctcttgggaagccaagattcaaaggacctcatgtgcgatacatccaaaagcctgacaacagtccctgctccattactgactctgtcaaacggttccccaaagaggaggccacagaggggaatgccaccagcccaccacagaacccacccaccaacctcactgtggtcaccgtggaagggtgcccctcatttgtcatcttggactgggaaaagccactaaatgacactgtcactgaatatgaagttatatccagagaaaatgggtcattcagtgggaagaacaagtccattcaaatgacaaatcagacattttccacagtagaaaatctgaaaccaaacacgagttatgaattccaggtgaaacccaaaaacccgcttggtgaaggcccggtcagcaacacagtggcattcagtactgaatcagcggacccaagagtgagtgagccagtttctgcaggaagagatgccatctggactgaaagaccctttaattcagactcttactcagagtgtaagggcaaacaatatgtcaaaaggacatggtataaaaaatttgtaggagtgcagctgtgcaactctctcagatacaagatttacttgagcgactccctcacaggaaaattttataacataggtgatcagaggggccatggagaagatcactgccagtttgtggattcatttttagatggacgcactgggcagcaactcacttctgaccagttaccaatcaaagaaggttatttcagagcagttcgccaggaacctgtccaatttggagaaataggtggtcacacccaaatcaattatgttcagtggtatgaatgtgggactacaattcctggaaaatggtagatgctgcacaaagttaccttctgtttcatcattgcaaacaaaaatcattgaaaatactatgccgcattcatttaaagctattttgtttactatgtataaaagtctacaatctaattaatagcaatactagatgtttattattagaaaagattgctgagagtatttatcaggttttacaaagtcattttaagaaagcaagatactgatgttaacagaataacatttttggggaagctggctccctattcatggtat

SEQ ID NO: 143 - DNA, 2454 bp, Homo sapiens
  source 1..2454: mol_type = unassigned DNA
ctgtttattttttatgatgcagtctctgagcctgttccatttgaaactgaagctccctcaatgaccatagttcccaccacagacattgagcctgtaactgtgagaactgaggctacagtgacaacattagctccaaaaacatcgcaacgaacaagaacacgtcgtccacgtcccaaacataaaaccacgccacgcccagagacactgcagaccaaactagactttggacctattactcctgggacatcttcagctccaacaacaacaacaaaaagaacccgtcgtccacatcccaaacctaaaaccacgccccatccagaagtacctcaaactaaactggctcccaaagtgcctcaacgaactcatcgtccacatcccaaacctaaaaccacactgagtcccgaagagcttcagactgaactggttcctgttacagacctcgagcctgttacttttagaactgagatccctgcaacaaccttagctaccaaaacatcaaaaagaacccgccctccacgtcccagacctaaaactacaccgagccctcaggcacctgagaccaaacctgttcctgctacagtcctagaacctgtcactcttagacctgaggcctcaacaacattagcttccaaaacatcacaacggacacgtcgtccacgtctcagaacaaaaaccacaccacgtcctgaagcacctgaatccaaaccagctcccaagcagacaccacgtgctcctcctaagccaaaaacatcaccacgcccaagaatcccacaaacacaaccagttcctaaggtgccccagcgtgttactgcaaaaccaaaaacgtcaccaagtccagaagtgtcatacaccacacctgctccaaaagatgtgctccttcctcataaaccataccctgaggtctctcagagcgaacctgctcctctagagacacgaggcatcccttttatacccatgatttccccaagtcctagtcaagaggaactacagaccactctggaagaaacagaccaatccacccaagaacctttcacaactaagattccacgaacaactgaactagcaaagacaactcaggcgccacacagattttatactactgtgaggcccagaacatctgacaagccacacatcagacctgttctgaataggacaactacaagacctactaggcccaaacccagtgggatgcccagtgggaatggagtgggaacaggggtcaagcaagcacccaggccatcaggtgctgatagaaatgtatcagtggactctacccaccccactaaaaagccagggactcgccgcccacccttgccacccagacctacacacccacgaagaaaacctttaccaccaaataatgtcactggaaagccaggaagtgcaggaatcatttcatcaggcccaataactacaccacccctgaggtcaacacccaggcctactggaactcccttggagagaatagagacagatataaagcaaccaacagttcctgcctctggagaagaactggaaaatataactgactttagctcaagcccaacaagagaaactgatcctcttgggaagccaagattcaaaggacctcatgtgcgatacatccaaaagcctgacaacagtccctgctccattactgactctgtcaaacggttccccaaagaggaggccacagaggggaatgccaccagcccaccacagaacccacccaccaacctcactgtggtcaccgtggaagggtgcccctcatttgtcatcttggactgggaaaagccactaaatgacactgtcactgaatatgaagttatatccagagaaaatgggtcattcagtgggaagaacaagtccattcaaatgacaaatcagacattttccacagtagaaaatctgaaaccaaacacgagttatgaattccaggtgaaacccaaaaacccgcttggtgaaggcccggtcagcaacacagtggcattcagtactgaatcagcggacccaagagtgagtgagccagtttctgcaggaagagatgccatctggactgaaagaccctttaattcagactcttactcagagtgtaagggcaaacaatatgtcaaaaggacatggtataaaaaatttgtaggagtgcagctgtgcaactctctcagatacaagatttacttgagcgactccctcacaggaaaattttataacataggtgatcagaggggccatggagaagatcactgccagtttgtggattcatttttagatggacgcactgggcagcaactcacttctgaccagttaccaatcaaagaaggttatttcagagcagttcgccaggaacctgtccaatttggagaaataggtggtcacacccaaatcaattatgttcagtggtatgaatgtgggactacaattcctggaaaatggtagatgctgcacaaagttaccttctgtttcatcattgcaaac

SEQ ID NO: 144 - DNA, 618 bp, Homo sapiens
  source 1..618: mol_type = unassigned DNA
gaacaagtccattcaaatgacaaatcagacattttccacagtagaaaatctgaaaccaaacacgagttatgaattccaggtgaaacccaaaaacccgcttggtgaaggcccggtcagcaacacagtggcattcagtactgaatcagcggacccaagagtgagtgagccagtttctgcaggaagagatgccatctggactgaaagaccctttaattcagactcttactcagagtgtaagggcaaacaatatgtcaaaaggacatggtataaaaaatttgtaggagtgcagctgtgcaactctctcagatacaagatttacttgagcgactccctcacaggtaagcagagctaccagctctgttttcagcccttaacttatgggaatgttttgcagcattgtacaacttggccttttcttaagagtttcaggcacgaatgggtgctgtaaacacaagttttcctctgagcaaaatgttacggaaacagttatcattcctagaaagcaaggatttaagacatgctattagaaggtaaataataaaaatgcaattataaaacagtgccatcatgacaaactggaatgtacattcactaaccatggtcaaactccattttgtt

SEQ ID NO: 145 - DNA, 700 bp, Homo sapiens
  source 1..700: mol_type = unassigned DNA
cagcgtgttactgcaaaaccaaaaacgtcaccaagtccagaagtgtcatacaccacacctgctccaaaagatgtgctccttcctcataaaccataccctgaggtctctcagagcgaacctgctcctctagagacacgaggcatcccttttatacccatgatttccccaagtcctagtcaagaggaactacagaccactctggcgccacacagattttatactactgtgaggcccagaacatctgacaagccacacatcagacctggggtcaagcaagcacccaggccatcaggtgctgatagaaatgtatcagtggactctacccaccccactaaaaagccagggactcgccgcccacccttgccacccagacctacacacccacgaagaaaacctttaccaccaaataatgtcactggaaagccaggaagtgcaggaatcatttcatcaggcccaataactacaccacccctgaggtcaacacccaggcctactggaactcccttggagagaatagagacagatataaagcaaccaacagttcctgcctctggagaagaactggaaaatataactgactttagctcaagcccaacaagagaaactgatcctcttgggaagccaagattcaaaggacctcatgtgcgatacatccaaaagcctgacaacagtccctgctccattactgactctgtcaaac

SEQ ID NO: 146 - DNA, 543 bp, Homo sapiens
  source 1..543: mol_type = unassigned DNA
tgtatattcatctataatgaggacatgttttctatatactacagtgcgttgttgtccctggggacattaccaacatttatttataggaatatctgaatatatttgtgtgcacttttctgtagaatctattctctgtcatccaactgctaattatcaaacattattttttatttttaaaaaccctgtttttttcgataatgaatctttatgatggctttatctaaaatacaatctcttatccacaatcccagggactcgccgcccacccttgccacccagacctacacacccacgaagaaaacctttaccaccaaataatgtcactggaaagccaggaagtgcaggaatcatttcatcaggcccaataactacaccacccctgaggtcaacacccaggcctactggaactcccttggagagaatagagacagatataaagcaaccaacagttcctgcctctggagaagaactggaaaatataactgactttagctcaagcccaacaagagaaactgatcctcttgggaagccaagattcaaagg

SEQ ID NO: 147 - DNA, 566 bp, Homo sapiens
  source 1..566: mol_type = unassigned DNA
tactgcaaaaccaaaaacgtcaccaagtccagaagtgtcatacaccacacctgctcctctagagacacgaggcatcccttttatacccatgatttccccaagtcctagtcaagaggaactacagaccactctggaagaaacagaccaatccacccaagaacctttcacaactaagattccacgaacaactgaactagcaaagacaactcaggcgccacacagattttatactactgtgaggcccagaacatctgacaagccacacatcagacctgttctgaataggacaactacaagacctactaggcccaaacccagtgggatgcccagtgggaatggagtgggaacaggggtcaagcaagcacccaggccatcaggtgctgatagaaatgtatcagtggactctacccaccccactaaaaagccagggactcgccgcccacccttgccacccagacctacacacccacgaagaaaacctttaccaccaaataatgtcactggaaagccaggaagtgcaggaatcatttcatcaggcccaataactacaccacccctgaggtcaa

SEQ ID NO: 148 - DNA, 922 bp, Homo sapiens
  source 1..922: mol_type = unassigned DNA
atcccaaacctaaaaccacgccccatccagaagtacctcaaactaaactggctaccaaaacatcaaaaagaacccgccctccacgtcccagacctaaaactacaccgagccctcaggcacctgagaccaaacctgttcctgctacagtcctagaacctgtcactcttagacctgaggcctcaacaacattagcttccaaaacatcacaacggacacgtcgtccacgtctcagaacaaaaaccacaccacgtcctgaagcacctgaatccaaaccagttcctactgcggagctcaaacctgttacactcagaactgagacttgggtgacaacacaagctcccaagcagacaccacgtgctcctcctaagccaaaaacatcaccacgcccaagaatcccacaaacacaaccagttcctaaggtgccccagcgtgttactgcaaaaccaaaaacgtcaccaagtccagaagtgtcatacaccacacctgctccaaaagatgtgctccttcctcataaaccataccctgaggtctctcagagcgaacctgctcctctagagacacgaggcatcccttttatacccatgatttccccaagtcctagtcaagaggaactacagaccactctggaagaaacagaccaatccacccaagaacctttcacaactaagattccacgaacaactgaactagcaaagacaactcaggcgccacacagattttatactactgtgaggcccagaacatctgacaagccacacatcagacctgttctgaataggacaactacaagacctactaggcccaaacccagtgggatgcccagtgggaatggagtgggaacaggggtcaagcaagcacccaggccatcaggtgctgatagaaatgtatcagtggactctacccaccccactaaaaagccagg

SEQ ID NO: 149 - DNA, 453 bp, Homo sapiens
  source 1..453: mol_type = unassigned DNA
ttgtggaatctattacatatgtatctgaaccacctgagaccacactagaaacgtcgcctctgccttctcaatctataaccctacccagcccagatgagcctcagactgaacctgctcccaagcagacaccacgtgctcctcctaagccaaaaacatcaccacgcccaagaatcccacaaacacaaccagttcctaaggtgccccagcgtgttactgcaaaaccaaaaacgtcaccaagtccagaagtgtcatacaccacacctgctccaaaagatgtgctccttcctcataaaccataccctgaggtctctcagagcgaacctgttctgcagcctgttacctttagatttgagccaccaaagacaacaatagctcctctagagacacgaggcatcccttttatacccatgatttccccaagtcctagtcaagaggaactacagaccactctgg

SEQ ID NO: 150 - DNA, 475 bp, Homo sapiens
  source 1..475: mol_type = unassigned DNA
gtttctgatgttctggaatcggttacacttagtactgagtcaccaaaggagaccatagcaccagccaaaacagactatgtatatcccactgccaaagcaccactctggccagaggagccaaagactgaagttgtggaatctattacatatgtatctgaaccacctgagaccacactagaaacgtcgcctctgccttctcaatctataaccctacccagcccagatgagcctcagactgaacctgctcccaagcagacaccacgtgctcctcctaagccaaaaacatcaccacgcccaagaatcccacaaacacaaccagttcctaaggtgccccagcgtgttactgcaaaaccaaaaacgtcaccaagtccagaagtgtcatacaccacacctgctcctctagagacacgaggcatcccttttatacccatgatttccccaagtcctagtcaagaggaactacagaccactctgg

SEQ ID NO: 151 - DNA, 561 bp, Homo sapiens
  source 1..561: mol_type = unassigned DNA
ctaaaaccacgccccatccagaagtacctcaaactaaactggctcccaaagtgcctcaacgaactcatcgtccacatcccaaacctaaaaccacactgagtcccgaagagcttcagactgaactggttcctgctacaatctttgaaccagtttctcctataaaagaggctccagggacaacattcgttcctgttacagacctcgagcctgttacttttagaactgagatccctgcaacaaccttagctaccaaaacatcaaaaagaacccgccctccacgtcccagacctaaaactacaccgagccctcaggcacctgagaccaaacctgctcccaagcagacaccacgtgctcctcctaagccaaaaacatcaccacgcccaagaatcccacaaacacaaccagttcctaaggtgccccagcgtgttactgcaaaaccaaaaacgtcaccaagtccagaagtgtcatacaccacacctgctcctctagagacacgaggcatcccttttatacccatgatttccccaagtcctagtcaagaggaactacagaccactctgg

SEQ ID NO: 152 - DNA, 560 bp, Homo sapiens
  source 1..560: mol_type = unassigned DNA
atttatttctctgaaacctaaaatccctctcagcccagaagtgacacacaccaaacctgctccaaaaacatcgcaacgaacaagaacacgtcgtccacgtcccaaacataaaaccacgccacgcccagagacactgcagaccaaactagactttggacctattactcctgggacatcttcagctccaacaacaacaacaaaaagaacccgtcgtccacatcccaaacctaaaaccacgccccatccagaagtacctcaaactaaactggctcccaagcagacaccacgtgctcctcctaagccaaaaacatcaccacgcccaagaatcccacaaacacaaccagttcctaaggtgccccagcgtgttactgcaaaaccaaaaacgtcaccaagtccagaagtgtcatacaccacacctgctccaaaagatgtgctccttcctcataaaccataccctgaggtctctcagagcgaacctgctcctctagagacacgaggcatcccttttatacccatgatttccccaagtcctagtcaagaggaactacagaccactctgg

SEQ ID NO: 153 - DNA, 563 bp, Homo sapiens
  source 1..563: mol_type = unassigned DNA
ccacgaaagaccaaaagaccaggtcgtcgcccccgcccccgtccccgccctaaaaccacacctagtccagaagtgcccaagtccaaacccgctctggaacctgccacgatacaaccggagcccttggtgcccacaactgcctcaaaaccatctgagagacctaaaaccacacacagaccagatgcacctcaaattcagcctgtctctgagcctgttccatttgaaactgaagctccctcaatgaccatagttcccaccacagacattgagcctgtaactgtgagaactgaggctacagtgacaacattagctccaaaaacatcgcaacgaacaagaacacgtcgtccacgtcccaaacataaaaccacgccacgcccagagacactgcagaccaaactagactttggacctattactcctgggacatcttcagctccaacaacaacaacaaaaagaacccgtcgtccacatcccaaacctaaaaccacgccccatccagaagtacctcaaactaaactggctcccaagcagacaccacgtgctcctcctaagccaaaaacatc

SEQ ID NO: 154 - DNA, 375 bp, Homo sapiens
  source 1..375: mol_type = unassigned DNA
ctaagaatgaaaccttggcattacctgccgaatctaaaacaccagaggttgaaaaaatctcagcacgacccacaacagtgactcctgaaacagttccaagaagcactaaacccactacgtctagtgcattagatgtttcagaaacaacactggctccaaaaagccttccagaatttcctgaggcaaaaacacccttcccttttgagaaacctaggggcacattggcttcaagtgaaaagccatggattgtgcctacagctaaaatatctgaagattccaaagttctgcagcctcaaactgctctgactgaactgcaaactcttattttgaaaccagtgacatcaccaagcctagaaatgacagaaagtcaacctg

SEQ ID NO: 155 - DNA, 3714 bp, Homo sapiens
  source 1..3714: mol_type = unassigned DNA
cttaaatgcagctccagggttgcgaggcacccaccagcatcattccccatgcgaggtggcaaatgcaacatgctctccagtttggggtgtctacttctctgtggaagtattacactagccctgggaaatgcacagaaattgccaaaaggtaaaaggccaaacctcaaagtccacatcaataccacaagtgactccatcctcttgaagttcttgcgtccaagtccaaatgtaaagcttgaaggtcttctcctgggatatggcagcaatgtatcaccaaaccagtacttccctcttcccgctgaagggaaattcacagaagctatagttgatgcagagccgaaatatctgatagttgtgcgacctgctccacctccaagtcaaaagaagtcatgttcaggtaaaactcgttctcgcaaacctctgcagctggtggttggcactctgacaccgagctcggtcttcctgtcctggggtttcctcatcaacccacaccatgactggacattgccaagtcactgtcccaatgacagattttatacaattcgctatcgagaaaaggataaagaaaagaagtggatttttcaaatctgtccagccactgaaacaattgtggaaaacctaaagcccaacacagtttatgaatttggagtgaaagacaatgtggaaggtggaatttggagtaagattttcaatcacaagactgttgttggaagtaaaaaagtaaatgggaaaatccaaagtacctatgaccaagaccacacagtgccagcatatgtcccaaggaaactaatcccaataacaatcatcaagcaagtgattcagaatgttactcacaaggattcagctaaatccccagaaaaagctccactgggaggagtgatactagtccaccttattattccaggtcttaatgaaactactgtaaaacttcctgcatccctaatgtttgagatttcagatgcactcaagacacaattagctaagaatgaaaccttggcattacctgccgaatctaaaacaccagaggttgaaaaaatctcagcacgacccacaacagtgactcctgaaacagttccaagaagcactaaacccactacgtctagtgcattagatgtttcagaaacaacactggttctcagcaaaaggaccccggaaacattgcaaactattctaatacctcagtttgaattgccactgagcactctagctccaaaaagccttccagaatttcctgaggcaaaaacacccttcccttttgagaaacctaggggcacattggcttcaagtgaaaagccatggattgtgcctacagctaaaatatctgaagattccaaagttctgcagcctcaaactgcaacttatgatgttttctcaagccctacaacatcagatgagcctgagatatcagattcctacacagcaacaagtgatcgtattctggattctatcccacctaaaacttctagaactcttgaacagccaagggcaacactggctccaagtgaaacaccatttgttcctcaaaaactggaaatctttaccagtccagaaatgcagcctacgacacctgctccccagcaaactacatctatcccttctacacctaaacgacgcccccggcccaaaccgccaagaaccaaacctgaaagaaccacaagtgccggaacaattacacctaaaatttctaaaagccctgaacctacatggacaacaccggctcccggtaaaacacaatttatttctctgaaacctaaaatccctctcagcccagaagtgacacacaccaaacctgccccagaacctcagactctactgccatcacagtcaacaataggacctgaaacaccaggaaccaaaccttcaacaacattagcaccacgaaagaccaaaagaccaggtcgtcgcccccgcccccgtccccgccctaaaaccacacctagtccagaagtgcccaagtccaaacccgctctggaacctgccacgatacaaccggagcccttggtgcccacaactgcctcaaaaccatctgagagacctaaaaccacacacagaccagatgcacctcaaattcagcctggttcaaaaccaccaaaacaattacttcctaaaccccaaaccacagcagaaccagacatgccaccaactaaatccgtctctgagcctgttccatttgaaactgaagctccctcaatgaccatagttcccaccacagacattgagcctgtaactgtgagaactgaggctacagtgacaacattagctccaaaaacatcgcaacgaacaagaacacgtcgtccacgtcccaaacataaaaccacgccacgcccagagacactgcagaccaaactagactttggacctattactcctgggacatcttcagctccaacaacaacaacaaaaagaacccgtcgtccacatcccaaacctaaaaccacgccccatccagaagtacctcaaactaaactggctaccaaaacatcaaaaagaacccgccctccacgtcccagacctaaaactacaccgagccctcaggcacctgagaccaaacctgttcctgctacagtcctagaacctgtcactcttagacctgaggcctcaacaacattagcttccaaaacatcacaacggacacgtcgtccacgtctcagaacaaaaaccacaccacgtcctgaagcacctgaatccaaaccagttcctactgcggagctcaaacctgttacactcagaactgagacttgggtgacaacacaagctcctaaaacatcacaacgaactcgtcgtccacgtcccaaaactaaaaccacaccaagtcctgaggttcctcaaaccaaactggttccttctacagatcttgaacctggtactctcagaactgaagctccaaaaaccatggttgttactacagtccttgaacctgacacttttagaaccaagtttccagaaacaacgttagctcctaaaacacaacggacacgtcgtccccgtcccagacccaaaactacatcaagtcctgaagtacctcagaacaaatcgggtaaatgtatgaatccttggcttaagtagccaaggaacctgaaccctggcaggctgtcccaataaagtcctaaagaaatgcctatgacgggaagtaacagtcatcatgttttctaagaatcaaattatttaacatgggtagcaactgcttctcgtacagagctatccaggagaacatggcttggagccacttgtgtgcctgatctcctaaatgacttggtttggatgacgttcttggtccctctttaaagatgtgtttacagcgagattagcatactcatgggtatttattgctatatctgcattgaaacatgtgatccatttgttatgattacataaacaggcatttattttcaacttccaagaaaagcaacaagttactttcatatatatttctctctgtattttcgtatctgttgcctaaacaaatttccaaagccaaatatccatactagttagaaaaccaaatacctaggaaaacctcatgtggataatatcaagatatgtaacagagttcaaaggttgtaactaccttctttgatgaattgttctagctagtgtggccaaatcttccaaaagcaactatatgctgcctatcaattcaaaagttttaaaaaattgtgtatcatttgaaactcatgttttaaaataaaaattgaggattttttttaaaaagtc

SEQ ID NO: 156 - DNA, 561 bp, Homo sapiens
  source 1..561: mol_type = unassigned DNA
aaagaaccacaagtgccggaacaattacacctaaaatttctaaaagccctgaacctacatggacaacaccggctcccggtaaaacacaatttatttctctgaaacctaaaatccctctcagcccagaagtgacacacaccaaacctgttcccaccacagacattgagcctgtaactgtgagaactgaggctacagtgacaacattagctccaaaaacatcgcaacgaacaagaacacgtcgtccacgtcccaaacataaaaccacgccacgcccagagacactgcagaccaaactagactttggacctattactcctgggacatcttcagctccaacaacaacaacaaaaagaacccgtcgtccacatcccaaacctaaaaccacgccccatccagaagtacctcaaactaaactggctcccaaagtgcctcaacgaactcatcgtccacatcccaaacctaaaaccacactgagtcccgaagagcttcagactgaactggttcctgctacaatctttgaaccagtttctcctataaaagaggctccagggacaacattcg

SEQ ID NO: 157 - DNA, 527 bp, Homo sapiens
  source 1..527: mol_type = unassigned DNA
ctcacataataaataagcctatcaagaaggcaatttatattaatttagaataaactagactctgtgtcctctgaattaaacaccaatgagcacccaaaagtttagacttccttgcttttattacttatatctgtttattttttatgatgcagtctctgagcctgttccatttgaaactgaagctccctcaatgaccatagttcccaccacagacattgagcctgtaactgtgagaactgaggctacagtgacaacattagctccaaaaacatcgcaacgaacaagaacacgtcgtccacgtcccaaacataaaaccacgccacgcccagagacactgcagaccaaactagactttggacctattactcctgggacatcttcagctccaacaacaacaacaaaaagaacccgtcgtccacatcccaaacctaaaaccacgccccatccagaagtacctcaaactaaactggttcctgccacaatcctcgaaccagttcttagaactgaggcttcagggacaacagcag

SEQ ID NO: 158 - DNA, 450 bp, Homo sapiens
  source 1..450: mol_type = unassigned DNA
gacctgaaacaccaggaaccaaaccttcaacaacattagcaccacgaaagaccaaaagaccaggtcgtcgcccccgcccccgtccccgccctaaaaccacacctagtccagaagtgcccaagtccaaacccgctctggaacctgccacgatacaaccggagcccttggtgcccacaactgttcccaccacagacattgagcctgtaactgtgagaactgaggctacagtgacaacattagctccaaaaacatcgcaacgaacaagaacacgtcgtccacgtcccaaacataaaaccacgccacgcccagagacactgcagaccaaactagactttggacctattactcctgggacatcttcagctccaacaacaacaacaaaaagaacccgtcgtccacatcccaaacctaaaaccacgccccatccagaagtacctcaaactaaactgg

SEQ ID NO: 159 - DNA, 261 bp, Homo sapiens
  source 1..261: mol_type = unassigned DNA
ctcagactctactgccatcacagtcaacaataggacctgaaacaccaggaaccaaaccttcaacaacattagcaccacgaaagaccaaaagaccaggtcgtcgcccccgcccccgtccccgccctaaaaccacacctagtccagaagtgcccaagtccaaacccgctctggaacctgccacgatacaaccggagcccttggtgcccacaactgtctctgagcctgttccatttgaaactgaagctccctcaatgaccatag

SEQ ID NO: 160 - DNA, 910 bp, Homo sapiens
  source 1..910: mol_type = unassigned DNA
aaacaccagaggttgaaaaaatctcagcacgacccacaacagtgactcctgaaacagttccaagaagcactaaacccactacgtctagtgcattagatgtttcagaaacaacactggcttcaagtgaaaagccatggattgtgcctacagctaaaatatctgaagattccaaagttctgcagcctcaaactgcaacttatgatgttttctcaagccctacaacatcagatgagcctgagatatcagattcctacacagcaacaagtgatcgtattctggattctatcccacctaaaacttctagaactcttgaacagccaagggcaacactggctccaagtgaaacaccatttgttcctcaaaaactggaaatctttaccagtccagaaatgcagcctacgacacctgctccccagcaaactacatctatcccttctacacctaaacgacgcccccggcccaaaccgccaagaaccaaacctgaaagaaccacaagtgccggaacaattacacctaaaatttctaaaagccctgaacctacatggacaacaccggctcccggtaaaacacaatttatttctctgaaacctaaaatccctctcagcccagaagtgacacacaccaaacctgccccagaacctcagactctactgccatcacagtcaacaataggacctgaaacaccaggaaccaaaccttcaacaacattagcaccacgaaagaccaaaagaccaggtcgtcgcccccgcccccgtccccgccctaaaaccacacctagtccagaagtgcccaagtccaaacccgctctggaacctgccacgatacaaccggagcccttggtgcccacaactgcctcaaaaccatctgagagacctaaaaccacacacagaccagatgcacctcaaattca

SEQ ID NO: 161 - DNA, 251 bp, Homo sapiens
  source 1..251: mol_type = unassigned DNA
ttttgagaaacctaggggcacattggcttcaagtgaaaagccatggattgtgcctacagctaaaatatctgaagattccaaagttctgcagcctcaaactgcaacaagtgatcgtattctggattctatcccacctaaaacttctagaactcttgaacagccaagggcaacactggctccaagtgaaacaccatttgttcctcaaaaactggaaatctttaccagtccagaaatgcagcctacgacacctg

SEQ ID NO: 162 - DNA, 560 bp, Homo sapiens
  source 1..560: mol_type = unassigned DNA
aaatgggaaaatccaaagtacctatgaccaagaccacacagtgccagcatatgtcccaaggaaactaatcccaataacaatcatcaagcaagtgattcagaatgttactcacaaggattcagctaaatccccagaaaaagctccactgggaggagtgatactagtccaccttattattccaggtcttaatgaaactactgtaaaacttcctgcatccctaatgtttgagatttcagatgcactcaagacacaattagctaagaatgaaaccttggcattacctgccgaatctaaaacaccagaggttgaaaaaatctcagcacgacccacaacagtgactcctgaaacagttccaagaagcactaaacccactacgtctagtgcattagatgtttcagaaacaacactggttctcagcaaaaggaccccggaaacattgcaaactattctaatacctcagtttgaattgccactgagcactctagcttcaagtgaaaagccatggattgtgcctacagctaaaatatctgaagattccaaagttctgcagcctcaaactg

SEQ ID NO: 163 - DNA, 3544 bp, Homo sapiens
  source 1..3544: mol_type = unassigned DNA
aaatgcagctccagggttgcgaggcacccaccagcatcattccccatgcgaggtggcaaatgcaacatgctctccagtttggggtgtctacttctctgtggaagtattacactagccctgggaaatgcacagaaattgccaaaaggtaaaaggccaaacctcaaagtccacatcaataccacaagtgactccatcctcttgaagttcttgcgtccaagtccaaatgtaaagcttgaaggtcttctcctgggatatggcagcaatgtatcaccaaaccagtacttccctcttcccgctgaagggaaattcacagaagctatagttgatgcagagccgaaatatctgatagttgtgcgacctgctccacctccaagtcaaaagaagtcatgttcaggtaaaactcgttctcgcaaacctctgcagctggtggttggcactctgacaccgagctcggtcttcctgtcctggggtttcctcatcaacccacaccatgactggacattgccaagtcactgtcccaatgacagattttatacaattcgctatcgagaaaaggataaagaaaagaagtggatttttcaaatctgtccagccactgaaacaattgtggaaaacctaaagcccaacacagtttatgaatttggagtgaaagacaatgtggaaggtggaatttggagtaagattttcaatcacaagactgttgttggaagtaaaaaagtaaatgggaaaatccaaagtacctatgaccaagaccacacagtgccagcatatgtcccaaggaaactaatcccaataacaatcatcaagcaagtgattcagaatgttactcacaaggattcagctaaatccccagaaaaagctccactgggaggagtgatactagtccaccttattattccaggtcttaatgaaactactgtaaaacttcctgcatccctaatgtttgagatttcagatgcactcaagacacaattagctaagaatgaaaccttggcattacctgccgaatctaaaacaccagaggttgaaaaaatctcagcacgacccacaacagtgactcctgaaacagttccaagaagcactaaacccactacgtctagtgcattagatgtttcagaaacaacactgggtaattctaagaactttttttttttctaaaaaaacaaaagtaacaacgaaataactcccaggactcacagaaaagaaacctggtgccttaacttctctctccctccccactttctccttttccttccttcctggcagtggttaaccttcctctttcttggacagattccactgaagagttaaccacatggctgatcctggtgactgaacttctgggcaaatctggatgctaattgctaactaaatgccctttttaaccagtctctgggttatacagacagaataccagccttttaactcccaaatcttgggggagaatgaaggaaacctggaagtcttgactctgtgctttctgcttagagtggctttgggaagtcttgtgcatactaaatttgggaagaatccccaaaagtgtcatgcttttaaacaagaatttcatggcacccatgtttgttgtttcttagcccaagagaatctaacttgctttgttgttctctttcccctgaagaaaaggagcagcatgtgttttgttctgtaatttgatgttgatcttctcagccacaccactgccctttgaatgtacaccttcatattttaacagctatgtaacttttccagggaaggttatttccattaaaggtattggctgctctgtgtgcaagagtctgttacaaagcttgctgtgcatgatcatggttaagccacaacatcaaaacccaagtccaggagttgctaactgcactcttttttattgtagttctcagcaaaaggaccccggaaacattgcaaactattctaatacctcagtttgaattgccactgagcactctaggtaaaaaataataaatactgcagctttattattaccttggatattgtatgcatgcttcaaagaagtcttttgaattaattacgctaatttatacccaatcccttaaaggtgacacagtcttcaagtttaggatcccaaagaggctctccctatgacaaattgtttggttgggttgtttttcttttaagtggtcatattttaatattatgtttgattcttttaattcagaatcaatatgtcactgaacaaattgatcatttctgtattttttgtaaatgtgtttactctattgtctctcttaacagagaagatatatttatgatatttctgcagactgcttcttataattcttagaattcttctgagtgaagtatgagaaaaatgagggcagggtgcagcggctcatgcctgtaagcccaacactttgggaggctgaggcaggtggattgcctgaggtcagtagttcaagaccaccctggccaacctggtgaaaccccgtctctattaaaaatacaaaaattagactggcatggtggcatgcgcctgtaatcccagctacccaggaggctgagacaggagaatcgcttgaacccaggaggtggaggttgcagtgagccaagatcgtgccacgcactgcaacctgggtgacagagcgagactccatctcaaaaaaaaaaaagaggttgggggaggagcttacatataaagccacgtagttaccaaaactctatttttaaaagctttcagatggacattttctagttcagatgtgtttgcttggtttaaatttaaatgaaatatatttaagaacacacataaacatagctgaagaaatcagcaaactggtttaataagggtggaaagaagagtccaaatacagtagcttaaatttagtcacttaactataaaaaactgaaaaagaaactttcttatattcaacattgaaacatagatgtaagaaatactactaatggtctcttaacatgatttgcctttttgtgtttgcttttgtttttgcaagcttaaaattttaaaaatctttcctgttactttcacctcaggtcgtaactttctttatgtgtttcattacagctccaaaaagccttccagaatttcctgaggcaaaaacacccttcccttttgagaaacctaggggcacattgggtaataagagtaccttaaatttaatattaaggctgtgggtggtgattgcttaattctgcaggacacatttactgcatcttatttctggaaacctcatgaactgatagttaggcaaacaaatggttgatttgatttttttttaataaatctatttggattttctgcaaattcggtaaaacccatcagtcttaattccacataatccacttagctttttgtccttaaaaatgctgacagtctgacaccaaactctggtctctctctgaccactaatcaaatgttctctggatggatacatactgatttcttactgatatataatgactttttattgtattggtatactgcaggcttctggtagccacttaaccataccagcaacctatttctgtctcgttctcctgttaaaaaaaaaaaaaa

SEQ ID NO: 164 - DNA, 573 bp, Homo sapiens
  source 1..573: mol_type = unassigned DNA
tgcattgttgttctgtggtacggctggctgcacttttatgcagagccgaaatatctgatagttgtgcgacctgctccacctccaagtcaaaagaagtcatgttcaggtaaaactcgttctcgcaaacctctgcagctggtggttggcactctgacaccgagctcggtcttcctgtcctggggtttcctcatcaacccacaccatgactggacattgccaagtcactgtcccaatgacagattttatacaattcgctatcgagaaaaggataaagaaaagaagtggatttttcaaatctgtccagccactgaaacaattgtggaaaacctaaagcccaacacagtttatgaatttggagtgaaagacaatgtggaaggtggaatttggagtaagattttcaatcacaagactgttgttggaagtaaaaaagtaaatgggaaaatccaaagtacctatgaccaagaccacacagtgccagcatatgtcccaaggaaactaatcccaataacaatcatcaagcaagtgattcagaatgttactcacaaggattcagctaaatccccagaaaaagct

SEQ ID NO: 165 - DNA, 571 bp, Homo sapiens
  source 1..571: mol_type = unassigned DNA
aagtgcagccgcccgcctctgtcactgggagacagtccacttaaatgcagctccagggttgcgaggcacccaccagcatcattccccatgcgaggtggcaaatgcaacatgctctccagtttggggtgtctacttctctgtggaagtattacactagccctgggaaatgcacagaaattgccaaaagatgcagagccgaaatatctgatagttgtgcgacctgctccacctccaagtcaaaagaagtcatgttcaggtaaaactcgttctcgcaaacctctgcagctggtggttggcactctgacaccgagctcggtcttcctgtcctggggtttcctcatcaacccacaccatgactggacattgccaagtcactgtcccaatgacagattttatacaattcgctatcgagaaaaggataaagaaaagaagtggatttttcaaatctgtccagccactgaaacaattgtggaaaacctaaagcccaacacagtttatgaatttggagtgaaagacaatgtggaaggtggaatttggagtaagattttcaatcacaagactgttgttggaa

SEQ ID NO: 166 - DNA, 553 bp, Homo sapiens
  source 1..553: mol_type = unassigned DNA
accagcatcattccccatgcgaggtggcaaatgcaacatgctctccagtttggggtgtctacttctctgtggaagtattacactagccctgggaaatgcacagaaattgccaaaagcaaataaaaggactgaactagtgatacagcatggatggatgagtctcataaaaatgatgctgaatgaaagaagccaggtgtgaagagaacatgtcatgtaaaaggccaaacctcaaagtccacatcaataccacaagtgactccatcctcttgaagttcttgcgtccaagtccaaatgtaaagcttgaaggtcttctcctgggatatggcagcaatgtatcaccaaaccagtacttccctcttcccgctgaagggaaattcacagaagctatagttgatgcagagccgaaatatctgatagttgtgcgacctgctccacctccaagtcaaaagaagtcatgttcaggtaaaactcgttctcgcaaacctctgcagctggtggttggcactctgacaccgagctcggtcttcctgtcctggggtttcctcatcaaccc

SEQ ID NO: 167 - DNA, 586 bp, Homo sapiens
  source 1..586: mol_type = unassigned DNA
atggcaaattagctttttcatgtgcaactggattgatttgctagtattttgttgaggatttctgcatctatgttcatcagggatattggcctgaagttttcttttttcattgtgtttctgccaggttttggtattagaatgatactggcctcatagaatgagttatggaggagtccctcctcctcaattttttggggaataatttcagtaggattggtaccagttcatctttataggtggaatttggctgtgaatctctctggctcagggccttttcaggtaaaaggccaaacctcaaagtccacatcaataccacaagtgactccatcctcttgaagttcttgcgtccaagtccaaatgtaaagcttgaaggtcttctcctgggatatggcagcaatgtatcaccaaaccagtacttccctcttcccgctgaagggaaattcacagaagctatagttgatgcagagccgaaatatctgatagttgtgcgacctgctccacctccaagtcaaaagaagtcatgttcaggtaaaactcgttctcgcaaacctctgcagctggtggttggcactctgacaccgagctc

SEQ ID NO: 168 - DNA, 6841 bp, Homo sapiens
  source 1..6841: mol_type = unassigned DNA
aaagcgaggagaggaggcgtgagagagcgtgcctgcccgccgcacacggggctggtttccggagtgcgtctctagagggatgcacgttgccttagccgagcttcggagagaagcctgatatgtaacccaggcaggtgggagcctcagtctgtcgggctgaggtctggcatctacaaagcctcttggccgtgttctgaacttgaagcctggaggagttctctgctcagcacagccaaggaacagaattagaagaaaaggaaccctggcctgaggcaggtgacaaacattaccaccccagctgtgcacgatgcagcagatgcaaccagatgttcacagaaggagaggaaatgtatcttcaaggctccaccgtttggcatcccgactgtaagcaatctacgaagaccgaggaaaagctgcggctgccaaacattcggcgttcttcatccgatttcttttattccaaaagtctgattcgacgcacaggacggtctccgtctctgcagcctaccaggacatcctcggaaagtatttattctaggccaggctccagtattcctggctcaccaggtcatactatctatgcaaaagtagacaatgagatcctggattacaaggatttagcagccattccgaaggtcaaggcaatttatgacattgaacgtccagatcttattacctatgagcctttctacacttcgggctatgatgacaaacaggagagacagagccttggagagtctccgaggactttgtctcctactccatcagcagaagggtaccaggatgttcgggatcggatgatccatcggtccacgagccagggctccatcaactcccctgtgtacagccgccacagctacactccaaccacgtcccgctctccccagcatttccacagacctgatcaaggaatcaacatttaccgaaagccacccatctacaaacagcatgctgccttggcagcccagagcaagtcctcagaagatatcatcaagttttccaagttcccagcagcccaggcaccagaccccagcgagacaccaaagattgagacggaccactggcctggtcccccctcatttgctgtcgtaggacctgacatgaaacgcagatctagtggcagagaggaagatgatgaggaacttctgagacgtcggcagcttcaagaagagcaattaatgaagcttaactcaggcctgggacagttgatcttgaaagaagagatggagaaagagagccgggaaaggtcatctctgttagccagtcgctacgattctcccatcaactcagcttcacatattccatcatctaaaactgcatctctccctggctatggaagaaatgggcttcaccggcctgtttctaccgacttcgctcagtataacagctatggggatgtcagcgggggagtgcgagattaccagacactcccagatggccacatgcctgcaatgagaatggaccgaggagtgtctatgcccaacatgttggaaccaaagatatttccatatgaaatgctcatggtgaccaacagagggcgaaacaaaatcctcagagaggtggacagaaccaggctggagcgccacttagcccctgaagtgtttcgggaaatctttggaatgtccatacaggagtttgacaggttacctctttggagacgcaacgacatgaagaaaaaagcaaaactcttctaagtcccactcgtgaatggcaattagagaaaggactgacagtggcggtgccccataggatgtcatattgaggcccaaacttgattggagaatttgcaaactaccgtcgctcagcaacaccaaaaagagaaagtctggttaaaacaccatgagtcaaatgtcgggccagccaacagtaacacttgccaagaagcatggcgtagaaatttctatgttccgaaacacagagtagtgtccacatgtgagcttttcacattaccttatgtatacaacaggagctgcgttgttttcttctttttcttttcctttatctgttgtccaacaacagtgctgactgtccggataagagctggcaagtgcccttaggatgccgcatgggaaaaatcggttatcataatttcaaagtataaatatatttattaagtagcgctgcggctaagaaggaagagtgaggggtctgtccatggggtggcagtgatttcacacccgcctttcttgaatggcttcgtgttactcagccgtgccctggcaggaatggaactccatcagggaacagggcagctctgtttgaatggggtgaaaaacagcaaaattaattcttagcaagctccttgttctctactgttcaccgggacctggctggcaaatgacttagctattagtatatttaaaaactgttcaaaagcaaaagagaaggaacaggaatgaaaggaaaccttcccttaactctttctgcttcccatagcaggtctggttcctgctccccgcctaggacaggagctgtctggagctccacctttgcaaagaaaggaaaaacacaaattgcccccagattggcccagtggcatgccattaggtgattttgcataggggccatatcattcatggccaaaaaaaaccaaaaagcaaaaaacaaaaacaagtcccatgtcctactgactctagttcttccagtcgttatcctctgctgtctctctggcatcctatgaatcagatcaagcccatgctgttgttggtttttaaggtttctttcaataataggctaaggaaagacatgtttttctcttttaaatctctgcaactccaaagtagactccttcgaacgtatttaatttggccttttcagctttcttcttgcccagctctgtcgaattcatgggtgtgtgtgcacatgttggtttcactcacccagagtaattttgtgagcatgcatgtgctttttaatttctgcttgaatgtttgtcctgctgtgttgcagcttctaaagacattgtcaccgagtgtgtgtgactcaaagatcaagagtgaggctaaactgcgaccccaacatcacttccttcatggaaaggtgttggcgctgatgtagctcatggaaggatcagactgggaaccacagaggaaggatgaggtgggatgtggaggtcagagcatctcacgagagtccctcaggctctgcaacactagattcgaatatgagcctagggtttccccaacacgtgcgtgcatatgaaaccacatcatgattcccgacgtgagttagatgagggagagtttgtgtaactccacacccaggagggtaagccactttattatcatgctttggggctgtgcttaagaatttaagctctgttttaaagccgaagaagaaaacatttgaatttaccttcatatgccactaagaacaaaagctctgaagttcttcctgctggcaccaaatattaggattacaagctgtctctctgacaccagtggtaaaaaagcaagtagaatagtttctgagtctgtgttgcagcctctgacacgtggctcaccgctgtcatttgggggatggaatgaacagtcactgttctatagcatcctcctgtgctcttacctaaggaatctaaattgtcctagccttccattgctatgcactgaatgaggactactctcgtgtgtgtgtgtgtgtgtgtgtgtgtgtgtgtgtgtgtgtgtgtgtgtgttggatctactaacatgtttagcaaatggctctgacagggtggccatgagcagatgagaccagctcttgcttggttggaagccacactgcagtttgcagtttagcctttggtgtctcagtggcttcttgcttattccatgctttttctatcccatcctctctctgtgccctcctgcaatggcagccttggcacaatgcctgggtgtcctcatccttgctttactctggaaagtgtggggatggagaggatggtgcatttccagtgcttccttacctgtcaataacaatggtggccacctgggtcccagcacttggctggtggagagatttttttcattatggagctaataaagggtccctacgttttacattgattaatgaattatcacccagacatgtgcagatgaaatgtcaatataagaaaaatcaaggtatttgggaaacatgggcataatcaggtagttttgctaaaattcctcttccttggtctacataaagaagacatgggtctgtcatagaatggggacattagactgaaaactgggacaacccccttccttattttatagagactaggagttaaggggcctgcctaagattgcagtgataaagaactgaaccctaaatcagctcccactaatgaaaccctgctttccttgtatcttttaaactcagttctgcatccaacttgagaagaaaaaaagcttctttccatatcaagtaccatatgagttcatttaaactgcaccttgcagaaatgcattgccagaaagcaccagtagcctcctatctgcaagcagagtagtgctctgctctggggaggggtcattggaaaccataatgcagagtgggccccctactccatttcccagcaaaaggctccagctggagggatgggttgtggggcaacctggttcctgctaactgccagattgaatgtgtgggctagaatgcctgcacatttagttaaactgggctcagcatgcttgtcctcaaaatgtccatcctggtcacagcacacaagatggctattggtctgcttttaccctaccctgtactatacatgaaaattccagttattaacacactcaaactggtggagcttgttcaccctaggaaggggattgtatatatggcaggcttccctggtgccgatgtaaagggctacatttgggaacatttgacttccttgggactcttaagtgcataatgatggcatgaagtaaaaggggcctcaatgatgataggaaaatcagttcttttaaaatttcttcaagaaaatccaggctatcacatagtctttctgtgtgacttattaggagataggaagagcattgggaaacttgcacagctagctatgcatctacattttggtttggggttagttatgaaatgttcttaatatgacgtgttcaataacttcacataaacttcctgttctccaaaacctcaaagagatagagttaatgagttgttgtttttttttaaatgggggtagttttctatctgtcatgggctctagcatctactccgctacccaattctgtcatctccaagctgagtttcctcttctgaggcagaggctggagcagttctttttcagttctcatcctctccatcccaatccagtatatcaatcaactctaactcggagacgtctagctggcaatgtttctaaaactttcactggatttctttagacattgaagcaaacatttttttctaagaattgcttctcagatgatgatatcaaatgtatatgcttttgcaagtttgaaaagttcaaattaaccacttttgactaggtaagtctttctaaaaaccatttaaagctaactgggtcttagcatcctcctgtgtatggaagagacaggtgaccgctccaggttgggtgctcacagaacccttttcctgactctcatggaagatggtggaaggaaaatagactgtctcatcaaccctcctgtgtcctctgaagcaatctcagtttttattaaccacctcttctgtgtttctggtagctatttaacctgtatttaatctgtacttcctatgccagcctcaattttatttgatttttacaattattctcttctaaccaatgaagtgtttgtcagtatgccccaaagcttgctcttttgtgctcccttttgaataactttctatccagaaaaagagattatttgggacttgagatttgcagtgataccaacttatagcaatgatgtactttaagggaactacccaactatgttgtgatagaagaaagagaaaccttcactttggcatttttttttaatcactgtttatttttctgtttgcggcccaggaagcagtgggaggtggtggcagatatgctttgcatatggattgttatgtttttatttgggcaagtttaatcatggaaaactcaaaaagaaggggggaaatggtcagtttaagccaaaagaaactttctaaacaatgtataggtacacagcaaaattaaacaaatccaacaatttctgaagcttagtgtaattgagtggtggttgttattcaataaaattattcccaaaagtgtttctcctaagagtgcagttcccatgagtcacttcctgaacccattgaccaaaggtggacagagacaatcctgtagaccttgacattcagaaagatgtgagctgcttactgatcatatatgcatacgtttctttacagcagaggaaaccattgtccacaaaactgatgttcttttggggttttatgtacagacttgtccaatcatgtgtgtggttcctgcgagttgctgatgactccgcattgaagctctctgagttctttgattttaagttgggtttatggaattttttcaaatgttggaaggtgtgtggttcttcctgccctccctccccttttggaaatatgaaagcaaatgtttagaagaattccttttgaaaagctgtgtcgtgttccctgtgaaactgagcaggtgtgtgttggcgcgctaagtgccacatgcttgtgtgtagaggaggaggtggccctgccggctccgcgctgctgtgcctgtgatccctacctgctccccgctcctgttgccagcagcactcactgcactcctttgtcatatactctgcatcactgtcatactcacaacttcgtgaataaagttgtgtgctttattcgt

SEQ ID NO: 169 - DNA, 7408 bp, Homo sapiens
  source 1..7408: mol_type = unassigned DNA
ctgggaggagagccagggccccagcctctcctttgaggagtgttgcagcctttctgtgtgccagatgcctagtgaagaaaagctgaaaccctggagctttgtgcatgttaatgaccttggaaatgactgagctcacggaccctcatcacaccatgggagactacaaagtggcccaccctcaggaccctcaccacccatcagagaagcctgtcattcactgccataaatgtggggagccttgcaagggtgaagtgcttcgggtccagaccaaacatttccacatcaagtgtttcacctgcaaagtgtgtggctgtgacctggcacaagggggcttcttcataaagaacggagagtatctctgcaccctggactaccagcggatgtacgggacacgctgccatggctgtggggagttcgtggagggcgaagtggtgactgctctgggcaagacctaccatcccaattgctttgcttgtactatctgcaagcgcccgtttccacccggagaccgagtcacattcaatgggagagactgcctttgtcaactctgtgcacagccgatgtcgtccagtccgaaagaaaccaccttctccagcaattgtgccggctgcggaagagatatcaagaatgggcaggcgctgctggcgctggataagcagtggcacttggggtgctttaaatgcaagtcctgcgggaaggtcctcaccggggagtacatcagcaaggatggtgctccgtactgtgaaaaggactaccagggactctttggggtgaaatgtgaggcgtgtcaccagtttatcacagggaaagtcctggaggcaggtgacaaacattaccaccccagctgtgcacgatgcagcagatgcaaccagatgttcacagaaggagaggaaatgtatcttcaaggctccaccgtttggcatcccgactgtaagcaatctacgaagaccgaggaaaagctgcggcctaccaggacatcctcggaaagtatttattctaggccaggctccagtattcctggctcaccaggtcatactatctatgcaaaagtagacaatgagatcctggattacaaggatttagcagccattccgaaggtcaaggcaatttatgacattgaacgtccagatcttattacctatgagcctttctacacttcgggctatgatgacaaacaggagagacagagccttggagagtctccgaggactttgtctcctactccatcagcagaagggtaccaggatgttcgggatcggatgatccatcggtccacgagccagggctccatcaactcccctgtgtacagccgccacagctacactccaaccacgtcccgctctccccagcatttccacagacctggcaatgagccgtccagcggccggaactcccctctcccttaccggccagacagccgccctctaactccaacttacgctcaggcccctaaacatttccatgttccagatcaaggaatcaacatttaccgaaagccacccatctacaaacagcatgctgccttggcagcccagagcaagtcctcagaagatatcatcaagttttccaagttcccagcagcccaggcaccagaccccagcgagacaccaaagattgagacggaccactggcctggtcccccctcatttgctgtcgtaggacctgacatgaaacgcagatctagtggcagagaggaagatgatgaggaacttctgagacgtcggcagcttcaagaagagcaattaatgaagcttaactcaggcctgggacagttgatcttgaaagaagagatggagaaagagagccgggaaaggtcatctctgttagccagtcgctacgattctcccatcaactcagcttcacatattccatcatctaaaactgcatctctccctggctatggaagaaatgggcttcaccggcctgtttctaccgacttcgctcagtataacagctatggggatgtcagcgggggagtgcgagattaccagacactcccagatggccacatgcctgcaatgagaatggaccgaggagtgtctatgcccaacatgttggaaccaaagatatttccatatgaaatgctcatggtgaccaacagagggcgaaacaaaatcctcagagaggtggacagaaccaggctggagcgccacttagcccctgaagtgtttcgggaaatctttggaatgtccatacaggagtttgacaggttacctctttggagacgcaacgacatgaagaaaaaagcaaaactcttctaagtcccactcgtgaatggcaattagagaaaggactgacagtggcggtgccccataggatgtcatattgaggcccaaacttgattggagaatttgcaaactaccgtcgctcagcaacaccaaaaagagaaagtctggttaaaacaccatgagtcaaatgtcgggccagccaacagtaacacttgccaagaagcatggcgtagaaatttctatgttccgaaacacagagtagtgtccacatgtgagcttttcacattaccttatgtatacaacaggagctgcgttgttttcttctttttcttttcctttatctgttgtccaacaacagtgctgactgtccggataagagctggcaagtgcccttaggatgccgcatgggaaaaatcggttatcataatttcaaagtataaatatatttattaagtagcgctgcggctaagaaggaagagtgaggggtctgtccatggggtggcagtgatttcacacccgcctttcttgaatggcttcgtgttactcagccgtgccctggcaggaatggaactccatcagggaacagggcagctctgtttgaatggggtgaaaaacagcaaaattaattcttagcaagctccttgttctctactgttcaccgggacctggctggcaaatgacttagctattagtatatttaaaaactgttcaaaagcaaaagagaaggaacaggaatgaaaggaaaccttcccttaactctttctgcttcccatagcaggtctggttcctgctccccgcctaggacaggagctgtctggagctccacctttgcaaagaaaggaaaaacacaaattgcccccagattggcccagtggcatgccattaggtgattttgcataggggccatatcattcatggccaaaaaaaaccaaaaagcaaaaaacaaaaacaagtcccatgtcctactgactctagttcttccagtcgttatcctctgctgtctctctggcatcctatgaatcagatcaagcccatgctgttgttggtttttaaggtttctttcaataataggctaaggaaagacatgtttttctcttttaaatctctgcaactccaaagtagactccttcgaacgtatttaatttggccttttcagctttcttcttgcccagctctgtcgaattcatgggtgtgtgtgcacatgttggtttcactcacccagagtaattttgtgagcatgcatgtgctttttaatttctgcttgaatgtttgtcctgctgtgttgcagcttctaaagacattgtcaccgagtgtgtgtgactcaaagatcaagagtgaggctaaactgcgaccccaacatcacttccttcatggaaaggtgttggcgctgatgtagctcatggaaggatcagactgggaaccacagaggaaggatgaggtgggatgtggaggtcagagcatctcacgagagtccctcaggctctgcaacactagattcgaatatgagcctagggtttccccaacacgtgcgtgcatatgaaaccacatcatgattcccgacgtgagttagatgagggagagtttgtgtaactccacacccaggagggtaagccactttattatcatgctttggggctgtgcttaagaatttaagctctgttttaaagccgaagaagaaaacatttgaatttaccttcatatgccactaagaacaaaagctctgaagttcttcctgctggcaccaaatattaggattacaagctgtctctctgacaccagtggtaaaaaagcaagtagaatagtttctgagtctgtgttgcagcctctgacacgtggctcaccgctgtcatttgggggatggaatgaacagtcactgttctatagcatcctcctgtgctcttacctaaggaatctaaattgtcctagccttccattgctatgcactgaatgaggactactctcgtgtgtgtgtgtgtgtgtgtgtgtgtgtgtgtgtgtgtgtgtgtgtgtgttggatctactaacatgtttagcaaatggctctgacagggtggccatgagcagatgagaccagctcttgcttggttggaagccacactgcagtttgcagtttagcctttggtgtctcagtggcttcttgcttattccatgctttttctatcccatcctctctctgtgccctcctgcaatggcagccttggcacaatgcctgggtgtcctcatccttgctttactctggaaagtgtggggatggagaggatggtgcatttccagtgcttccttacctgtcaataacaatggtggccacctgggtcccagcacttggctggtggagagatttttttcattatggagctaataaagggtccctacgttttacattgattaatgaattatcacccagacatgtgcagatgaaatgtcaatataagaaaaatcaaggtatttgggaaacatgggcataatcaggtagttttgctaaaattcctcttccttggtctacataaagaagacatgggtctgtcatagaatggggacattagactgaaaactgggacaacccccttccttattttatagagactaggagttaaggggcctgcctaagattgcagtgataaagaactgaaccctaaatcagctcccactaatgaaaccctgctttccttgtatcttttaaactcagttctgcatccaacttgagaagaaaaaaagcttctttccatatcaagtaccatatgagttcatttaaactgcaccttgcagaaatgcattgccagaaagcaccagtagcctcctatctgcaagcagagtagtgctctgctctggggaggggtcattggaaaccataatgcagagtgggccccctactccatttcccagcaaaaggctccagctggagggatgggttgtggggcaacctggttcctgctaactgccagattgaatgtgtgggctagaatgcctgcacatttagttaaactgggctcagcatgcttgtcctcaaaatgtccatcctggtcacagcacacaagatggctattggtctgcttttaccctaccctgtactatacatgaaaattccagttattaacacactcaaactggtggagcttgttcaccctaggaaggggattgtatatatggcaggcttccctggtgccgatgtaaagggctacatttgggaacatttgacttccttgggactcttaagtgcataatgatggcatgaagtaaaaggggcctcaatgatgataggaaaatcagttcttttaaaatttcttcaagaaaatccaggctatcacatagtctttctgtgtgacttattaggagataggaagagcattgggaaacttgcacagctagctatgcatctacattttggtttggggttagttatgaaatgttcttaatatgacgtgttcaataacttcacataaacttcctgttctccaaaacctcaaagagatagagttaatgagttgttgtttttttttaaatgggggtagttttctatctgtcatgggctctagcatctactccgctacccaattctgtcatctccaagctgagtttcctcttctgaggcagaggctggagcagttctttttcagttctcatcctctccatcccaatccagtatatcaatcaactctaactcggagacgtctagctggcaatgtttctaaaactttcactggatttctttagacattgaagcaaacatttttttctaagaattgcttctcagatgatgatatcaaatgtatatgcttttgcaagtttgaaaagttcaaattaaccacttttgactaggtaagtctttctaaaaaccatttaaagctaactgggtcttagcatcctcctgtgtatggaagagacaggtgaccgctccaggttgggtgctcacagaacccttttcctgactctcatggaagatggtggaaggaaaatagactgtctcatcaaccctcctgtgtcctctgaagcaatctcagtttttattaaccacctcttctgtgtttctggtagctatttaacctgtatttaatctgtacttcctatgccagcctcaattttatttgatttttacaattattctcttctaaccaatgaagtgtttgtcagtatgccccaaagcttgctcttttgtgctcccttttgaataactttctatccagaaaaagagattatttgggacttgagatttgcagtgataccaacttatagcaatgatgtactttaagggaactacccaactatgttgtgatagaagaaagagaaaccttcactttggcatttttttttaatcactgtttatttttctgtttgcggcccaggaagcagtgggaggtggtggcagatatgctttgcatatggattgttatgtttttatttgggcaagtttaatcatggaaaactcaaaaagaaggggggaaatggtcagtttaagccaaaagaaactttctaaacaatgtataggtacacagcaaaattaaacaaatccaacaatttctgaagcttagtgtaattgagtggtggttgttattcaataaaattattcccaaaagtgtttctcctaagagtgcagttcccatgagtcacttcctgaacccattgaccaaaggtggacagagacaatcctgtagaccttgacattcagaaagatgtgagctgcttactgatcatatatgcatacgtttctttacagcagaggaaaccattgtccacaaaactgatgttcttttggggttttatgtacagacttgtccaatcatgtgtgtggttcctgcgagttgctgatgactccgcattgaagctctctgagttctttgattttaagttgggtttatggaattttttcaaatgttggaaggtgtgtggttcttcctgccctccctccccttttggaaatatgaaagcaaatgtttagaagaattccttttgaaaagctgtgtcgtgttccctgtgaaactgagcaggtgtgtgttggcgcgctaagtgccacatgcttgtgtgtagaggaggaggtggccctgccggctccgcgctgctgtgcctgtgatccctacctgctccccgctcctgttgccagcagcactcactgcactcctttgtcatatactctgcatcactgtcatactcacaacttcgtgaataaagttgtgtgctttattcgt

SEQ ID NO: 170 - DNA, 2255 bp, Homo sapiens
  source 1..2255: mol_type = unassigned DNA
cgagcttcggagagaagcctgatatgtaacccaggcaggtgggagcctcagtctgtcgggctgaggtctggcatctacaaagcctcttggccgtgttctgaacttgaagcctggaggagttctctgctcagcacagccaaggaacagaattagaagaaaaggaaccctggcctgaggcaggtgacaaacattaccaccccagctgtgcacgatgcagcagatgcaaccagatgttcacagaaggagaggaaatgtatcttcaaggctccaccgtttggcatcccgactgtaagcaatctacgaagaccgaggaaaagctgcgggcaaaagtagacaatgagatcctggattacaaggatttagcagccattccgaaggtcaaggcaatttatgacattgaacgtccagatcttattacctatgagcctttctacacttcgggctatgatgacaaacaggagagacagagccttggagagtctccgaggactttgtctcctactccatcagcagaagggtaccaggatgttcgggatcggatgatccatcggtccacgagccagggctccatcaactcccctgtgtacagccgccacagctacactccaaccacgtcccgctctccccagcatttccacagacctgatcaaggaatcaacatttaccgaaagccacccatctacaaacagcatgctgccttggcagcccagagcaagtcctcagaagatatcatcaagttttccaagttcccagcagcccaggcaccagaccccagcgagacaccaaagattgagacggaccactggcctggtcccccctcatttgctgtcgtaggacctgacatgaaacgcagatctagtggcagagaggaagatgatgaggaacttctgagacgtcggcagcttcaagaagagcaattaatgaagcttaactcaggcctgggacagttgatcttgaaagaagagatggagaaagagagccgggaaaggtcatctctgttagccagtcgctacgattctcccatcaactcagcttcacatattccatcatctaaaactgcatctctccctggctatggaagaaatgggcttcaccggcctgtttctaccgacttcgctcagtataacagctatggggatgtcagcgggggagtgcgagattaccagacactcccagatggccacatgcctgcaatgagaatggaccgaggagtgtctatgcccaacatgttggaaccaaagatatttccatatgaaatgctcatggtgaccaacagagggcgaaacaaaatcctcagagaggtggacagaaccaggctggagcgccacttagcccctgaagtgtttcgggaaatctttggaatgtccatacaggagtttgacaggttacctctttggagacgcaacgacatgaagaaaaaagcaaaactcttctaagtcccactcgtgaatggcaattagagaaaggactgacagtggcggtgccccataggatgtcatattgaggcccaaacttgattggagaatttgcaaactaccgtcgctcagcaacaccaaaaagagaaagtctggttaaaacaccatgagtcaaatgtcgggccagccaacagtaacacttgccaagaagcatggcgtagaaatttctatgttccgaaacacagagtagtgtccacatgtgagcttttcacattaccttatgtatacaacaggagctgcgttgttttcttctttttcttttcctttatctgttgtccaacaacagtgctgactgtccggataagagctggcaagtgcccttaggatgccgcatgggaaaaatcggttatcataatttcaaagtataaatatatttattaagtagcgctgcggctaagaaggaagagtgaggggtctgtccatggggtggcagtgatttcacacccgcctttcttgaatggcttcgtgttactcagccgtgccctggcaggaatggaactccatcagggaacagggcagctctgtttgaatggggtgaaaaacagcaaaattaattcttagcaagctccttgttctctactgttcaccgggacctggctggcaaatgacttagctattagtatatttaaaaactgttcaaaagcaaaagagaaggaacaggaatgaaaggaaaccttcccttaactctttctgcttcccatagcaggtctggttcctgctccccgcctaggacaggagctgtctggagctccacctttgcaaagaaaggaaaaacacaaa

SEQ ID NO: 171 - DNA, 3203 bp, Homo sapiens
  source 1..3203: mol_type = unassigned DNA
ataccaggagtttgtcagggaactgtttccaaagccataatgaataatcaggctgttagtaaaagaagcctctccaagttatagcattttttaaaaattctagtagtgaagaaaataattaaaagcccatctggttgagatagtaattcattaaggaaaaagaggaggcagaaggctggggaataatcgatccttttctttctttatttcatgtgtttcagttattgtgaaatgatagtgatcaaaatctggattctggattgtgcagaatgcaggaaaatcctaggaacattcttggcgtgttctaatagtggcttcccagaaacgagtgttttcagtgggtgtggcgtcattgagctgatgtgcttttgcaaggggtctctttagaagtggtaggggcagggtcgagagaagaaggggatgcagaatctgtacatgaggaaggagccagagtcactcaggaaactcctcattcttcctgcgctggctgtggcacacccaccggtggcacacccctccctcgggtccagttcagcccacagactcctgggaggagagccagggccccagcctctcctttgaggagtgttgcagcctttctgtgtgccagatgcctagtgaagaaaagctgaaaccctggagctttgtgcatgttaatgaccttggaaatgactgagctcacggaccctcatcacaccatgggagactacaaagtggcccaccctcaggaccctcaccacccatcagagaagcctgtcattcactgccataaatgtggggagccttgcaagggtgaagtgcttcgggtccagaccaaacatttccacatcaagtgtttcacctgcaaagtgtgtggctgtgacctggcacaagggggcttcttcataaagaacggagagtatctctgcaccctggactaccagcggatgtacgggacacgctgccatggctgtggggagttcgtggagggcgaagtggtgactgctctgggcaagacctaccatcccaattgctttgcttgtactatctgcaagcgcccgtttccacccggagaccgagtcacattcaatgggagagactgcctttgtcaactctgtgcacagccgatgtcgtccagtccgaaagaaaccaccttctccagcaattgtgccggctgcggaagagatatcaagaatgggcaggcgctgctggcgctggataagcagtggcacttggggtgctttaaatgcaagtcctgcgggaaggtcctcaccggggagtacatcagcaaggatggtgctccgtactgtgaaaaggactaccagggactctttggggtgaaatgtgaggcgtgtcaccagtttatcacagggaaagtcctggaggcaggtgacaaacattaccaccccagctgtgcacgatgcagcagatgcaaccagatgttcacagaaggagaggaaatgtatcttcaaggctccaccgtttggcatcccgactgtaagcaatctacgaagaccgaggaaaagctgcggctgccaaacattcggcgttcttcatccgatttcttttattccaaaagtctgattcgacgcacaggacggtctccgtctctgcagcctaccaggacatcctcggaaagtatttattctaggccaggctccagtattcctggctcaccaggtcatactatctatgcaaaagtagacaatgagatcctggattacaaggatttagcagccattccgaaggtcaaggcaatttatgacattgaacgtccagatcttattacctatgagcctttctacacttcgggctatgatgacaaacaggagagacagagccttggagagtctccgaggactttgtctcctactccatcagcagaagggtaccaggatgttcgggatcggatgatccatcggtccacgagccagggctccatcaactcccctgtgtacagccgccacagctacactccaaccacgtcccgctctccccagcatttccacagacctggcaatgagccgtccagcggccggaactcccctctcccttaccggccagacagccgccctctaactccaacttacgctcaggcccctaaacatttccatgttccagatcaaggaatcaacatttaccgaaagccacccatctacaaacagcatgatgcagctgccttggcagcccagagcaagtcctcagaagatatcatcaagttttccaagttcccagcagcccaggcaccagaccccagcgagacaccaaagattgagacggaccactggcctggtcccccctcatttgctgtcgtaggacctgacatgaaacgcagatctagtggcagagaggaagatgatgaggaacttctgagacgtcggcagcttcaagaagagcaattaatgaagcttaactcaggcctgggacagttgatcttgaaagaagagatggagaaagagagccgggaaaggtcatctctgttagccagtcgctacgattctcccatcaactcagcttcacatattccatcatctaaaactgcatctctccctggctatggaagaaatgggcttcaccggcctgtttctaccgacttcgctcagtataacagctatggggatgtcagcgggggagtgcgagattaccagacactcccagatggccacatgcctgcaatgagaatggaccgaggagtgtctatgcccaacatgttggaaccaaagatatttccatatgaaatgctcatggtgaccaacagagggcgaaacaaaatcctcagagaggtggacagaaccaggctggagcgccacttagcccctgaagtgtttcgggaaatctttggaatgtccatacaggagtttgacaggttacctctttggagacgcaacgacatgaagaaaaaagcaaaactcttctaagtcccactcgtgaatggcaattagagaaaggactgacagtggcggtgccccataggatgtcatattgaggcccaaacttgattggagaatttgcaaactaccgtcgctcagcaacaccaaaaagagaaagtctggttaaaacaccatgagtcaaatgtcgggccagccaacagtaacacttgccaagaagcatggcgtagaaatttctatgttccgaaacacagagtagtgtccacatgtgagcttttcacattaccttatgtatacaacaggagctgcgttgttttcttctttttcttttccttt

SEQ ID NO: 172 - DNA, 2657 bp, Homo sapiens
  source 1..2657: mol_type = unassigned DNA
agacagtaaggagccaggggaacagagagaattgtggggcagcaccgctccttgggtccccactccccatttctcattgcttggaaatccatgccaagatgcctgccttccttggtctaaagtgtctggggaaattgtgcagctctgagaaaagcaaagtcacctcatctgagagaaccagtgccaggggctcgaacagaaagagactgattgttgaggaccggagggtctctgggacctccttcaccgctcataggcgtgccactatcactcatttgctgtatctctgtcccaaggactactgcccacgtgggcgtgtatgtaacagcgttgatccttttgtggcccaccctcaggaccctcaccacccatcagagaagcctgtcattcactgccataaatgtggggagccttgcaagggtgaagtgcttcgggtccagaccaaacatttccacatcaagtgtttcacctgcaaagtgtgtggctgtgacctggcacaagggggcttcttcataaagaacggagagtatctctgcaccctggactaccagcggatgtacgggacacgctgccatggctgtggggagttcgtggagggcgaagtggtgactgctctgggcaagacctaccatcccaattgctttgcttgtactatctgcaagcgcccgtttccacccggagaccgagtcacattcaatgggagagactgcctttgtcaactctgtgcacagccgatgtcgtccagtccgaaagaaaccaccttctccagcaattgtgccggctgcggaagagatatcaagaatgggcaggcgctgctggcgctggataagcagtggcacttggggtgctttaaatgcaagtcctgcgggaaggtcctcaccggggagtacatcagcaaggatggtgctccgtactgtgaaaaggactaccagggactctttggggtgaaatgtgaggcgtgtcaccagtttatcacagggaaagtcctggaggcaggtgacaaacattaccaccccagctgtgcacgatgcagcagatgcaaccagatgttcacagaaggagaggaaatgtatcttcaaggctccaccgtttggcatcccgactgtaagcaatctacgaagaccgaggaaaagctgcggcctaccaggacatcctcggaaagtatttattctaggccaggctccagtattcctggctcaccaggtcatactatctatgcaaaagtagacaatgagatcctggattacaaggatttagcagccattccgaaggtcaaggcaatttatgacattgaacgtccagatcttattacctatgagcctttctacacttcgggctatgatgacaaacaggagagacagagccttggagagtctccgaggactttgtctcctactccatcagcagaagggtaccaggatgttcgggatcggatgatccatcggtccacgagccagggctccatcaactcccctgtgtacagccgccacagctacactccaaccacgtcccgctctccccagcatttccacagacctggcaatgagccgtccagcggccggaactcccctctcccttaccggccagacagccgccctctaactccaacttacgctcaggcccctaaacatttccatgttccagatcaaggaatcaacatttaccgaaagccacccatctacaaacagcatgctgccttggcagcccagagcaagtcctcagaagatatcatcaagttttccaagttcccagcagcccaggcaccagaccccagcgagacaccaaagattgagacggaccactggcctggtcccccctcatttgctgtcgtaggacctgacatgaaacgcagatctagtggcagagaggaagatgatgaggaacttctgagacgtcggcagcttcaagaagagcaattaatgaagcttaactcaggcctgggacagttgatcttgaaagaagagatggagaaagagagccgggaaaggtcatctctgttagccagtcgctacgattctcccatcaactcagcttcacatattccatcatctaaaactgcatctctccctggctatggaagaaatgggcttcaccggcctgtttctaccgacttcgctcagtataacagctatggggatgtcagcgggggagtgcgagattaccagacactcccagatggccacatgcctgcaatgagaatggaccgaggagtgtctatgcccaacatgttggaaccaaagatatttccatatgaaatgctcatggtgaccaacagagggcgaaacaaaatcctcagagaggtggacagaaccaggctggagcgccacttagcccctgaagtgtttcgggaaatctttggaatgtccatacaggagtttgacaggttacctctttggagacgcaacgacatgaagaaaaaagcaaaactcttctaagtcccactcgtgaatggcaattagagaaaggactgacagtggcggtgccccataggatgtcatattgaggcccaaacttgattggagaatttgcaaactaccgtcgctcagcaacaccaaaaagagaaagtctggttaaaacaccatgagtcaaatgtcgggccagccaacagtaacacttgccaagaagcatggcgtagaaatttctatgttccgaaacac

SEQ ID NO: 173 - DNA, 498 bp, Homo sapiens
  source 1..498: mol_type = unassigned DNA
ggggatgtcagcgggggagtgcgagattaccaggtatggaacactttgtctttcttgaattggccacaccgatagaacagccatgttccaacccagactgctggctccaaggcaacagtttctgttgagaagatgcttgttgtggttgatctctctagtcattactctatagccgtgaagagcagacatgcctggtgcctgggtcaagctgtccctgcaggccttggggacactgcatgaaccaggccaggtgtagggggtctctcttgctttggccttggagagtcctctctggggtggaagtggaccagcatcaagggtctgctcatatacagtttttcttcttttaattataatctctcagtactttaggccacccttttcctgcgcgttctcaaatgaaaagacactgatgtcttagccaataggagagagcagtttgccctcatgacattcctttctcactagaacctcaatcttgttaaaaaaagaaagaaa

SEQ ID NO: 174 - DNA, 541 bp, Homo sapiens
  source 1..541: mol_type = unassigned DNA
tgtaagcaatctacgaagaccgaggaaaagctgcggcctaccaggacatcctcggaaagtatttattctaggccaggctccagtattcctggctcaccaggtcatactatctatgcaaaagtagacaatgagatcctggattacaaggatttagcagccattccgaaggtcaaggcaatttatgacattgaacgtccagatcttattacctatgagcctttctacacttcgggctatgatgacaaacaggagagacagagccttggagagtctccgaggactttgtctcctactccatcagcagaagggtaccaggatgttcgggatcggatgatccatcggtccacgagccagggctccatcaactcccctgtgtacagccgccacagctacactccaaccacgtcccgctctccccagcatttccacagacctgatcaaggaatcaacatttaccgaaagccacccatctacaaacagcatgtactgtttgaagtcatccttttgttgttaatttaagaataaaattctcagcatttga

SEQ ID NO: 175 - DNA, 854 bp, Homo sapiens
  source 1..854: mol_type = unassigned DNA
gaggcgtgagagagcgtgcctgcccgccgcacacggggctggtttccggagtgcgtctctagagggatgcacgttgccttagccgagcttcggagagaagcctgatatgtaacccaggcaggtgggagcctcagtctgtcgggctgaggtctggcatctacaaagcctcttggccgtgttctgaacttgaagcctggaggagttctctgctcagcacagccaaggaacagaattagaagaaaaggaaccctggcctgaggtaaagcggacattgcacaaggcaggtgacaaacattaccaccccagctgtgcacgatgcagcagatgcaaccagatgttcacagaaggagaggaaatgtatcttcaaggctccaccgtttggcatcccgactgtaagcaatctacgaagaccgaggaaaagctgcggcctaccaggacatcctcggaaagtatttattctaggccaggctccagtattcctggctcaccaggtcatactatctatgcaaaagtagacaatgagatcctggattacaaggatttagcagccattccgaaggtcaaggcaatttatgacattgaacgtccagatcttattacctatgagcctttctacacttcgggctatgatgacaaacaggagagacagagccttggagagtctccgaggactttgtctcctactccatcagcagaagggtaccaggatgttcgggatcggatgatccatcggtccacgagccagggctccatcaactcccctgtgtacagccgccacagctacactccaaccacgtcccgctctccccagcatttccacagacctgatcaaggaatcaacatttaccgaaagc

SEQ ID NO: 176 - DNA, 448 bp, Homo sapiens
  source 1..448: mol_type = unassigned DNA
caaagagttaacaaacattgtgactttaaattctcttttatttttctagtctccgaggactttgtctcctactccatcagcagaagggtaccaggatgttcgggatcggatgatccatcggtccacgagccagggctccatcaactcccctgtgtacagccgccacagctacactccaaccacgtcccgctctccccagcatttccacagacctggtaagggtgactgttcctggattcactctatataacaaactatgtttctgtgattttttcccctactattgatagcacattgaaaaatcaacgactaaacatttccatccctctcccagagcaaaatgaaaactggtatccaactatattttatgctctatcttttcttgaaacatcagtcatcctaagcctgtgttcattttgatttattaaataattatattttgacagcg

SEQ ID NO: 177 - DNA, 518 bp, Homo sapiens
  source 1..518: mol_type = unassigned DNA
ctggactaccagcggatgtacgggacacgctgccatggctgtggggagttcgtggagggcgaagtggtgactgctctgggcaagacctaccatcccaattgctttgcttgtactatctgcaagcgcccgtttccacccggagaccgagtcacattcaatgggagagactgcctttgtcaactctgtgcacagccgatgtcgtccagtccgaaagaaaccaccttctccagcaattgtgccggctgcggaagagatatcaagaatgggcaggcgctgctggcgctggataagcagtggcacttggggtgctttaaatgcaagtcctgcgggaaggtcctcaccggggagtacatcagcaagtaaggctgggcgcgggcacgcgttcctttcagtgggcaccgggcgttgtggttcttctgcaggtcctggtctcaggggccccaccccatcaatggtgctgaaattgttcacatcctgccatcataatgaacttgttgctataaaacttttgaaaagaa

SEQ ID NO: 178 - DNA, 356 bp, Homo sapiens
  source 1..356: mol_type = unassigned DNA
aaggatcattttggacaactaatgactgggtaactgtgtatgtagcttcaagtagctgccacttgccacagcaggaaatgggcctttagtggcccaccctcaggaccctcaccacccatcagagaagcctgtcattcactgccataaatgtggggagccttgcaagggtgaagtgcttcgggtccagaccaaacatttccacatcaagtgtttcacctgcaaagaaacttctagaccatttagaaaagaccaaggaccaaggagactgcccagagaatcaagattgttcagccaaattgtctgttttcagtgatcctttcctgggctgtcccatatataaaatcaactactcccta

SEQ ID NO: 179 - DNA, 7606 bp, Homo sapiens
  source 1..7606: mol_type = unassigned DNA
gtcattgagctgatgtgcttttgcaaggggtctctttagaagtggtaggggcagggtcgagagaagaaggggatgcagaatctgtacatgaggaaggagccagagtcactcaggaaactcctcattcttcctgcgctggctgtggcacacccaccggtggcacacccctccctcgggtccagttcagcccacagactcctgggaggagagccagggccccagcctctcctttgaggagtgttgcagcctttctgtgtgccagatgcctagtgaagaaaagctgaaaccctggagctttgtgcatgttaatgaccttggaaatgactgagctcacggaccctcatcacaccatgggagactacaaagtggcccaccctcaggaccctcaccacccatcagagaagcctgtcattcactgccataaatgtggggagccttgcaagggtgaagtgcttcgggtccagaccaaacatttccacatcaagtgtttcacctgcaaagtgtgtggctgtgacctggcacaagggggcttcttcataaagaacggagagtatctctgcaccctggactaccagcggatgtacgggacacgctgccatggctgtggggagttcgtggagggcgaagtggtgactgctctgggcaagacctaccatcccaattgctttgcttgtactatctgcaagcgcccgtttccacccggagaccgagtcacattcaatgggagagactgcctttgtcaactctgtgcacagccgatgtcgtccagtccgaaagaaaccaccttctccagcaattgtgccggctgcggaagagatatcaagaatgggcaggcgctgctggcgctggataagcagtggcacttggggtgctttaaatgcaagtcctgcgggaaggtcctcaccggggagtacatcagcaaggatggtgctccgtactgtgaaaaggactaccagggactctttggggtgaaatgtgaggcgtgtcaccagtttatcacagggaaagtcctggaggcaggtgacaaacattaccaccccagctgtgcacgatgcagcagatgcaaccagatgttcacagaaggagaggaaatgtatcttcaaggctccaccgtttggcatcccgactgtaagcaatctacgaagaccgaggaaaagctgcggcctaccaggacatcctcggaaagtatttattctaggccaggctccagtattcctggctcaccaggtcatactatctatgcaaaagtagacaatgagatcctggattacaaggatttagcagccattccgaaggtcaaggcaatttatgacattgaacgtccagatcttattacctatgagcctttctacacttcgggctatgatgacaaacaggagagacagagccttggagagtctccgaggactttgtctcctactccatcagcagaagggtaccaggatgttcgggatcggatgatccatcggtccacgagccagggctccatcaactcccctgtgtacagccgccacagctacactccaaccacgtcccgctctccccagcatttccacagacctggcaatgagccgtccagcggccggaactcccctctcccttaccggccagacagccgccctctaactccaacttacgctcaggcccctaaacatttccatgttccagatcaaggaatcaacatttaccgaaagccacccatctacaaacagcatgctgccttggcagcccagagcaagtcctcagaagatatcatcaagttttccaagttcccagcagcccaggcaccagaccccagcgagacaccaaagattgagacggaccactggcctggtcccccctcatttgctgtcgtaggacctgacatgaaacgcagatctagtggcagagaggaagatgatgaggaacttctgagacgtcggcagcttcaagaagagcaattaatgaagcttaactcaggcctgggacagttgatcttgaaagaagagatggagaaagagagccgggaaaggtcatctctgttagccagtcgctacgattctcccatcaactcagcttcacatattccatcatctaaaactgcatctctccctggctatggaagaaatgggcttcaccggcctgtttctaccgacttcgctcagtataacagctatggggatgtcagcgggggagtgcgagatttccagacactcccagatggccacatgcctgcaatgagaatggaccgaggagtgtctatgcccaacatgttggaaccaaagatatttccatatgaaatgctcatggtgaccaacagagggcgaaacaaaatcctcagagaggtggacagaaccaggctggagcgccacttagcccctgaagtgtttcgggaaatctttggaatgtccatacaggagtttgacaggttacctctttggagacgcaacgacatgaagaaaaaagcaaaactcttctaagtcccactcgtgaatggcaattagagaaaggactgacagtggcggtgccccataggatgtcatattgaggcccaaacttgattggagaatttgcaaactaccgtcgctcagcaacaccaaaaagagaaagtctggttaaaacaccatgagtcaaatgtcgggccagccaacagtaacacttgccaagaagcatggcgtagaaatttctatgttccgaaacacagagtagtgtccacatgtgagcttttcacattaccttatgtatacaacaggagctgcgttgttttcttctttttcttttcctttatctgttgtccaacaacagtgctgactgtccggataagagctggcaagtgcccttaggatgccgcatgggaaaaatcggttatcataatttcaaagtataaatatatttattaagtagcgctgcggctaagaaggaagagtgaggggtctgtccatggggtggcagtgatttcacacccgcctttcttgaatggcttcgtgttactcagccgtgccctggcaggaatggaactccatcagggaacagggcagctctgtttgaatggggtgaaaaacagcaaaattaattcttagcaagctccttgttctctactgttcaccgggacctggctggcaaatgacttagctattagtatatttaaaaactgttcaaaagcaaaagagaaggaacaggaatgaaaggaaaccttcccttaactctttctgcttcccatagcaggtctggttcctgctccccgcctaggacaggagctgtctggagctccacctttgcaaagaaaggaaaaacacaaattgcccccagattggcccagtggcatgccattaggtgattttgcataggggccatatcattcatggccaaaaaaaaccaaaaagcaaaaaacaaaaacaagtcccatgtcctactgactctagttcttccagtcgttatcctctgctgtctctctggcatcctatgaatcagatcaagcccatgctgttgttggtttttaaggtttctttcaataataggctaaggaaagacatgtttttctcttttaaatctctgcaactccaaagtagactccttcgaacgtatttaatttggccttttcagctttcttcttgcccagctctgtcgaattcatgggtgtgtgtgcacatgttggtttcactcacccagagtaattttgtgagcatgcatgtgctttttaatttctgcttgaatgtttgtcctgctgtgttgcagcttctaaagacattgtcaccgagtgtgtgtgactcaaagatcaagagtgaggctaaactgcgaccccaacatcacttccttcatggaaaggtgttggcgctgatgtagctcatggaaggatcagactgggaaccacagaggaaggatgaggtgggatgtggaggtcagagcatctcacgagagtccctcaggctctgcaacactagattcgaatatgagcctagggtttccccaacacgtgcgtgcatatgaaaccacatcatgattcccgacgtgagttagatgagggagagtttgtgtaactccacacccaggagggtaagccactttattatcatgctttggggctgtgcttaagaatttaagctctgttttaaagccgaagaagaaaacatttgaatttaccttcatatgccactaagaacaaaagctctgaagttcttcctgctggcaccaaatattaggattacaagctgtctctctgacaccagtggtaaaaaagcaagtagaatagtttctgagtctgtgttgcagcctctgacacgtggctcaccgctgtcatttgggggatggaatgaacagtcactgttctatagcatcctcctgtgctcttacctaaggaatctaaattgtcctagccttccattgctatgcactgaatgaggactactctcgtgtgtgtgtgtgtgtgtgtgtgtgtgtgtgtgtgtgtgtgtgtgtgtgttggatctactaacatgtttagcaaatggctctgacagggtggccatgagcagatgagaccagctcttgcttggttggaagccacactgcagtttgcagtttagcctttggtgtctcagtggcttcttgcttattccatgctttttctatcccatcctctctctgtgccctcctgcaatggcagccttggcacaatgcctgggtgtcctcatccttgctttactctggaaagtgtggggatggagaggatggtgcatttccagtgcttccttacctgtcaataacaatggtggccacctgggtcccagcacttggctggtggagagatttttttcattatggagctaataaagggtccctacgttttacattgattaatgaattatcacccagacatgtgcagatgaaatgtcaatataagaaaaatcaaggtatttgggaaacatgggcataatcaggtagttttgctaaaattcctcttccttggtctacataaagaagacatgggtctgtcatagaatggggacattagactgaaaactgggacaacccccttccttattttatagagactaggagttaaggggcctgcctaagattgcagtgataaagaactgaaccctaaatcagctcccactaatgaaaccctgctttccttgtatcttttaaactcagttctgcatccaacttgagaagaaaaaaagcttctttccatatcaagtaccatatgagttcatttaaactgcaccttgcagaaatgcattgccagaaagcaccagtagcctcctatctgcaagcagagtagtgctctgctctggggaggggtcattggaaaccataatgcagagtgggccccctactccatttcccagcaaaaggctccagctggagggatgggttgtggggcaacctggttcctgctaactgccagattgaatgtgtgggctagaatgcctgcacatttagttaaactgggctcagcatgcttgtcctcaaaatgtccatcctggtcacagcacacaagatggctattggtctgcttttaccctaccctgtactatacatgaaaattccagttattaacacactcaaactggtggagcttgttcaccctaggaaggggattgtatatatggcaggcttccctggtgccgatgtaaagggctacatttgggaacatttgacttccttgggactcttaagtgcataatgatggcatgaagtaaaaggggcctcaatgatgataggaaaatcagttcttttaaaatttcttcaagaaaatccaggctatcacatagtctttctgtgtgacttattaggagataggaagagcattgggaaacttgcacagctagctatgcatctacattttggtttggggttagttatgaaatgttcttaatatgacgtgttcaataacttcacataaacttcctgttctccaaaacctcaaagagatagagttaatgagttgttgtttttttttaaatgggggtagttttctatctgtcatgggctctagcatctactccgctacccaattctgtcatctccaagctgagtttcctcttctgaggcagaggctggagcagttctttttcagttctcatcctctccatcccaatccagtatatcaatcaactctaactcggagacgtctagctggcaatgtttctaaaactttcactggatttctttagacattgaagcaaacatttttttctaagaattgcttctcagatgatgatatcaaatgtatatgcttttgcaagtttgaaaagttcaaattaaccacttttgactaggtaagtctttctaaaaaccatttaaagctaactgggtcttagcatcctcctgtgtatggaagagacaggtgaccgctccaggttgggtgctcacagaacccttttcctgactctcatggaagatggtggaaggaaaatagactgtctcatcaaccctcctgtgtcctctgaagcaatctcagtttttattaaccacctcttctgtgtttctggtagctatttaacctgtatttaatctgtacttcctatgccagcctcaattttatttgatttttacaattattctcttctaaccaatgaagtgtttgtcagtatgccccaaagcttgctcttttgtgctcccttttgaataactttctatccagaaaaagagattatttgggacttgagatttgcagtgataccaacttatagcaatgatgtactttaagggaactacccaactatgttgtgatagaagaaagagaaaccttcactttggcatttttttttaatcactgtttatttttctgtttgcggcccaggaagcagtgggaggtggtggcagatatgctttgcatatggattgttatgtttttatttgggcaagtttaatcatggaaaactcaaaaagaaggggggaaatggtcagtttaagccaaaagaaactttctaaacaatgtataggtacacagcaaaattaaacaaatccaacaatttctgaagcttagtgtaattgagtggtggttgttattcaataaaattattcccaaaagtgtttctcctaagagtgcagttcccatgagtcacttcctgaacccattgaccaaaggtggacagagacaatcctgtagaccttgacattcagaaagatgtgagctgcttactgatcatatatgcatacgtttctttacagcagaggaaaccattgtccacaaaactgatgttcttttggggttttatgtacagacttgtccaatcatgtgtgtggttcctgcgagttgctgatgactccgcattgaagctctctgagttctttgattttaagttgggtttatggaattttttcaaatgttggaaggtgtgtggttcttcctgccctccctccccttttggaaatatgaaagcaaatgtttagaagaattccttttgaaaagctgtgtcgtgttccctgtgaaactgagcaggtgtgtgttggcgcgctaagtgccacatgcttgtgtgtagaggaggaggtggccctgccggctccgcgctgctgtgcctgtgatccctacctgctccccgctcctgttgccagcagcactcactgcactcctttgtcatatactctgcatcactgtcatactcacaacttcgtgaataaagttgtgtgctttattcgt

SEQ ID NO: 180 - DNA, 7690 bp, Homo sapiens
  source 1..7690: mol_type = unassigned DNA
gtcattgagctgatgtgcttttgcaaggggtctctttagaagtggtaggggcagggtcgagagaagaaggggatgcagaatctgtacatgaggaaggagccagagtcactcaggaaactcctcattcttcctgcgctggctgtggcacacccaccggtggcacacccctccctcgggtccagttcagcccacagactcctgggaggagagccagggccccagcctctcctttgaggagtgttgcagcctttctgtgtgccagatgcctagtgaagaaaagctgaaaccctggagctttgtgcatgttaatgaccttggaaatgactgagctcacggaccctcatcacaccatgggagactacaaagtggcccaccctcaggaccctcaccacccatcagagaagcctgtcattcactgccataaatgtggggagccttgcaagggtgaagtgcttcgggtccagaccaaacatttccacatcaagtgtttcacctgcaaagtgtgtggctgtgacctggcacaagggggcttcttcataaagaacggagagtatctctgcaccctggactaccagcggatgtacgggacacgctgccatggctgtggggagttcgtggagggcgaagtggtgactgctctgggcaagacctaccatcccaattgctttgcttgtactatctgcaagcgcccgtttccacccggagaccgagtcacattcaatgggagagactgcctttgtcaactctgtgcacagccgatgtcgtccagtccgaaagaaaccaccttctccagcaattgtgccggctgcggaagagatatcaagaatgggcaggcgctgctggcgctggataagcagtggcacttggggtgctttaaatgcaagtcctgcgggaaggtcctcaccggggagtacatcagcaaggatggtgctccgtactgtgaaaaggactaccagggactctttggggtgaaatgtgaggcgtgtcaccagtttatcacagggaaagtcctggaggcaggtgacaaacattaccaccccagctgtgcacgatgcagcagatgcaaccagatgttcacagaaggagaggaaatgtatcttcaaggctccaccgtttggcatcccgactgtaagcaatctacgaagaccgaggaaaagctgcggctgccaaacattcggcgttcttcatccgatttcttttattccaaaagtctgattcgacgcacaggacggtctccgtctctgcagcctaccaggacatcctcggaaagtatttattctaggccaggctccagtattcctggctcaccaggtcatactatctatgcaaaagtagacaatgagatcctggattacaaggatttagcagccattccgaaggtcaaggcaatttatgacattgaacgtccagatcttattacctatgagcctttctacacttcgggctatgatgacaaacaggagagacagagccttggagagtctccgaggactttgtctcctactccatcagcagaagggtaccaggatgttcgggatcggatgatccatcggtccacgagccagggctccatcaactcccctgtgtacagccgccacagctacactccaaccacgtcccgctctccccagcatttccacagacctggcaatgagccgtccagcggccggaactcccctctcccttaccggccagacagccgccctctaactccaacttacgctcaggcccctaaacatttccatgttccagatcaaggaatcaacatttaccgaaagccacccatctacaaacagcatgctgccttggcagcccagagcaagtcctcagaagatatcatcaagttttccaagttcccagcagcccaggcaccagaccccagcgagacaccaaagattgagacggaccactggcctggtcccccctcatttgctgtcgtaggacctgacatgaaacgcagatctagtggcagagaggaagatgatgaggaacttctgagacgtcggcagcttcaagaagagcaattaatgaagcttaactcaggcctgggacagttgatcttgaaagaagagatggagaaagagagccgggaaaggtcatctctgttagccagtcgctacgattctcccatcaactcagcttcacatattccatcatctaaaactgcatctctccctggctatggaagaaatgggcttcaccggcctgtttctaccgacttcgctcagtataacagctatggggatgtcagcgggggagtgcgagatttccagacactcccagatggccacatgcctgcaatgagaatggaccgaggagtgtctatgcccaacatgttggaaccaaagatatttccatatgaaatgctcatggtgaccaacagagggcgaaacaaaatcctcagagaggtggacagaaccaggctggagcgccacttagcccctgaagtgtttcgggaaatctttggaatgtccatacaggagtttgacaggttacctctttggagacgcaacgacatgaagaaaaaagcaaaactcttctaagtcccactcgtgaatggcaattagagaaaggactgacagtggcggtgccccataggatgtcatattgaggcccaaacttgattggagaatttgcaaactaccgtcgctcagcaacaccaaaaagagaaagtctggttaaaacaccatgagtcaaatgtcgggccagccaacagtaacacttgccaagaagcatggcgtagaaatttctatgttccgaaacacagagtagtgtccacatgtgagcttttcacattaccttatgtatacaacaggagctgcgttgttttcttctttttcttttcctttatctgttgtccaacaacagtgctgactgtccggataagagctggcaagtgcccttaggatgccgcatgggaaaaatcggttatcataatttcaaagtataaatatatttattaagtagcgctgcggctaagaaggaagagtgaggggtctgtccatggggtggcagtgatttcacacccgcctttcttgaatggcttcgtgttactcagccgtgccctggcaggaatggaactccatcagggaacagggcagctctgtttgaatggggtgaaaaacagcaaaattaattcttagcaagctccttgttctctactgttcaccgggacctggctggcaaatgacttagctattagtatatttaaaaactgttcaaaagcaaaagagaaggaacaggaatgaaaggaaaccttcccttaactctttctgcttcccatagcaggtctggttcctgctccccgcctaggacaggagctgtctggagctccacctttgcaaagaaaggaaaaacacaaattgcccccagattggcccagtggcatgccattaggtgattttgcataggggccatatcattcatggccaaaaaaaaccaaaaagcaaaaaacaaaaacaagtcccatgtcctactgactctagttcttccagtcgttatcctctgctgtctctctggcatcctatgaatcagatcaagcccatgctgttgttggtttttaaggtttctttcaataataggctaaggaaagacatgtttttctcttttaaatctctgcaactccaaagtagactccttcgaacgtatttaatttggccttttcagctttcttcttgcccagctctgtcgaattcatgggtgtgtgtgcacatgttggtttcactcacccagagtaattttgtgagcatgcatgtgctttttaatttctgcttgaatgtttgtcctgctgtgttgcagcttctaaagacattgtcaccgagtgtgtgtgactcaaagatcaagagtgaggctaaactgcgaccccaacatcacttccttcatggaaaggtgttggcgctgatgtagctcatggaaggatcagactgggaaccacagaggaaggatgaggtgggatgtggaggtcagagcatctcacgagagtccctcaggctctgcaacactagattcgaatatgagcctagggtttccccaacacgtgcgtgcatatgaaaccacatcatgattcccgacgtgagttagatgagggagagtttgtgtaactccacacccaggagggtaagccactttattatcatgctttggggctgtgcttaagaatttaagctctgttttaaagccgaagaagaaaacatttgaatttaccttcatatgccactaagaacaaaagctctgaagttcttcctgctggcaccaaatattaggattacaagctgtctctctgacaccagtggtaaaaaagcaagtagaatagtttctgagtctgtgttgcagcctctgacacgtggctcaccgctgtcatttgggggatggaatgaacagtcactgttctatagcatcctcctgtgctcttacctaaggaatctaaattgtcctagccttccattgctatgcactgaatgaggactactctcgtgtgtgtgtgtgtgtgtgtgtgtgtgtgtgtgtgtgtgtgtgtgtgtgttggatctactaacatgtttagcaaatggctctgacagggtggccatgagcagatgagaccagctcttgcttggttggaagccacactgcagtttgcagtttagcctttggtgtctcagtggcttcttgcttattccatgctttttctatcccatcctctctctgtgccctcctgcaatggcagccttggcacaatgcctgggtgtcctcatccttgctttactctggaaagtgtggggatggagaggatggtgcatttccagtgcttccttacctgtcaataacaatggtggccacctgggtcccagcacttggctggtggagagatttttttcattatggagctaataaagggtccctacgttttacattgattaatgaattatcacccagacatgtgcagatgaaatgtcaatataagaaaaatcaaggtatttgggaaacatgggcataatcaggtagttttgctaaaattcctcttccttggtctacataaagaagacatgggtctgtcatagaatggggacattagactgaaaactgggacaacccccttccttattttatagagactaggagttaaggggcctgcctaagattgcagtgataaagaactgaaccctaaatcagctcccactaatgaaaccctgctttccttgtatcttttaaactcagttctgcatccaacttgagaagaaaaaaagcttctttccatatcaagtaccatatgagttcatttaaactgcaccttgcagaaatgcattgccagaaagcaccagtagcctcctatctgcaagcagagtagtgctctgctctggggaggggtcattggaaaccataatgcagagtgggccccctactccatttcccagcaaaaggctccagctggagggatgggttgtggggcaacctggttcctgctaactgccagattgaatgtgtgggctagaatgcctgcacatttagttaaactgggctcagcatgcttgtcctcaaaatgtccatcctggtcacagcacacaagatggctattggtctgcttttaccctaccctgtactatacatgaaaattccagttattaacacactcaaactggtggagcttgttcaccctaggaaggggattgtatatatggcaggcttccctggtgccgatgtaaagggctacatttgggaacatttgacttccttgggactcttaagtgcataatgatggcatgaagtaaaaggggcctcaatgatgataggaaaatcagttcttttaaaatttcttcaagaaaatccaggctatcacatagtctttctgtgtgacttattaggagataggaagagcattgggaaacttgcacagctagctatgcatctacattttggtttggggttagttatgaaatgttcttaatatgacgtgttcaataacttcacataaacttcctgttctccaaaacctcaaagagatagagttaatgagttgttgtttttttttaaatgggggtagttttctatctgtcatgggctctagcatctactccgctacccaattctgtcatctccaagctgagtttcctcttctgaggcagaggctggagcagttctttttcagttctcatcctctccatcccaatccagtatatcaatcaactctaactcggagacgtctagctggcaatgtttctaaaactttcactggatttctttagacattgaagcaaacatttttttctaagaattgcttctcagatgatgatatcaaatgtatatgcttttgcaagtttgaaaagttcaaattaaccacttttgactaggtaagtctttctaaaaaccatttaaagctaactgggtcttagcatcctcctgtgtatggaagagacaggtgaccgctccaggttgggtgctcacagaacccttttcctgactctcatggaagatggtggaaggaaaatagactgtctcatcaaccctcctgtgtcctctgaagcaatctcagtttttattaaccacctcttctgtgtttctggtagctatttaacctgtatttaatctgtacttcctatgccagcctcaattttatttgatttttacaattattctcttctaaccaatgaagtgtttgtcagtatgccccaaagcttgctcttttgtgctcccttttgaataactttctatccagaaaaagagattatttgggacttgagatttgcagtgataccaacttatagcaatgatgtactttaagggaactacccaactatgttgtgatagaagaaagagaaaccttcactttggcatttttttttaatcactgtttatttttctgtttgcggcccaggaagcagtgggaggtggtggcagatatgctttgcatatggattgttatgtttttatttgggcaagtttaatcatggaaaactcaaaaagaaggggggaaatggtcagtttaagccaaaagaaactttctaaacaatgtataggtacacagcaaaattaaacaaatccaacaatttctgaagcttagtgtaattgagtggtggttgttattcaataaaattattcccaaaagtgtttctcctaagagtgcagttcccatgagtcacttcctgaacccattgaccaaaggtggacagagacaatcctgtagaccttgacattcagaaagatgtgagctgcttactgatcatatatgcatacgtttctttacagcagaggaaaccattgtccacaaaactgatgttcttttggggttttatgtacagacttgtccaatcatgtgtgtggttcctgcgagttgctgatgactccgcattgaagctctctgagttctttgattttaagttgggtttatggaattttttcaaatgttggaaggtgtgtggttcttcctgccctccctccccttttggaaatatgaaagcaaatgtttagaagaattccttttgaaaagctgtgtcgtgttccctgtgaaactgagcaggtgtgtgttggcgcgctaagtgccacatgcttgtgtgtagaggaggaggtggccctgccggctccgcgctgctgtgcctgtgatccctacctgctccccgctcctgttgccagcagcactcactgcactcctttgtcatatactctgcatcactgtcatactcacaacttcgtgaataaagttgtgtgctttattcgt

SEQ ID NO: 181 - DNA, 2230 bp, Homo sapiens
  source 1..2230: mol_type = unassigned DNA
ttcggagagaagcctgatatgtaacccaggcaggtgggagcctcagtctgtcgggctgaggtctggcatctacaaagcctcttggccgtgttctgaacttgaagcctggaggagttctctgctcagcacagccaaggaacagaattagaagaaaaggaaccctggcctgaggcaggtgacaaacattaccaccccagctgtgcacgatgcagcagatgcaaccagatgttcacagaaggagaggaaatgtatcttcaaggctccaccgtttggcatcccgactgtaagcaatctacgaagaccgaggaaaagctgcgggcaaaagtagacaatgagatcctggattacaaggatttagcagccattccgaaggtcaaggcaatttatgacattgaacgtccagatcttattacctatgagcctttctacacttcgggctatgatgacaaacaggagagacagagccttggagagtctccgaggactttgtctcctactccatcagcagaagggtaccaggatgttcgggatcggatgatccatcggtccacgagccagggctccatcaactcccctgtgtacagccgccacagctacactccaaccacgtcccgctctccccagcatttccacagacctgatcaaggaatcaacatttaccgaaagccacccatctacaaacagcatgctgccttggcagcccagagcaagtcctcagaagatatcatcaagttttccaagttcccagcagcccaggcaccagaccccagcgagacaccaaagattgagacggaccactggcctggtcccccctcatttgctgtcgtaggacctgacatgaaacgcagatctagtggcagagaggaagatgatgaggaacttctgagacgtcggcagcttcaagaagagcaattaatgaagcttaactcaggcctgggacagttgatcttgaaagaagagatggagaaagagagccgggaaaggtcatctctgttagccagtcgctacgattctcccatcaactcagcttcacatattccatcatctaaaactgcatctctccctggctatggaagaaatgggcttcaccggcctgtttctaccgacttcgctcagtataacagctatggggatgtcagcgggggagtgcgagatttccagacactcccagatggccacatgcctgcaatgagaatggaccgaggagtgtctatgcccaacatgttggaaccaaagatatttccatatgaaatgctcatggtgaccaacagagggcgaaacaaaatcctcagagaggtggacagaaccaggctggagcgccacttagcccctgaagtgtttcgggaaatctttggaatgtccatacaggagtttgacaggttacctctttggagacgcaacgacatgaagaaaaaagcaaaactcttctaagtcccactcgtgaatggcaattagagaaaggactgacagtggcggtgccccataggatgtcatattgaggcccaaacttgattggagaatttgcaaactaccgtcgctcagcaacaccaaaaagagaaagtctggttaaaacaccatgagtcaaatgtcgggccagccaacagtaacacttgccaagaagcatggcgtagaaatttctatgttccgaaacacagagtagtgtccacatgtgagcttttcacattaccttatgtatacaacaggagctgcgttgttttcttctttttcttttcctttatctgttgtccaacaacagtgctgactgtccggataagagctggcaagtgcccttaggatgccgcatgggaaaaatcggttatcataatttcaaagtataaatatatttattaagtagcgctgcggctaagaaggaagagtgaggggtctgtccatggggtggcagtgatttcacacccgcctttcttgaatggcttcgtgttactcagccgtgccctggcaggaatggaactccatcagggaacagggcagctctgtttgaatggggtgaaaaacagcaaaattaattcttagcaagctccttgttctctactgttcaccgggacctggctggcaaatgacttagctattagtatatttaaaaactgttcaaaagcaaaagagaaggaacaggaatgaaaggaaaccttcccttaactctttctgcttcccatagcaggtctggttcctgctccccgcctaggacaggagctgtctggagctccacctttgc

SEQ ID NO: 182 - DNA, 2756 bp, Homo sapiens
  source 1..2756: mol_type = unassigned DNA
ctactcttttcttatcttctgcagctggcaaaattttactcaatggcttttaaaggacaattttgatcattttagtgctttaatcctattctgagcagctaatttttagattctcaaggaaaacagcatgtttatatacaaggataattaggaagaggggcctttgttttggcgaatttgcagttggttggattcaaacaccagccaggatgcagaggcgcagatggagtgagccccctaaggtgttcttagttcaccgcccagccctctgccctcagcaatgtcgctcctctgccttgggactctggacagacttcaactcagggttggattagcaagtccttggacacagtctgggaacgtggatgaggcccacactccttcccctgggcaggggatctgggctgctccaccagacaggagagatggggctcgctgcaaataagcttttcatgcttgaaatattctactttgctttcccgtttccccttctatctgctgcctttgcccttccgtctggaggcagtgaaagtggccggagcacccccagcctctccgtgctctctgacagcaagccgcccccctccacctaccagcaggcacctcgccacttccacgtcccagacactggcgtaaaagataacatctataggaaaccccctatctacagacagcatgctgccaggcgatcggatggggaggatggaagcttggaccaggataacaggaagcagaagagcagctggctgatgctcaagggggatgcagacacaaggaccaattctccagacctggacacccagtccttgtcccacagcagcgggaccgacagagaccctctccaaaggatggcaggggacagctttcactcacaatacaagatctatccgtatgactccctcatcgtcacaaaccgaattcgcgtgaaactgcccaaagacgtggaccggacgagactggagagacacttgtcgcccgaggagttccaggaagtgtttgggatgagcatcgaggagtttgaccgcctggccctctggaagaggaatgaccttaagaagaaagcccttttgttctgacggctgccagcctgccccactggtgtgtgccgggcgccgaggccaggggcccctggcgagaaccgcacacacccctcccacacaccttgctctggcttctctgtgtccatggggtgggcgggagggggtcccccagcaggtgcggcccctgcacctgccggcgacactcctgccggtagtttagggccgagacggctagcttcacgccacccttccccgctgtggcttggtgtcagggagaggctgtagagtggctgtgtcgggcatcagatggagcacacaggtggctgcagcccagcccaccttcccagcgttctcgaggtgccctggccccggtgctgggcacgtgggggacagaggtggccgggacgtgagctgtgaggcttgttgatgatggttgctgacaccatcatcgggggtgggcacacggcccttcggagcctgggcagcctggcctcacaggcagactcgcagacggggcagtgagcgtctgggacagtgccaagagtggggtgtgtgatttttgcaggcgtctgtgatgggtctctttagggacaaatgtcaacaagggacaagacagggcaccttccgccagcgcccctccatgcgctgcgttcctcctccagatcgacccctagatgcctacacaatatctttaaagtaacacagaagtttttattttattaaaaagtatagcctacttaaacgcgagatgacatatatagagtttaattttacggtccctccgcaggggagcggcctccagccttattctccaccgctcggatctgtgtggtttcagtctgttcttggtgtggtcctcatacacagagctccctgtctagtttcttttctttttcttttttctttttctcgtcacacaggtaaccttaaagacagacccctctaaagaacgctttgtaaatacatgtgaggtatagccaccactgttttccttgctgttatttttccaagtcttggggagaaaacatcctcctctgatggccaaagccctggaatcaagggtttccacgtaccctgcctaatacccgacgtagctcttgatgcaccgtccttgtgctgtggctggcggtgtctcagcctgaaacataaaccccacatgccccaggagcgatgtgctccctgaaacagacaaccacacgctgttggggagagaaggatggagataggatggagataggatggagatgtggctcttctcatctttgaagccagcagggcatcccggagcaggaggctggccgggctccccaagcgaaggcgttggtgtctgtcattaggtgtgtgttagggtgcagcaccggccgtcacaggatgctgataagcgcgctgagaggtggatgaaacaccaaagtctgtttccccgtccgcagtgggtgttgcctctttgtgtgtgtcccgatgttcctgcctgtgagtcggccttactccgtttccttagcgcccatgacacgccaagtcccgtttcgcactcggcttctcacccgcccagctcggctagggagggggagtttttagcacctaatatgcttcctgccattgcgcaatctgagcctgagcaactggaaacccccatttctcattagtgcaatgtcatatctgatcccaggaagcctggaaaataaaagacgatgcattataacttgcggaagtacaaga

SEQ ID NO: 183 - DNA, 3396 bp, Homo sapiens
  source 1..3396: mol_type = unassigned DNA
gtgcgcaaggagcgggcgcggagccggcgggcgggcggaggatagcgcgggcgcggcacctgcgggcccgagggtctggctgtcgcagcgccgggccgccccgactccgagcggctgctgagatgagtgcagtgtcgcagccccaggctgctcccagcccgctggagaagtcgcccagcacggcgatcctgtgcaacacgtgtgggaatgtgtgcaagggcgaggtgctgcgggtgcaggacaagtacttccacatcaagtgcttcgtctgtaaagcatgtggctgcgacctggccgagggcggcttcttcgtgcggcagggcgagtacatctgcacgctggactaccagaggctctacggcacccgctgcttcagctgcgaccagttcattgagggtgaggtggtgtcggcgctgggcaagacctaccaccccgactgcttcgtgtgtgccgtctgccggctgcccttcccccccggggaccgagtgaccttcaacgggaaggaatgcatgtgccagaagtgttccctgcccgtatcggtgggcagcagcgcgcacctgtcccagggcctccgaagttgtgggggctgcggcacagaaatcaagaatggccaggccctggtagccttggacaagcactggcacttgggctgttttaagtgcaagagctgtgggaagctcctgaatgccgagtacatcagcaaggatgggctgccctactgcgaagctgactatcacgccaagttcggcatccgctgtgacagctgtgagaaatacatcacggggcgcgtgctggaggccggagagaagcactaccacccttcctgcgcgctatgtgtcaggtgcggccagatgtttgcagaaggcgaagagatgtatcttcaaggttcctccatctggcatccggcgtgtcgacaagcagccagaactgaagacagaaacaaggaaaccagaacttcctcagagagcatcatttctgtccctgcttccagcacctcagggtctccgagccgtgtgatttatgccaagcttggtggtgagatcctggactacagggacttggcagcccttcctaaaagtaaggccatctatgacatcgaccgccccgacatgatctcctactcaccctacatcagccactctgcaggggacaggcagagctacggcgagtcccctcagttgctctcgccaacgccgaccgagggggatcaggatgaccggtcctacaagcagtgtcggacctccagcccaagctccactgggtcggttagcctcgggcgctacactccgacctcacggtcaccacagcactacagccgtccagctgccaggcgatcggatggggaggatggaagcttggaccaggataacaggaagaagagcagctggctgatgctcaagggggatgcagacacaaggaccaattctccagacctggacacccagtccttgtcccacagcagcgggaccgacagagaccctctccaaaggatggcaggggacagctttcactcacaatacaagatctatccgtatgactccctcatcgtcacaaaccgaattcgcgtgaaactgcccaaagacgtggaccggacgagactggagagacacttgtcgcccgaggagttccaggaagtgtttgggatgagcatcgaggagtttgaccgcctggccctctggaagaggaatgaccttaagaagaaagcccttttgttctgacggctgccagcctgccccactggtgtgtgccgggcgccgaggccaggggcccctggcgagaaccgcacacacccctcccacacaccttgctctggcttctctgtgtccatggggtgggcgggagggggtcccccagcaggtgcggcccctgcacctgccggcgacactcctgccggtagtttagggccgagacggctagcttcacgccacccttccccgctgtggcttggtgtcagggagaggctgtagagtggctgtgtcgggcatcagatggagcacacaggtggctgcagcccagcccaccttcccagcgttctcgaggtgccctggccccggtgctgggcacgtgggggacagaggtggccgggacgtgagctgtgaggcttgttgatgatggttgctgacaccatcatcgggggtgggcacacggcccttcggagcctgggcagcctggcctcacaggcagactcgcagacggggcagtgagcgtctgggacagtgccaagagtggggtgtgtgatttttgcaggcgtctgtgatgggtctctttagggacaaatgtcaacaagggacaagacagggcaccttccgccagcgcccctccatgcgctgcgttcctcctccagatcgacccctagatgcctacacaatatctttaaagtaacacagaagtttttattttattaaaaagtatagcctacttaaacgcgagatgacatatatagagtttaattttacggtccctccgcaggggagcggcctccagccttattctccaccgctcggatctgtgtggtttcagtctgttcttggtgtggtcctcatacacagagctccctgtctagtttcttttctttttcttttttctttttctcgtcacacaggtaaccttaaagacagacccctctaaagaacgctttgtaaatacatgtgaggtatagccaccactgttttccttgctgttatttttccaagtcttggggagaaaacatcctcctctgatggccaaagccctggaatcaagggtttccacgtaccctgcctaatacccgacgtagctcttgatgcaccgtccttgtgctgtggctggcggtgtctcagcctgaaacataaaccccacatgccccaggagcgatgtgctccctgaaacagacaaccacacgctgttggggagagaaggatggagataggatggagataggatggagatgtggctcttctcatctttgaagccagcagggcatcccggagcaggaggctggccgggctccccaagcgaaggcgttggtgtctgtcattaggtgtgtgttagggtgcagcaccggccgtcacaggatgctgataagcgcgctgagaggtggatgaaacaccaaagtctgtttccccgtccgcagtgggtgttgcctctttgtgtgtgtcccgatgttcctgcctgtgagtcggccttactccgtttccttagcgcccatgacacgccaagtcccgtttcgcactcggcttctcacccgcccagctcggctagggagggggagtttttagcacctaatatgcttcctgccattgcgcaatctgagcctgagcaactggaaacccccatttctcattagtgcaatgtcatatctgatcccaggaagcctggaaaataaaagacgatgcattataacttgcggaagtacaa

SEQ ID NO: 184 - DNA, 1944 bp, Homo sapiens
  source 1..1944: mol_type = unassigned DNA
atgtattctcggtgaccttctgctcagttctttggtgccagcatacacttgcttcgtgaggtgaccctgtggtttcctcccccaacagatctatccgtatgactccctcatcgtcacaaaccgaattcgcgtgaaactgcccaaagacgtggaccggacgagactggagagacacttgtcgcccgaggagttccaggaagtgtttgggatgagcatcgaggagtttgaccgcctggccctctggaagaggaatgaccttaagaagaaagcccttttgttctgacggctgccagcctgccccactggtgtgtgccgggcgccgaggccaggggcccctggcgagaaccgcacacacccctcccacacaccttgctctggcttctctgtgtccatggggtgggcgggagggggtcccccagcaggtgcggcccctgcacctgccggcgacactcctgccggtagtttagggccgagacggctagcttcacgccacccttccccgctgtggcttggtgtcagggagaggctgtagagtggctgtgtcgggcatcagatggagcacacaggtggctgcagcccagcccaccttcccagcgttctcgaggtgccctggccccggtgctgggcacgtgggggacagaggtggccgggacgtgagctgtgaggcttgttgatgatggttgctgacaccatcatcgggggtgggcacacggcccttcggagcctgggcagcctggcctcacaggcagactcgcagacggggcagtgagcgtctgggacagtgccaagagtggggtgtgtgatttttgcaggcgtctgtgatgggtctctttagggacaaatgtcaacaagggacaagacagggcaccttccgccagcgcccctccatgcgctgcgttcctcctccagatcgacccctagatgcctacacaatatctttaaagtaacacagaagtttttattttattaaaaagtatagcctacttaaacgcgagatgacatatatagagtttaattttacggtccctccgcaggggagcggcctccagccttattctccaccgctcggatctgtgtggtttcagtctgttcttggtgtggtcctcatacacagagctccctgtctagtttcttttctttttcttttttctttttctcgtcacacaggtaaccttaaagacagacccctctaaagaacgctttgtaaatacatgtgaggtatagccaccactgttttccttgctgttatttttccaagtcttggggagaaaacatcctcctctgatggccaaagccctggaatcaagggtttccacgtaccctgcctaatacccgacgtagctcttgatgcaccgtccttgtgctgtggctggcggtgtctcagcctgaaacataaaccccacatgccccaggagcgatgtgctccctgaaacagacaaccacacgctgttggggagagaaggatggagataggatggagataggatggagatgtggctcttctcatctttgaagccagcagggcatcccggagcaggaggctggccgggctccccaagcgaaggcgttggtgtctgtcattaggtgtgtgttagggtgcagcaccggccgtcacaggatgctgataagcgcgctgagaggtggatgaaacaccaaagtctgtttccccgtccgcagtgggtgttgcctctttgtgtgtgtcccgatgttcctgcctgtgagtcggccttactccgtttccttagcgcccatgacacgccaagtcccgtttcgcactcggcttctcacccgcccagctcggctagggagggggagtttttagcacctaatatgcttcctgccattgcgcaatctgagcctgagcaactggaaacccccatttctcattagtgcaatgtcatatctgatcccaggaagcctggaaaataaaagacgatgcattat

SEQ ID NO: 185 - DNA, 2974 bp, Homo sapiens
  source 1..2974: mol_type = unassigned DNA
agaaggggagctgccgccgccgcggtggcactgcctgatgctcggcccagtgtgccggtgccccgctgggtgacagtggactcccagggcgcagcaggagcaggtgacagactgttggctgaaggtgagggtgtccaccctcgcaggcacacgttccagggagcacggcactcaagcagggccgtcagactgggctctggtgcccagaagctgtgcaggccggagagaagcactaccacccttcctgcgcgctatgtgtcaggtgcggccagatgtttgcagaaggcgaagagatgtatcttcaaggttcctccatctggcatccggcgtgtcgacaagcagccagaactgaagacagaaacaaggaaaccagaacttcctcagagagcatcatttctgtccctgcttccagcacctcagggtctccgagccgtgtgatttatgccaagcttggtggtgagatcctggactacagggacttggcagcccttcctaaaagtaaggccatctatgacatcgaccgccccgacatgatctcctactcaccctacatcagccactctgcaggggacaggcagagctacggcgagtcccctcagttgctctcgccaacgccgaccgagggggatcaggatgaccggtcctacaagcagtgtcggacctccagcccaagctccactgggtcggttagcctcgggcgctacactccgacctcacggtcaccacagcactacagccgtccagacactggcgtaaaagataacatctataggaaaccccctatctacagacagcatgctgccaggcgatcggatggggaggatggaagcttggaccaggataacaggaagcagaagagcagctggctgatgctcaagggggatgcagacacaaggaccaattctccagacctggacacccagtccttgtcccacagcagcgggaccgacagagaccctctccaaaggatggcaggggacagctttcactcacgattcccctattccaaatctgaccctctcccaggacatggaaagaatggcttggaccagcggaatgccaatctggccccctgtggagcagacccggatgccagctggggcatgcgagaatacaagatctatccgtatgactccctcatcgtcacaaaccgaattcgcgtgaaactgcccaaagacgtggaccggacgagactggagagacacttgtcgcccgaggagttccaggaagtgtttgggatgagcatcgaggagtttgaccgcctggccctctggaagaggaatgaccttaagaagaaagcccttttgttctgacggctgccagcctgccccactggtgtgtgccgggcgccgaggccaggggcccctggcgagaaccgcacacacccctcccacacaccttgctctggcttctctgtgtccatggggtgggcgggagggggtcccccagcaggtgcggcccctgcacctgccggcgacactcctgccggtagtttagggccgagacggctagcttcacgccacccttccccgctgtggcttggtgtcagggagaggctgtagagtggctgtgtcgggcatcagatggagcacacaggtggctgcagcccagcccaccttcccagcgttctcgaggtgccctggccccggtgctgggcacgtgggggacagaggtggccgggacgtgagctgtgaggcttgttgatgatggttgctgacaccatcatcgggggtgggcacacggcccttcggagcctgggcagcctggcctcacaggcagactcgcagacggggcagtgagcgtctgggacagtgccaagagtggggtgtgtgatttttgcaggcgtctgtgatgggtctctttagggacaaatgtcaacaagggacaagacagggcaccttccgccagcgcccctccatgcgctgcgttcctcctccagatcgacccctagatgcctacacaatatctttaaagtaacacagaagtttttattttattaaaaagtatagcctacttaaacgcgagatgacatatatagagtttaattttacggtccctccgcaggggagcggcctccagccttattctccaccgctcggatctgtgtggtttcagtctgttcttggtgtggtcctcatacacagagctccctgtctagtttcttttctttttcttttttctttttctcgtcacacaggtaaccttaaagacagacccctctaaagaacgctttgtaaatacatgtgaggtatagccaccactgttttccttgctgttatttttccaagtcttggggagaaaacatcctcctctgatggccaaagccctggaatcaagggtttccacgtaccctgcctaatacccgacgtagctcttgatgcaccgtccttgtgctgtggctggcggtgtctcagcctgaaacataaaccccacatgccccaggagcgatgtgctccctgaaacagacaaccacacgctgttggggagagaaggatggagataggatggagataggatggagatgtggctcttctcatctttgaagccagcagggcatcccggagcaggaggctggccgggctccccaagcgaaggcgttggtgtctgtcattaggtgtgtgttagggtgcagcaccggccgtcacaggatgctgataagcgcgctgagaggtggatgaaacaccaaagtctgtttccccgtccgcagtgggtgttgcctctttgtgtgtgtcccgatgttcctgcctgtgagtcggccttactccgtttccttagcgcccatgacacgccaagtcccgtttcgcactcggcttctcacccgcccagctcggctagggagggggagtttttagcacctaatatgcttcctgccattgcgcaatctgagcctgagcaactggaaacccccatttctcattagtgcaatgtcatatctgatcccaggaagcctggaaaataaaagacgatgcattat

SEQ ID NO: 186 - DNA, 2902 bp, Homo sapiens
  source 1..2902: mol_type = unassigned DNA
gactccgagcggctgctgagatgagtgcagtgtcgcagccccaggctgctcccagcccgctggagaagtcgcccagcacggcgatcctgtgcaacacgtgtgggaatgtgtgcaagggcgaggtgctgcgggtgcaggacaagtacttccacatcaagtgcttcgtctgtaaagcatgtggctgcgacctggccgagggcggcttcttcgtgcggcagggcgagtacatctgcacgctggactaccagaggctctacggcacccgctgcttcagctgcgaccagttcattgagggtgaggtggtgtcggcgctgggcaagacctaccaccccgactgcttcgtgtgtgccgtctgccggctgcccttcccccccggggaccgagtgaccttcaacgggaaggaatgcatgtgccagaagtgttccctgcccgtatcggtgggcagcagcgcgcacctgtcccagggcctccgaagttgtgggggctgcggcacagaaatcaagaatggccaggccctggtagccttggacaagcactggcacttgggctgttttaagtgcaagagctgtgggaagctcctgaatgccgagtacatcagcaaggatgggctgccctactgcgaagctgactatcacgccaagttcggcatccgctgtgacagctgtgagaaatacatcacggggcgcgtgctggaggccggagagaagcactaccacccttcctgcgcgctatgtgtcaggtgcggccagatgtttgcagaaggcgaagagatgtatcttcaaggttcctccatctggcatccggcgtgtcgacaagcagccagaactgaagacagaaacaaggaaaccagaacttcctcagagagcatcatttctgtccctgcttccagcacctcagggtctccgagccgtgtgatttatgccaagcttggtggtgagatcctggactacagggacttggcagcccttcctaaaagtaaggccatctatgacatcgaccgccccgacatgatctcctactcaccctacatcagccactctgcaggggacaggcagagctacggcgagggggatcaggatgaccggtcctacaagcagtgtcggacctccagcccaagctccactgggtcggttagcctcgggcgctacactccgacctcacggtcaccacagcactacagccgtccagctggtactgtgagtgtgggtaccagtagctgcctctccctgtcccaacacccaagccctacatccgtgttcagacatcattacatcccctacttccgaggcagtgaaagtggccggagcacccccagcctctccgtgctctctgacagcaagccgcccccctccacctaccagcaggcacctcgccacttccacgtcccagacactggcgtaaaagataacatctataggaaaccccctatctacagacagcatgctgccaggcgatcggatggggaggatggaagcttggaccaggataacaggaagcagaagagcagctggctgatgctcaagggggatgcagacacaaggaccaattctccagacctggacacccagtccttgtcccacagcagcgggaccgacagagaccctctccaaaggatggcaggggacagctttcactcacgattcccctattccaaatctgaccctctcccaggacatggaaagaatggcttggaccagcggaatgccaatctggccccctgtggagcagacccggatgccagctggggcatgcgagaatacaagatctatccgtatgactccctcatcgtcacaaaccgaattcgcgtgaaactgcccaaagacgtggaccggacgagactggagagacacttgtcgcccgaggagttccaggaagtgtttgggatgagcatcgaggagtttgaccgcctggccctctggaagaggaatgaccttaagaagaaagcccttttgttctgacggctgccagcctgccccactggtgtgtgccgggcgccgaggccaggggcccctggcgagaaccgcacacacccctcccacacaccttgctctggcttctctgtgtccatggggtgggcgggagggggtcccccagcaggtgcggcccctgcacctgccggcgacactcctgccggtagtttagggccgagacggctagcttcacgccacccttccccgctgtggcttggtgtcagggagaggctgtagagtggctgtgtcgggcatcagatggagcacacaggtggctgcagcccagcccaccttcccagcgttctcgaggtgccctggccccggtgctgggcacgtgggggacagaggtggccgggacgtgagctgtgaggcttgttgatgatggttgctgacaccatcatcgggggtgggcacacggcccttcggagcctgggcagcctggcctcacaggcagactcgcagacggggcagtgagcgtctgggacagtgccaagagtggggtgtgtgatttttgcaggcgtctgtgatgggtctctttagggacaaatgtcaacaagggacaagacagggcaccttccgccagcgcccctccatgcgctgcgttcctcctccagatcgacccctagatgcctacacaatatctttaaagtaacacagaagtttttattttattaaaaagtatagcctacttaaacgcgagatgacatatatagagtttaattttacggtccctccgcaggggagcggcctccagccttattctccaccgctcggatctgtgtggtttcagtctgttcttggtgtggtcctcatacacagagctccctgtctagtttcttttctttttcttttttctttttctcgtcacacaggtaaccttaaagacagacccctctaaagaacgctttgtaaatacatgtgaggtatagcca

SEQ ID NO: 187 - DNA, 2589 bp, Homo sapiens
  source 1..2589: mol_type = unassigned DNA
acctgcgggcccgagggtctggctgtcgcagcgccgggccgccccgactccgagcggctgctgagatgagtgcagtgtcgcagccccaggctgctcccagcccgctggagaagtcgcccagcacggcgatcctgtgcaacacgtgtgggaatgtgtgcaagggcgaggtgctgcgggtgcaggacaagtacttccacatcaagtgcttcgtctgtaaagcatgtggctgcgacctggccgagggcggcttcttcgtgcggcagggcgagtacatctgcacgctggactaccagaggctctacggcacccgctgcttcagctgcgaccagttcattgagggtgaggtggtgtcggcgctgggcaagacctaccaccccgactgcttcgtgtgtgccgtctgccggctgcccttcccccccggggaccgagtgaccttcaacgggaaggaatgcatgtgccagaagtgttccctgcccgtatcggtgggcagcagcgcgcacctgtcccagggcctccgaagttgtgggggctgcggcacagaaatcaagaatggccaggccctggtagccttggacaagcactggcacttgggctgttttaagtgcaagagctgtgggaagctcctgaatgccgagtacatcagcaaggatgggctgccctactgcgaagctgactatcacgccaagttcggcatccgctgtgacagctgtgagaaatacatcacggggcgcgtgctggaggccggagagaagcactaccacccttcctgcgcgctatgtgtcaggtgcggccagatgtttgcagaaggcgaagagatgtatcttcaaggttcctccatctggcatccggcgtgtcgacaagcagccagaactgaagacagaaacaaggaaaccagaacttcctcagagagcatcatttctgtccctgcttccagcacctcagggtctccgagccgtgtgatttatgccaagcttggtggtgagatcctggactacagggacttggcagcccttcctaaaagtaaggccatctatgacatcgaccgccccgacatgatctcctactcaccctacatcagccactctgcaggggacaggcagagctacggcgagggggatcaggatgaccggtcctacaagcagtgtcggacctccagcccaagctccactgggtcggttagcctcgggcgctacactccgacctcacggtcaccacagcactacagccgtccaggcagtgaaagtggccggagcacccccagcctctccgtgctctctgacagcaagccgcccccctccacctaccagcaggcacctcgccacttccacgtcccagacactggcgtaaaagataacatctataggaaaccccctatctacagacagcatgctgccaggcgatcggatggggaggatggaagcttggaccaggataacaggaagaagagcagctggctgatgctcaagggggatgcagacacaaggaccaattctccagacctggacacccagtccttgtcccacagcagcgggaccgacagagaccctctccaaaggatggcaggggacagctttcactcacgattcccctattccaaatctgaccctctcccaggacatggaaagaatggcttggaccagcggaatgccaatctggccccctgtggagcagacccggatgccagctggggcatgcgagaatacaagatctatccgtatgactccctcatcgtcacaaaccgaattcgcgtgaaactgcccaaagacgtggaccggacgagactggagagacacttgtcgcccgaggagttccaggaagtgtttgggatgagcatcgaggagtttgaccgcctggccctctggaagaggaatgaccttaagaagaaagcccttttgttctgacggctgccagcctgccccactggtgtgtgccgggcgccgaggccaggggcccctggcgagaaccgcacacacccctcccacacaccttgctctggcttctctgtgtccatggggtgggcgggagggggtcccccagcaggtgcggcccctgcacctgccggcgacactcctgccggtagtttagggccgagacggctagcttcacgccacccttccccgctgtggcttggtgtcagggagaggctgtagagtggctgtgtcgggcatcagatggagcacacaggtggctgcagcccagcccaccttcccagcgttctcgaggtgccctggccccggtgctgggcacgtgggggacagaggtggccgggacgtgagctgtgaggcttgttgatgatggttgctgacaccatcatcgggggtgggcacacggcccttcggagcctgggcagcctggcctcacaggcagactcgcagacggggcagtgagcgtctgggacagtgccaagagtggggtgtgtgatttttgcaggcgtctgtgatgggtctctttagggacaaatgtcaacaagggacaagacagggcaccttccgccagcgcccctccatgcgctgcgttcctcctccagatcgacccctagatgcctacacaatatctttaaagtaacacagaagtttttattttattaaa

SEQ ID NO: 188 - DNA, 2472 bp, Homo sapiens
  source 1..2472: mol_type = unassigned DNA
acctgcgggcccgagggtctggctgtcgcagcgccgggccgccccgactccgagcggctgctgagatgagtgcagtgtcgcagccccaggctgctcccagcccgctggagaagtcgcccagcacggcgatcctgtgcaacacgtgtgggaatgtgtgcaagggcgaggtgctgcgggtgcaggacaagtacttccacatcaagtgcttcgtctgtaaagcatgtggctgcgacctggccgagggcggcttcttcgtgcggcagggcgagtacatctgcacgctggactaccagaggctctacggcacccgctgcttcagctgcgaccagttcattgagggtgaggtggtgtcggcgctgggcaagacctaccaccccgactgcttcgtgtgtgccgtctgccggctgcccttcccccccggggaccgagtgaccttcaacgggaaggaatgcatgtgccagaagtgttccctgcccgtatcggtgggcagcagcgcgcacctgtcccagggcctccgaagttgtgggggctgcggcacagaaatcaagaatggccaggccctggtagccttggacaagcactggcacttgggctgttttaagtgcaagagctgtgggaagctcctgaatgccgagtacatcagcaaggatgggctgccctactgcgaagctgactatcacgccaagttcggcatccgctgtgacagctgtgagaaatacatcacggggcgcgtgctggaggccggagagaagcactaccacccttcctgcgcgctatgtgtcaggtgcggccagatgtttgcagaaggcgaagagatgtatcttcaaggttcctccatctggcatccggcgtgtcgacaagcagccagaactgaagacagaaacaaggaaaccagaacttcctcagagagcatcatttctgtccctgcttccagcacctcagggtctccgagccgtgtgatttatgccaagcttggtggtgagatcctggactacagggacttggcagcccttcctaaaagtaaggccatctatgacatcgaccgccccgacatgatctcctactcaccctacatcagccactctgcaggggacaggcagagctacggcgagggggatcaggatgaccggtcctacaagcagtgtcggacctccagcccaagctccactgggtcggttagcctcgggcgctacactccgacctcacggtcaccacagcactacagccgtccaggcagtgaaagtggccggagcacccccagcctctccgtgctctctgacagcaagccgcccccctccacctaccagcaggcacctcgccacttccacgtcccagacactggcgtaaaagataacatctataggaaaccccctatctacagacagcatgctgccaggcgatcggatggggaggatggaagcttggaccaggataacaggaagaagagcagctggctgatgctcaagggggatgcagacacaaggaccaattctccagacctggacacccagtccttgtcccacagcagcgggaccgacagagaccctctccaaaggatggcaggggacagctttcactcacaatacaagatctatccgtatgactccctcatcgtcacaaaccgaattcgcgtgaaactgcccaaagacgtggaccggacgagactggagagacacttgtcgcccgaggagttccaggaagtgtttgggatgagcatcgaggagtttgaccgcctggccctctggaagaggaatgaccttaagaagaaagcccttttgttctgacggctgccagcctgccccactggtgtgtgccgggcgccgaggccaggggcccctggcgagaaccgcacacacccctcccacacaccttgctctggcttctctgtgtccatggggtgggcgggagggggtcccccagcaggtgcggcccctgcacctgccggcgacactcctgccggtagtttagggccgagacggctagcttcacgccacccttccccgctgtggcttggtgtcagggagaggctgtagagtggctgtgtcgggcatcagatggagcacacaggtggctgcagcccagcccaccttcccagcgttctcgaggtgccctggccccggtgctgggcacgtgggggacagaggtggccgggacgtgagctgtgaggcttgttgatgatggttgctgacaccatcatcgggggtgggcacacggcccttcggagcctgggcagcctggcctcacaggcagactcgcagacggggcagtgagcgtctgggacagtgccaagagtggggtgtgtgatttttgcaggcgtctgtgatgggtctctttagggacaaatgtcaacaagggacaagacagggcaccttccgccagcgcccctccatgcgctgcgttcctcctccagatcgacccctagatgcctacacaatatctttaaagtaacacagaagtttttattttattaaa

SEQ ID NO: 189 - DNA, 2291 bp, Homo sapiens
  source 1..2291: mol_type = unassigned DNA
gggcgggcggaggatagcgcgggcgcggcacctgcgggcccgagggtctggctgtcgcagcgccgggccgccccgactccgagcggctgctgagatgagtgcagtgtcgcagccccaggctgctcccagcccgctggagaagtcgcccagcacggcgatcctgtgcaacacgtgtgggaatgtgtgcaagggcgaggtgctgcgggtgcaggacaagtacttccacatcaagtgcttcgtctgtaaagcatgtggctgcgacctggccgagggcggcttcttcgtgcggcagggcgagtacatctgcacgctggactaccagaggctctacggcacccgctgcttcagctgcgaccagttcattgagggtgaggtggtgtcggcgctgggcaagacctaccaccccgactgcttcgtgtgtgccgtctgccggctgcccttcccccccggggaccgagtgaccttcaacgggaaggaatgcatgtgccagaagtgttccctgcccgtatcggtgggcagcagcgcgcacctgtcccagggcctccgaagttgtgggggctgcggcacagaaatcaagaatggccaggccctggtagccttggacaagcactggcacttgggctgttttaagtgcaagagctgtgggaagctcctgaatgccgagtacatcagcaaggatgggctgccctactgcgaagctgactatcacgccaagttcggcatccgctgtgacagctgtgagaaatacatcacggggcgcgtgctggaggccggagagaagcactaccacccttcctgcgcgctatgtgtcaggtgcggccagatgtttgcagaaggcgaagagatgtatcttcaaggttcctccatctggcatccggcgtgtcgacaagcagccagaactgaagacagaaacaaggaaaccagaacttcctcagagagcatcatttctgtccctgcttccagcacctcagggtctccgagccgtgtgatttatgccaagcttggtggtgagatcctggactacagggacttggcagcccttcctaaaagtaaggccatctatgacatcgaccgccccgacatgatctcctactcaccctacatcagccactctgcaggggacaggcagagctacggcgagggggatcaggatgaccggtcctacaagcagtgtcggacctccagcccaagctccactgggtcggttagcctcgggcgctacactccgacctcacggtcaccacagcactacagccgtccagctgccaggcgatcggatggggaggatggaagcttggaccaggataacaggaagcagaagagcagctggctgatgctcaagggggatgcagacacaaggaccaattctccagacctggacacccagtccttgtcccacagcagcgggaccgacagagaccctctccaaaggatggcaggggacagctttcactcacaatacaagatctatccgtatgactccctcatcgtcacaaaccgaattcgcgtgaaactgcccaaagacgtggaccggacgagactggagagacacttgtcgcccgaggagttccaggaagtgtttgggatgagcatcgaggagtttgaccgcctggccctctggaagaggaatgaccttaagaagaaagcccttttgttctgacggctgccagcctgccccactggtgtgtgccgggcgccgaggccaggggcccctggcgagaaccgcacacacccctcccacacaccttgctctggcttctctgtgtccatggggtgggcgggagggggtcccccagcaggtgcggcccctgcacctgccggcgacactcctgccggtagtttagggccgagacggctagcttcacgccacccttccccgctgtggcttggtgtcagggagaggctgtagagtggctgtgtcgggcatcagatggagcacacaggtggctgcagcccagcccaccttcccagcgttctcgaggtgccctggccccggtgctgggcacgtgggggacagaggtggccgggacgtgagctgtgaggcttgttgatgatggttgctgacaccatcatcgggggtgggcacacggcccttcggagcctgggcagcctggcctcacaggcagactcgcagacggggcagtgagcgtctgggacagtgccaagagtggggtgtgtgatttttgcaggcgtctgtgatgggtctctttagggacaaatgtcaacaagggacaagacagggcaccttccgccagcgcccctccatgcgctgcgttcctcctccagatcga

SEQ ID NO: 190 - DNA, 1680 bp, Homo sapiens
  source 1..1680: mol_type = unassigned DNA
atgagtgcagtgtcgcagccccaggctgctcccagcccgctggagaagtcgcccagcacggcgatcctgtgcaacacgtgtgggaatgtgtgcaagggcgaggtgctgcgggtgcaggacaagtacttccacatcaagtgcttcgtctgtaaagcatgtggctgcgacctggccgagggcggcttcttcgtgcggcagggcgagtacatctgcacgctggactaccagaggctctacggcacccgctgcttcagctgcgaccagttcattgagggtgaggtggtgtcggcgctgggcaagacctaccaccccgactgcttcgtgtgtgccgtctgccggctgcccttcccccccggggaccgagtgaccttcaacgggaaggaatgcatgtgccagaagtgttccctgcccgtatcggtgggcagcagcgcgcacctgtcccagggcctccgaagttgtgggggctgcggcacagaaatcaagaatggccaggccctggtagccttggacaagcactggcacttgggctgttttaagtgcaagagctgtgggaagctcctgaatgccgagtacatcagcaaggatgggctgccctactgcgaagctgactatcacgccaagttcggcatccgctgtgacagctgtgagaaatacatcacggggcgcgtgctggaggccggagagaagcactaccacccttcctgcgcgctatgtgtcaggtgcggccagatgtttgcagaaggcgaagagatgtatcttcaaggttcctccatctggcatccggcgtgtcgacaagcagccagaactgaagacagaaacaaggaaaccagaacttcctcagagagcatcatttctgtccctgcttccagcacctcagggtctccgagccgtgtgatttatgccaagcttggtggtgagatcctggactacagggacttggcagcccttcctaaaagtaaggccatctatgacatcgaccgccccgacatgatctcctactcaccctacatcagccactctgcaggggacaggcagagctacggcgagggggatcaggatgaccggtcctacaagcagtgtcggacctccagcccaagctccactgggtcggttagcctcgggcgctacactccgacctcacggtcaccacagcactacagccgtccagctgccaggcgatcggatggggaggatggaagcttggaccaggataacaggaagaagagcagctggctgatgctcaagggggatgcagacacaaggaccaattctccagacctggacacccagtccttgtcccacagcagcgggaccgacagagaccctctccaaaggatggcaggggacagctttcactcacgattcccctattccaaatctgaccctctcccaggacatggaaagaatggcttggaccagcggaatgccaatctggccccctgtggagcagacccggatgccagctggggcatgcgagaatacaagatctatccgtatgactccctcatcgtcacaaaccgaattcgcgtgaaactgcccaaagacgtggaccggacgagactggagagacacttgtcgcccgaggagttccaggaagtgtttgggatgagcatcgaggagtttgaccgcctggccctctggaagaggaatgaccttaagaagaaagcccttttgttctga

SEQ ID NO: 191 - DNA, 2573 bp, Homo sapiens
  source 1..2573: mol_type = unassigned DNA
tgcggcggcgctgcctggcgtgtgcgcaaggagcgggcgcggagccggcgggcgggcggaggatagcgcgggcgcggcacctgcgggcccgagggtctggctgtcgcagcgccgggccgccccgactccgagcggctgctgagatgagtgcagtgtcgcagccccaggctgctcccagcccgctggagaagtcgcccagcacggcgatcctgtgcaacacgtgtgggaatgtgtgcaagggcgaggtgctgcgggtgcaggacaagtacttccacatcaagtgcttcgtctgtaaagcatgtggctgcgacctggccgagggcggcttcttcgtgcggcagggcgagtacatctgcacgctggactaccagaggctctacggcacccgctgcttcagctgcgaccagttcattgagggtgaggtggtgtcggcgctgggcaagacctaccaccccgactgcttcgtgtgtgccgtctgccggctgcccttcccccccggggaccgagtgaccttcaacgggaaggaatgcatgtgccagaagtgttccctgcccgtatcggtgggcagcagcgcgcacctgtcccagggcctccgaagttgtgggggctgcggcacagaaatcaagaatggccaggccctggtagccttggacaagcactggcacttgggctgttttaagtgcaagagctgtgggaagctcctgaatgccgagtacatcagcaaggatgggctgccctactgcgaagctgactatcacgccaagttcggcatccgctgtgacagctgtgagaaatacatcacggggcgcgtgctggaggccggagagaagcactaccacccttcctgcgcgctatgtgtcaggtgcggccagatgtttgcagaaggcgaagagatgtatcttcaaggttcctccatctggcatccggcgtgtcgacaagcagccagaactgaagacagaaacaaggaaaccagaacttcctcagagagcatcatttctgtccctgcttccagcacctcagggtctccgagccgtgtgatttatgccaagcttggtggtgagatcctggactacagggacttggcagcccttcctaaaagtaaggccatctatgacatcgaccgccccgacatgatctcctactcaccctacatcagccactctgcaggggacaggcagagctacggcgagtcccctcagttgctctcgccaacgccgaccgagggggatcaggatgaccggtcctacaagcagtgtcggacctccagcccaagctccactgggtcggttagcctcgggcgctacactccgacctcacggtcaccacagcactacagccgtccagctgccaggcgatcggatggggaggatggaagcttggaccaggataacaggaagcagaagagcagctggctgatgctcaagggggatgcagacacaaggaccaattctccagacctggacacccagtccttgtcccacagcagcgggaccgacagagaccctctccaaaggatggcaggggacagctttcactcacgtgagtggttcttttgaagaaggagccgtgatgtgcacaaaatgcctcgcggcaaagaggccccagaactcagagctatccccctacatctaagccttgcctgttaaaaagcatgaaagcaaagcccacaaatctaaggaccgaccggaaggaaatatggggcttttgcagtttgccggcttcccaagaactgtccccgagccagtgtgctaacgagggccacgcctgcatgtcccctcacagatttccaaggtgtgcaagaatgcagaaacccagacctgctcctgggctgtttaggagaaaggcgtccgggctgccgggtggaagtcagggcctgttccctccagagcagacatgggcatggtccggctgatgagtgcagacttggagttggtgatgggcaccatccctgtcccctgtgactcatcctgaacgaggcacagcctcaggcttcatagagagacagtgatggtgtctgcctgaccctaggggtgttttgaagactgaatcaggagtgattttcaaatgtagagaaaactccagataatgctgtttgcttccggccgctgtaaatcataggtgaaaaccagtagcaagtgctcactcagtgcctcccagaagcggtctgcgggtctcagctgggctgggggcagttttcattgggcaaggcttgggcttagcttcgaagcaggggctgggagaggatggatgggggtgtgagagcagaagaaagacctggctttgcagtgaggcagtcccaagttcaaatctgagctcaccactgacccgtcgtgtgatgggcgccaggtgttaggagactggaactgggtatgtgtgtggcattcggccggccatagtagctgctcagtaaacagaaactgtttctcatcctcatcctcatcctcatgcctgcaaactgtaaaccgtcctacttaacaatgaaagtagaaaagtgtttcaatgtgacaggaaagagtgaagacacagaagcttggaaatgatgatgtgttaaagaatcactttaaacaaagaaa

SEQ ID NO: 192 - DNA, 1168 bp, Homo sapiens
  source 1..1168: mol_type = unassigned DNA
gagcaggcttggcgttgatttgcctctgtgagtggggagagcagggctttgtattttcacgctgaaaatcactgtctctcctggaagaaggagaaacaggtagccgttgagagtaacgagatgttagtgtattcggaacggaactgctcagtcttcaattttggccttatcttgtcaaggtcctgtagcccaatcccaaatttccaagctctctggcctggtatcagtcttgtccttggtggtgcaggaggcagggtacggcaaaagacagacgggcccgagcccgccgcccgctgcagctgccaggcgatcggatggggaggatggaagcttggaccaggataacaggaagcagaagagcagctggctgatgctcaagggggatgcagacacaaggaccaattctccagacctggacacccagtccttgtcccacagcagcgggaccgacagagaccctctccaaaggatggcaggggacagctttcactcacgtgagtggttcttttgaagaaggagccgtgatgtgcacaaaatgcctcgcggcaaagaggccccagaactcagagctatccccctacatctaagccttgcctgttaaaaagcatgaaagcaaagcccacaaatctaaggaccgaccggaaggaaatatggggcttttgcagtttgccggcttcccaagaactgtccccgagccagtgtgctaacgagggccacgcctgcatgtcccctcacagatttccaaggtgtgcaagaatgcagaaacccagacctgctcctgggctgtttaggagaaaggcgtccgggctgccgggtggaagtcagggcctgttccctccagagcagacatgggcatggtccggctgatgagtgcagacttggagttggtgatgggcaccatccctgtcccctgtgactcatcctgaacgaggcacagcctcaggcttcatagagagacagtgatggtgtctgcctgaccctaggggtgttttgaagactgaatcaggagtgattttcaaatgtagagaaaactccagataatgctgtttgcttccggccgctgtaaatcataggtgaaaaccagtagcaagtgctcactcagtgcctcccagaagcggtctgcgggtctcagctgggctgggggcagttttcattgggcaaggcttgg

SEQ ID NO: 193 - DNA, 1028 bp, Homo sapiens
  source 1..1028: mol_type = unassigned DNA
ggagcacggcactcaagcagggccgtcagactgggctctggtgcccagaagctgtgcaggccggagagaagcactaccacccttcctgcgcgctatgtgtcaggtgcggccagatgtttgcagaaggcgaagagatgtatcttcaaggttcctccatctggcatccggcgtgtcgacaagcagccagaactgaagacagaaacaaggaaaccagaacttcctcagagagcatcatttctgtccctgcttccagcacctcagggtctccgagccgtgtgatttatgccaagcttggtggtgagatcctggactacagggacttggcagcccttcctaaaagtaaggccatctatgacatcgaccgccccgacatgatctcctactcaccctacatcagccactctgcaggggacaggcagagctacggcgagtcccctcagttgctctcgccaacgccgaccgagggggatcaggatgaccggtcctacaagcagtgtcggacctccagcccaagctccactgggtcggttagcctcgggcgctacactccgacctcacggtcaccacagcactacagccgtccagctggtactgtgagtgtgggtaccagtagctgcctctccctgtcccaacacccaagccctacatccgtgttcagacatcattacatcccctacttccgaggcagtgaaagtggccggagcacccccagcctctccgtgctctctgacagcaagccgcccccctccacctaccagcaggcacctcgccacttccacgtcccagacactggcgtaaaagataacatctataggaaaccccctatctacagacagcatgctgccaggcgatcggatggggaggatggaagcttggaccaggataacaggaagaagagcagctggctgatgctcaagggggatgcagacacaaggaccaattctccagacctggacacccagtccttgtcccacagcagcgggaccgacagagaccctctccaaaggatggcaggggacagctttcac

SEQ ID NO: 194 - DNA, 545 bp, Homo sapiens
  source 1..545: mol_type = unassigned DNA
aggttttttccaggagaccctgctgctcagtgctgtaaacagccatggtggctcctttcttcttgcatcaggcagttacaagcatgggccaagcttggtggtgagatcctggactacagggacttggcagcccttcctaaaagtaaggccatctatgacatcgaccgccccgacatgatctcctactcaccctacatcagccactctgcaggggacaggcagagctacggcgagggggatcaggatgaccggtcctacaagcagtgtcggacctccagcccaagctccactgggtcggttagcctcgggcgctacactccgacctcacggtcaccacagcactacagccgtccagctggtactgtgagtgtgggtaccagtagctgcctctccctgtcccaacacccaagccctacatccgtgttcagacatcattacatcccctacttccgaggcagtgaaagtggccggagcacccccagcctctccgtgctctctgacagcaagccgcccccctccacctaccagcaggcacctcgccactt

SEQ ID NO: 195 - DNA, 297 bp, Homo sapiens
  source 1..297: mol_type = unassigned DNA
tgcggcggcgctgcctggcgtgtgcgcaaggagcgggcgcggagccggcgggcgggcggaggatagcgcgggcgcggcacctgcgggcccgagggtctggctgtcgcagcgccgggccgccccgactccgagcggctgctgagatgagtgcagtgtcgcagccccaggctgctcccagcccgctggagaagtcgcccagcacggcgatcctgtgcaacacgtgtgggaatgtgtgcaagggcgaggtgctgcgggtgcaggacaagtacttccacatcaagtgcttcgtctgtaaag

SEQ ID NO: 196 - DNA, 1972 bp, Homo sapiens
  source 1..1972: mol_type = unassigned DNA
gactccgagcggctgctgagatgagtgcagtgtcgcagccccaggctgctcccagcccgctggagaagtcgcccagcacggcgatcctgtgcaacacgtgtgggaatgtgtgcaagggcgaggtgctgcgggtgcaggacaagtacttccacatcaagtgcttcgtctgtaaagcatgtggctgcgacctggccgagggcggcttcttcgtgcggcagggcgagtacatctgcacgctggactaccagaggctctacggcacccgctgcttcagctgcgaccagttcattgagggtgaggtggtgtcggcgctgggcaagacctaccaccccgactgcttcgtgtgtgccgtctgccggctgcccttcccccccggggaccgagtgaccttcaacgggaaggaatgcatgtgccagaagtgttccctgcccgtatcggtgggcagcagcgcgcacctgtcccagggcctccgaagttgtgggggctgcggcacagaaatcaagaatggccaggccctggtagccttggacaagcactggcacttgggctgttttaagtgcaagagctgtgggaagctcctgaatgccgagtacatcagcaaggatgggctgccctactgcgaagctgactatcacgccaagttcggcatccgctgtgacagctgtgagaaatacatcacggggcgcgtgctggaggccggagagaagcactaccacccttcctgcgcgctatgtgtcaggtgcggccagatgtttgcagaaggcgaagagatgtatcttcaaggttcctccatctggcatccggcgtgtcgacaagcagccagaactgaagacagaaacaaggaaaccagaacttcctcagagagcatcatttctgtccctgcttccagcacctcagggtctccgagccgtgtgatttatgccaagcttggtggtgagatcctggactacagggacttggcagcccttcctaaaagtaaggccatctatgacatcgaccgccccgacatgatctcctactcaccctacatcagccactctgcaggggacaggcagagctacggcgagggggatcaggatgaccggtcctacaagcagtgtcggacctccagcccaagctccactgggtcggttagcctcgggcgctacactccgacctcacggtcaccacagcactacagccgtccagctggtactgtgagtgtgggtaccagtagctgcctctccctgtcccaacacccaagccctacatccgtgttcagacatcattacatcccctacttccgaggcagtgaaagtggccggagcacccccagcctctccgtgctctctgacagcaagccgccccccccacctaccagcaggcacctcgccacttccacgtcccaggccccagacactggcgtaaaagataacatctataggaaaccccctatctacagacagcatgctgccaggcgatcggatggggaggatggaagcttggaccaggataacaggaagcagaagagcagctggctgatgctcaagggggatgcagacacaaggaccaattctccagacctggacacccagtccttgtcccacagcagcgggaccgacagagaccctctccaaaggatggcaggggacagctttcactcacgattcccctattccaaatctgaccctctcccaggacatggaaagaatggcttggaccagcggaatgccaatctggccccctgtggagcagacccggatgccagctggggcatgcgagaacagatctatccgtatgactccctcatcgtcacaaaccgaattcgcgtgaaactgcccaaagacgtggaccggacgagactggagagacacttgtcgcccgaggagttccaggaagtgtttgggatgagcatcgaggagtttgaccgcctggccctctggaagaggaatgaccttaagaagaaagcccttttgttctgacggctgccagc

SEQ ID NO: 197 - DNA, 4164 bp, Homo sapiens
  source 1..4164: mol_type = unassigned DNA
gagcggccgcgccccctgcgctgccaacccgcgagcccgcatcatggatgtcgagctcccctatttcgcattgctagccctggaattcgagaccccagacgaggaccaggattcatgaaatcagtcgcaggggccggggcaggggcctctggctcccgacactggccgagaggtgatgagtgaggttcgaagaacggaagatttaaaaagcagccggggcctccgtattgaatgaaagacccagtgcaaagacatcaccatgaacactagcattccttatcagcagaatccttacaatccacggggcagctccaatgtcatccagtgctaccgctgtggagacacctgcaaaggggaagtggtccgcgtgcacaacaaccacttccacatcagatgcttcacctgtcaagtatgtggctgtggcctggcccagtcaggcttcttcttcaagaaccaggagtacatctgcacccaggactaccagcaactctatggcacccgctgtgacagctgccgggacttcatcacaggcgaagtcatctcggccctgggccgcacttaccaccccaagtgcttcgtgtgcagcttgtgcaggaagcctttccccattggagacaaggtgaccttcagcggtaaagaatgtgtgtgccaaacgtgctcccagtccatggccagcagtaagcccatcaagattcgtggaccaagccactgtgccgggtgcaaggaggagatcaagcacggccagtcactcctggctctggacaagcagtggcacgtcagctgcttcaagtgccagacctgcagcgtcatcctcaccggggagtatatcagcaaggatggtgttccatactgtgagtccgactaccatgcccagtttggcattaaatgtgagacttgtgaccgatacatcagtggcagagtcttggaggcaggagggaagcactaccacccaacctgtgccaggtgtgtacgctgccaccagatgttcaccgaaggagaggaaatgtacctcacaggttccgaggtttggcaccccatctgcaaacaggcagcccgggcagagaagaagttaaagcatagacggacatctgaaacctccatctcaccccctggatccagcattgggtcacccaaccgagtcatctgcgacatctacgagaacctggacctccggcagagacgggcctccagcccggggtacatagactcccccacctacagccggcagggcatgtcccccaccttctcccgctcacctcaccactactaccgctctgctggagacagtaacatctaccggaaacccccgatctacaaacggcatggtgatttgtctacagcaaccaagagcaaaacaagtgaagacatcagccagacctccaagtacagtcccatctactcgccagacccctactatgcttcggagtctgagtactggacctaccatgggtcccccaaagtgccccgagccagaaggttctcgtctggaggagaggaggatgattttgaccgcagcatgcacaagctccaaagtggaattggccggctgattctgaaggaagaaatgaaggcccggtcgagctcctatgcagatccctggacccctccccggagctccaccagcagccgggaagccctgcacacagctggctatgagatgtccctcaatggctcccctcggtcgcactacctggctgacagtgatcctctcatctccaaatctgcctccctgcctgcctaccgaagaaatgggctgcacaggacacccagcgcagacctcttccactacgacagcatgaacgcagtcaactggggcatgcgagagtacaagatctacccttatgaactgctgctggtgactacaagaggaagaaaccgactgcccaaggatgtagacaggacccgtttagagcgccacctgtcccaggaagagttctaccaagtctttggcatgaccatctctgagtttgaccggctggccctctggaagaggaatgaactgaagaagcaagcccggctgttctaggcagaggctctataaatatatatgcatttatataaagatatatgtaaaatctctctactgaagctcggtataatcctctcttgtgtaatgggacacactgcctgccatgagacttgcttttctgtactgtcaggcaagcccacgtcatcgagatatttttatgctccttactttctcttttctaagtgctgtgggatctgggaagggatttgaggggactctgtccttttattggggatcctttttatactgaaacatctgtcctaacttgagtgccccaaggtccaactctctttcctaaagaaggtgcctgaagaagtctctcttctctctgcttcgtggcccctttcttaaatttctagggctgatgctgaccatgtggtttccacaccttattggccccagaggggccctcccatgggaagatctgcagcagtctccccaaatcagtgagcacctttgagcgcccacgaagaactttctcaacacccccaattaggagctcagtgctctcttggggcaatgcagttaaaagggtgagcctcaaatctagtcattacaccagtcaacagaagtggacagggcctaggcctctcctcagctccttaaccctcctccttctgccctggattgtaacctctcccttgtccaaatctaggattcctggtaggaaaaggaaaaggcccttcccttccctccaccacttccaactggcccctttgcctgacctggacttggagaaccagaggaaaagagagggagcggaagtgggagatggagcagggcacctgttagaatcagagctgcaggatttcttgggaccctcctctctccctcactgctcccagcacctcctgacccttccctctttcaaggagaagcccatgattgcagcttgtattctttagccttattacaatctatgtgcctgacaactcaacacaccgcagggctaatgttcccaccagagctccaactgaacaaccagacagacaactctcatcatcctccagagagaaaataggccgtgtctcaaagaaaggttcttggtctatgcctctggtctgtgggctggcagggcaaccataccatacccccgccagtcctcggctcctgctgcaaagttggccatgtttcacagggaaacttttggaagagtggctgcttatgagattccaaaatgaagtgttggccaacaccgctcatggccatcctggattttcccagtggcttcccttcctgctcgcctccctgaacaggggagaaagcttaacctctcttctcctctccaaacctttcaccttgaatgggtaatgtttggtgggggctgttccttcttggagaagccttgagtcggaccattttgagatcatggaggaaggatgaagaagtgaaaatgacaataatgactctcaagaggctggcgatgtgacatggcaaatgtagaactgacttaaattgaacaaaccctcactgagcacctctgatgttgagcacctgctgaatactgagcactgaatgggggagggggaggggagcacggggtgagtcaacctgggactcggtctcagggatatgcctaccaatagcgggtatcgtaaggcatgtacccaaacataacggatgtaaggcagaaagtgatcggagaaggaatgagaaagtgtgcgtgatgttaatgaaaagtcatatgcagctagagcagacccaggaaagctttctggaagagattgcatctgaggaaattcaggaaggatctttgtagattggggggagattctaaattgaaggggtgatggggtgaggggccagagggaagtctgctgtgttctcatgtaggatgtcagccctccctgcaacttctctttttggccaatgtcttttcactttcctgaccctttagaatcatccccagccagacgcaatcatggaagttgccttattgtcactggttaagaacttggcgagattgaagggcttttgttattgttgttggatatttttgtttcccataaaagcacatcatttcaaccctaaacctgtgtgcttctgttgtttcttgtgtgggagtggaaatgactgacatgggaagaggctgaaccctgcacatttttcaaaatgaaagcaccaaaacagcagcc

SEQ ID NO: 198 - DNA, 4326 bp, Homo sapiens
  source 1..4326: mol_type = unassigned DNA
ctgccaacccgcgagcccgcatcatggatgtcgagctcccctatttcgcattgctagccctggaattcgagaccccagacgaggaccaggattcatgaaatcagtcgcaggggccggggcaggggcctctggctcccgacactggccgagaggtgatgagtgaggttcgaagaacggaagatttaaaaagcagccggggcctccgtattgaatgaaagacccagtgcaaagacatcaccatgaacactagcattccttatcagcagaatccttacaatccacggggcagctccaatgtcatccagtgctaccgctgtggagacacctgcaaaggggaagtggtccgcgtgcacaacaaccacttccacatcagatgcttcacctgtcaagtatgtggctgtggcctggcccagtcaggcttcttcttcaagaaccaggagtacatctgcacccaggactaccagcaactctatggcacccgctgtgacagctgccgggacttcatcacaggcgaagtcatctcggccctgggccgcacttaccaccccaagtgcttcgtgtgcagcttgtgcaggaagcctttccccattggagacaaggtgaccttcagcggtaaagaatgtgtgtgccaaacgtgctcccagtccatggccagcagtaagcccatcaagattcgtggaccaagccactgtgccgggtgcaaggaggagatcaagcacggccagtcactcctggctctggacaagcagtggcacgtcagctgcttcaagtgccagacctgcagcgtcatcctcaccggggagtatatcagcaaggatggtgttccatactgtgagtccgactaccatgcccagtttggcattaaatgtgagacttgtgaccgatacatcagtggcagagtcttggaggcaggagggaagcactaccacccaacctgtgccaggtgtgtacgctgccaccagatgttcaccgaaggagaggaaatgtacctcacaggttccgaggtttggcaccccatctgcaaacaggcagcccgggcagagaagaagttaaagcatagacggacatctgaaacctccatctcaccccctggatccagcattgggtcacccaaccgagtcatctgcgctaaagtggataatgagatccttaattacaaagacctggcggctctccccaaggttaagtctatctacgaggtacaacgccccgacctcatttcctatgagcctcattccagatacatgtccgacgagatgctggagagatgtggctatggagagtcgctgggaacattatctccctactcccaggacatctacgagaacctggacctccggcagagacgggcctccagcccggggtacatagactcccccacctacagccggcagggcatgtcccccaccttctcccgctcacctcaccactactaccgctctgggcccgagagtggccggagctctccataccatagccagttagatgtgaggtcctccactccaacctcttaccaggctcccaagcactttcacatcccagctggagacagtaacatctaccggaaacccccgatctacaaacggcatggtgatttgtctacagcaaccaagagcaaaacaagtgaagacatcagccagacctccaagtacagtcccatctactcgccagacccctactatgcttcggagtctgagtactggacctaccatgggtcccccaaagtgccccgagccagaaggttctcgtctggaggagaggaggatgattttgaccgcagcatgcacaagctccaaagtggaattggccggctgattctgaaggaagaaatgaaggcccggtcgagctcctatgcagatccctggacccctccccggagctccaccagcagccgggaagccctgcacacagctggctatgagatgtccctcaatggctcccctcggtcgcactacctggctgacagtgatcctctcatctccaaatctgcctccctgcctgcctaccgaagaaatgggctgcacaggacacccagcgcagacctcttccactacgacagcatgaacgcagtcaactggggcatgcgagagtacaagatctacccttatgaactgctgctggtgactacaagaggaagaaaccgactgcccaaggatgtagacaggacccgtttagagcgccacctgtcccaggaagagttctaccaagtctttggcatgaccatctctgagtttgaccggctggccctctggaagaggaatgaactgaagaagcaagcccggctgttctaggcagaggctctataaatatatatgcatttatataaagatatatgtaaaatctctctactgaagctcggtataatcctctcttgtgtaatgggacacactgcctgccatgagacttgcttttctgtactgtcaggcaagcccacgtcatcgagatatttttatgctccttactttctcttttctaagtgctgtgggatctgggaagggatttgaggggactctgtccttttattggggatcctttttatactgaaacatctgtcctaacttgagtgccccaaggtccaactctctttcctaaagaaggtgcctgaagaagtctctcttctctctgcttcgtggcccctttcttaaatttctagggctgatgctgaccatgtggtttccacaccttattggccccagaggggccctcccatgggaagatctgcagcagtctccccaaatcagtgagcacctttgagcgcccacgaagaactttctcaacacccccaattaggagctcagtgctctcttggggcaatgcagttaaaagggtgagcctcaaatctagtcattacaccagtcaacagaagtggacagggcctaggcctctcctcagctccttaaccctcctccttctgccctggattgtaacctctcccttgtccaaatctaggattcctggtaggaaaaggaaaaggcccttcccttccctccaccacttccaactggcccctttgcctgacctggacttggagaaccagaggaaaagagagggagcggaagtgggagatggagcagggcacctgttagaatcagagctgcaggatttcttgggaccctcctctctccctcactgctcccagcacctcctgacccttccctctttcaaggagaagcccatgattgcagcttgtattctttagccttattacaatctatgtgcctgacaactcaacacaccgcagggctaatgttcccaccagagctccaactgaacaaccagacagacaactctcatcatcctccagagagaaaataggccgtgtctcaaagaaaggttcttggtctatgcctctggtctgtgggctggcagggcaaccataccatacccccgccagtcctcggctcctgctgcaaagttggccatgtttcacagggaaacttttggaagagtggctgcttatgagattccaaaatgaagtgttggccaacaccgctcatggccatcctggattttcccagtggcttcccttcctgctcgcctccctgaacaggggagaaagcttaacctctcttctcctctccaaacctttcaccttgaatgggtaatgtttggtgggggctgttccttcttggagaagccttgagtcggaccattttgagatcatggaggaaggatgaagaagtgaaaatgacaataatgactctcaagaggctggcgatgtgacatggcaaatgtagaactgacttaaattgaacaaaccctcactgagcacctctgatgttgagcacctgctgaatactgagcactgaatgggggagggggaggggagcacggggtgagtcaacctgggactcggtctcagggatatgcctaccaatagcgggtatcgtaaggcatgtacccaaacataacggatgtaaggcagaaagtgatcggagaaggaatgagaaagtgtgcgtgatgttaatgaaaagtcatatgcagctagagcagacccaggaaagctttctggaagagattgcatctgaggaaattcaggaaggatctttgtagattggggggagattctaaattgaaggggtgatggggtgaggggccagagggaagtctgctgtgttctcatgtaggatgtcagccctccctgcaacttctctttttggccaatgtcttttcactttcctgaccctttagaatcatccccagccagacgcaatcatggaagttgccttattgtcactggttaagaacttggcgagattgaagggcttttgttattgttgttggatatttttgtttcccataaaagcacatcatttcaaccctaaa

SEQ ID NO: 199 - DNA, 4569 bp, Homo sapiens
  source 1..4569: mol_type = unassigned DNA
ggccggggcaggggcctctggctcccgacactggccgagaggtgggttccggggcgggtcgctgctccttgaagccgggcggggacgcgctgcccccgccctgcctccctgtggtccacaccccctttgggctccggagccgctgggcaggaatagtccggggtgcgcgcgagcaggcgctgccaaccccacttctgcccgggattccaatctgaggagcaggaggaccggggcgccggtgtcctgccgcctccttctccttgctctcacctgcgcctattagtccacgcgccttcaaggccaggggctacagcccagacagagaggggacagcagagggagagagagcacctgaggatacagagctggcactggactgccttttcaccccccaggtgatgagtgaggttcgaagaacggaagatttaaaaagcagccggggcctccgtattgaatgaaagacccagtgcaaagacatcaccatgaacactagcattccttatcagcagaatccttacaatccacggggcagctccaatgtcatccagtgctaccgctgtggagacacctgcaaaggggaagtggtccgcgtgcacaacaaccacttccacatcagatgcttcacctgtcaagtatgtggctgtggcctggcccagtcaggcttcttcttcaagaaccaggagtacatctgcacccaggactaccagcaactctatggcacccgctgtgacagctgccgggacttcatcacaggcgaagtcatctcggccctgggccgcacttaccaccccaagtgcttcgtgtgcagcttgtgcaggaagcctttccccattggagacaaggtgaccttcagcggtaaagaatgtgtgtgccaaacgtgctcccagtccatggccagcagtaagcccatcaagattcgtggaccaagccactgtgccgggtgcaaggaggagatcaagcacggccagtcactcctggctctggacaagcagtggcacgtcagctgcttcaagtgccagacctgcagcgtcatcctcaccggggagtatatcagcaaggatggtgttccatactgtgagtccgactaccatgcccagtttggcattaaatgtgagacttgtgaccgatacatcagtggcagagtcttggaggcaggagggaagcactaccacccaacctgtgccaggtgtgtacgctgccaccagatgttcaccgaaggagaggaaatgtacctcacaggttccgaggtttggcaccccatctgcaaacaggcagcccgggcagagaagaagttaaagcatagacggacatctgaaacctccatctcaccccctggatccagcattgggtcacccaaccgagtcatctgcgctaaagtggataatgagatccttaattacaaagacctggcggctctccccaaggttaagtctatctacgaggtacaacgccccgacctcatttcctatgagcctcattccagatacatgtccgacgagatgctggagagatgtggctatggagagtcgctgggaacattatctccctactcccaggacatctacgagaacctggacctccggcagagacgggcctccagcccggggtacatagactcccccacctacagccggcagggcatgtcccccaccttctcccgctcacctcaccactactaccgctctgggcccgagagtggccggagctctccataccatagccagttagatgtgaggtcctccactccaacctcttaccaggctcccaagcactttcacatcccagctggagacagtaacatctaccggaaacccccgatctacaaacggcatggtgatttgtctacagcaaccaagagcaaaacaagtgaagacatcagccagacctccaagtacagtcccatctactcgccagacccctactatgcttcggagtctgagtactggacctaccatgggtcccccaaagtgccccgagccagaaggttctcgtctggaggagaggaggatgattttgaccgcagcatgcacaagctccaaagtggaattggccggctgattctgaaggaagaaatgaaggcccggtcgagctcctatgcagatccctggacccctccccggagctccaccagcagccgggaagccctgcacacagctggctatgagatgtccctcaatggctcccctcggtcgcactacctggctgacagtgatcctctcatctccaaatctgcctccctgcctgcctaccgaagaaatgggctgcacaggacacccagcgcagacctcttccactacgacagcatgaacgcagtcaactggggcatgcgagagtacaagatctacccttatgaactgctgctggtgactacaagaggaagaaaccgactgcccaaggatgtagacaggacccgtttagagcgccacctgtcccaggaagagttctaccaagtctttggcatgaccatctctgagtttgaccggctggccctctggaagaggaatgaactgaagaagcaagcccggctgttctaggcagaggctctataaatatatatgcatttatataaagatatatgtaaaatctctctactgaagctcggtataatcctctcttgtgtaatgggacacactgcctgccatgagacttgcttttctgtactgtcaggcaagcccacgtcatcgagatatttttatgctccttactttctcttttctaagtgctgtgggatctgggaagggatttgaggggactctgtccttttattggggatcctttttatactgaaacatctgtcctaacttgagtgccccaaggtccaactctctttcctaaagaaggtgcctgaagaagtctctcttctctctgcttcgtggcccctttcttaaatttctagggctgatgctgaccatgtggtttccacaccttattggccccagaggggccctcccatgggaagatctgcagcagtctccccaaatcagtgagcacctttgagcgcccacgaagaactttctcaacacccccaattaggagctcagtgctctcttggggcaatgcagttaaaagggtgagcctcaaatctagtcattacaccagtcaacagaagtggacagggcctaggcctctcctcagctccttaaccctcctccttctgccctggattgtaacctctcccttgtccaaatctaggattcctggtaggaaaaggaaaaggcccttcccttccctccaccacttccaactggcccctttgcctgacctggacttggagaaccagaggaaaagagagggagcggaagtgggagatggagcagggcacctgttagaatcagagctgcaggatttcttgggaccctcctctctccctcactgctcccagcacctcctgacccttccctctttcaaggagaagcccatgattgcagcttgtattctttagccttattacaatctatgtgcctgacaactcaacacaccgcagggctaatgttcccaccagagctccaactgaacaaccagacagacaactctcatcatcctccagagagaaaataggccgtgtctcaaagaaaggttcttggtctatgcctctggtctgtgggctggcagggcaaccataccatacccccgccagtcctcggctcctgctgcaaagttggccatgtttcacagggaaacttttggaagagtggctgcttatgagattccaaaatgaagtgttggccaacaccgctcatggccatcctggattttcccagtggcttcccttcctgctcgcctccctgaacaggggagaaagcttaacctctcttctcctctccaaacctttcaccttgaatgggtaatgtttggtgggggctgttccttcttggagaagccttgagtcggaccattttgagatcatggaggaaggatgaagaagtgaaaatgacaataatgactctcaagaggctggcgatgtgacatggcaaatgtagaactgacttaaattgaacaaaccctcactgagcacctctgatgttgagcacctgctgaatactgagcactgaatgggggagggggaggggagcacggggtgagtcaacctgggactcggtctcagggatatgcctaccaatagcgggtatcgtaaggcatgtacccaaacataacggatgtaaggcagaaagtgatcggagaaggaatgagaaagtgtgcgtgatgttaatgaaaagtcatatgcagctagagcagacccaggaaagctttctggaagagattgcatctgaggaaattcaggaaggatctttgtagattggggggagattctaaattgaaggggtgatggggtgaggggccagagggaagtctgctgtgttctcatgtaggatgtcagccctccctgcaacttctctttttggccaatgtcttttcactttcctgaccctttagaatcatccccagccagacgcaatcatggaagttgccttattgtcactggttaagaacttggcgagattgaagggcttttgttattgttgttggatatttttgtttcccataaaagcacatcatttcaaccctaaa

SEQ ID NO: 200 - DNA, 4178 bp, Homo sapiens
  source 1..4178: mol_type = unassigned DNA
agccgctgggcaggaatagtccggggtgcgcgcgagcaggcgctgccaaccccacttctgcccgggattccaatctgaggagcaggaggaccggggcgccggtgtcctgccgcctccttctccttgctctcacctgcgcctattagtccacgcgccttcaaggccaggggctacagcccagacagagaggggacagcagagggagagagagcacctgaggatacagagctggcactggactgccttttcaccccccaggtgatgagtgaggttcgaagaacggaagatttaaaaagcagccggggcctccgtattgaatgaaagacccagtgcaaagacatcaccatgaacactagcattccttatcagcagaatccttacaatccacggggcagctccaatgtcatccagtgctaccgctgtggagacacctgcaaaggggaagtggtccgcgtgcacaacaaccacttccacatcagatgcttcacctgtcaagtatgtggctgtggcctggcccagtcaggcttcttcttcaagaaccaggagtacatctgcacccaggactaccagcaactctatggcacccgctgtgacagctgccgggacttcatcacaggcgaagtcatctcggccctgggccgcacttaccaccccaagtgcttcgtgtgcagcttgtgcaggacatctccagggatggagagctcatccctgcctcctgctttaccttccgcatcaccatcacttgttaattcagcaagtgaagcctttccccattggagacaaggtgaccttcagcggtaaagaatgtgtgtgccaaacgtgctcccagtccatggccagcagtaagcccatcaagattcgtggaccaagccactgtgccgggtgcaaggaggagatcaagcacggccagtcactcctggctctggacaagcagtggcacgtcagctgcttcaagtgccagacctgcagcgtcatcctcaccggggagtatatcagcaaggatggtgttccatactgtgagtccgactaccatgcccagtttggcattaaatgtgagacttgtgaccgatacatcagtggcagagtcttggaggcaggagggaagcactaccacccaacctgtgccaggtgtgtacgctgccaccagatgttcaccgaaggagaggaaatgtacctcacaggttccgaggtttggcaccccatctgcaaacaggcagcccgggcagagaagaagttaaagcatagacggacatctgaaacctccatctcaccccctggatccagcattgggtcacccaaccgagtcatctgcgacatctacgagaacctggacctccggcagagacgggcctccagcccggggtacatagactcccccacctacagccggcagggcatgtcccccaccttctcccgctcacctcaccactactaccgctctggtgatttgtctacagcaaccaagagcaaaacaagtgaagacatcagccagacctccaagtacagtcccatctactcgccagacccctactatgcttcggagtctgagtactggacctaccatgggtcccccaaagtgccccgagccagaaggttctcgtctggaggagaggaggatgattttgaccgcagcatgcacaagctccaaagtggaattggccggctgattctgaaggaagaaatgaaggcccggtcgagctcctatgcagatccctggacccctccccggagctccaccagcagccgggaagccctgcacacagctggctatgagatgtccctcaatggctcccctcggtcgcactacctggctgacagtgatcctctcatctccaaatctgcctccctgcctgcctaccgaagaaatgggctgcacaggacacccagcgcagacctcttccactacgacagcatgaacgcagtcaactggggcatgcgagagtacaagatctacccttatgaactgctgctggtgactacaagaggaagaaaccgactgcccaaggatgtagacaggacccgtttagagcgccacctgtcccaggaagagttctaccaagtctttggcatgaccatctctgagtttgaccggctggccctctggaagaggaatgaactgaagaagcaagcccggctgttctaggcagaggctctataaatatatatgcatttatataaagatatatgtaaaatctctctactgaagctcggtataatcctctcttgtgtaatgggacacactgcctgccatgagacttgcttttctgtactgtcaggcaagcccacgtcatcgagatatttttatgctccttactttctcttttctaagtgctgtgggatctgggaagggatttgaggggactctgtccttttattggggatcctttttatactgaaacatctgtcctaacttgagtgccccaaggtccaactctctttcctaaagaaggtgcctgaagaagtctctcttctctctgcttcgtggcccctttcttaaatttctagggctgatgctgaccatgtggtttccacaccttattggccccagaggggccctcccatgggaagatctgcagcagtctccccaaatcagtgagcacctttgagcgcccacgaagaactttctcaacacccccaattaggagctcagtgctctcttggggcaatgcagttaaaagggtgagcctcaaatctagtcattacaccagtcaacagaagtggacagggcctaggcctctcctcagctccttaaccctcctccttctgccctggattgtaacctctcccttgtccaaatctaggattcctggtaggaaaaggaaaaggcccttcccttccctccaccacttccaactggcccctttgcctgacctggacttggagaaccagaggaaaagagagggagcggaagtgggagatggagcagggcacctgttagaatcagagctgcaggatttcttgggaccctcctctctccctcactgctcccagcacctcctgacccttccctctttcaaggagaagcccatgattgcagcttgtattctttagccttattacaatctatgtgcctgacaactcaacacaccgcagggctaatgttcccaccagagctccaactgaacaaccagacagacaactctcatcatcctccagagagaaaataggccgtgtctcaaagaaaggttcttggtctatgcctctggtctgtgggctggcagggcaaccataccatacccccgccagtcctcggctcctgctgcaaagttggccatgtttcacagggaaacttttggaagagtggctgcttatgagattccaaaatgaagtgttggccaacaccgctcatggccatcctggattttcccagtggcttcccttcctgctcgcctccctgaacaggggagaaagcttaacctctcttctcctctccaaacctttcaccttgaatgggtaatgtttggtgggggctgttccttcttggagaagccttgagtcggaccattttgagatcatggaggaaggatgaagaagtgaaaatgacaataatgactctcaagaggctggcgatgtgacatggcaaatgtagaactgacttaaattgaacaaaccctcactgagcacctctgatgttgagcacctgctgaatactgagcactgaatgggggagggggaggggagcacggggtgagtcaacctgggactcggtctcagggatatgcctaccaatagcgggtatcgtaaggcatgtacccaaacataacggatgtaaggcagaaagtgatcggagaaggaatgagaaagtgtgcgtgatgttaatgaaaagtcatatgcagctagagcagacccaggaaagctttctggaagagattgcatctgaggaaattcaggaaggatctttgtagattggggggagattctaaattgaaggggtgatggggtgaggggccagagggaagtctgctgtgttctcatgtaggatgtcagccctccctgcaacttctctttttggccaatgtcttttcactttcctgaccctttagaatcatccccagccagacgcaatcatggaagttgccttattgtcactggttaagaacttggcgagattgaagggcttttgttattgttgttggatatttttgtttcccataaaagcacatcatttcaaccctaaa

SEQ ID NO: 201 - DNA, 2774 bp, Homo sapiens
  source 1..2774: mol_type = unassigned DNA
caatctgaggagcaggaggaccggggcgccggtgtcctgccgcctccttctccttgctctcacctgcgcctattagtccacgcgccttcaaggccaggggctacagcccagacagagaggggacagcagagggagagagagcacctgaggatacagagctggcactggactgccttttcaccccccaggtgatgagtgaggttcgaagaacggaagatttaaaaagcagccggggcctccgtattgaatgaaagacccagtgcaaagacatcaccatgaacactagcattccttatcagcagaatccttacaatccacggggcagctccaatgtcatccagtgctaccgctgtggagacacctgcaaaggggaagtggtccgcgtgcacaacaaccacttccacatcagatgcttcacctgtcaagtatgtggctgtggcctggcccagtcaggcttcttcttcaagaaccaggagtacatctgcacccaggactaccagcaactctatggcacccgctgtgacagctgccgggacttcatcacaggcgaagtcatctcggccctgggccgcacttaccaccccaagtgcttcgtgtgcagcttgtgcaggaagcctttccccattggagacaaggtgaccttcagcggtaaagaatgtgtgtgccaaacgtgctcccagtccatggccagcagtaagcccatcaagattcgtggaccaagccactgtgccgggtgcaaggaggagatcaagcacggccagtcactcctggctctggacaagcagtggcacgtcagctgcttcaagtgccagacctgcagcgtcatcctcaccggggagtatatcagcaaggatggtgttccatactgtgagtccgactaccatgcccagtttggcattaaatgtgagacttgtgaccgatacatcagtggcagagtcttggaggcaggagggaagcactaccacccaacctgtgccaggtgtgtacgctgccaccagatgttcaccgaaggagaggaaatgtacctcacaggttccgaggtttggcaccccatctgcaaacaggcagcccgggcagagaagaagttaaagcatagacggacatctgaaacctccatctcaccccctggatccagcattgggtcacccaaccgagtcatctgcgacatctacgagaacctggacctccggcagagacgggcctccagcccggggtacatagactcccccacctacagccggcagggcatgtcccccaccttctcccgctcacctcaccactactaccgctctggtgatttgtctacagcaaccaagagcaaaacaagtgaagacatcagccagacctccaagtacagtcccatctactcgccagacccctactatgcttcggagtctgagtactggacctaccatgggtcccccaaagtgccccgagccagaaggttctcgtctggaggagaggaggatgattttgaccgcagcatgcacaagctccaaagtggaattggccggctgattctgaaggaagaaatgaaggcccggtcgagctcctatgcagatccctggacccctccccggagctccaccagcagccgggaagccctgcacacagctggctatgagatgtccctcaatggctcccctcggtcgcactacctggctgacagtgatcctctcatctccaaatctgcctccctgcctgcctaccgaagaaatgggctgcacaggacacccagcgcagacctcttccactacgacagcatgaacgcagtcaactggggcatgcgagagtacaagatctacccttatgaactgctgctggtgactacaagaggaagaaaccgactgcccaaggatgtagacaggacccgtttagagggaaacttttggaagagtggctgcttatgagattccaaaatgaagtgttggccaacaccgctcatggccatcctggattttcccagtggcttcccttcctgctcgcctccctgaacaggggagaaagcttaacctctcttctcctctccaaacctttcaccttgaatgggtaatgtttggtgggggctgttccttcttggagaagccttgagtcggaccattttgagatcatggaggaaggatgaagaagtgaaaatgacaataatgactctcaagaggctggcgatgtgacatggcaaatgtagaactgacttaaattgaacaaaccctcactgagcacctctgatgttgagcacctgctgaatactgagcactgaatgggggagggggaggggagcacggggtgagtcaacctgggactcggtctcagggatatgcctaccaatagcgggtatcgtaaggcatgtacccaaacataacggatgtaaggcagaaagtgatcggagaaggaatgagaaagtgtgcgtgatgttaatgaaaagtcatatgcagctagagcagacccaggaaagctttctggaagagattgcatctgaggaaattcaggaaggatctttgtagattggggggagattctaaattgaaggggtgatggggtgaggggccagagggaagtctgctgtgttctcatgtaggatgtcagccctccctgcaacttctctttttggccaatgtcttttcactttcctgaccctttagaatcatccccagccagacgcaatcatggaagttgccttattgtcactggttaagaacttggcgagattgaagggcttttgttattgttgttggatatttttgtttcccataaaagcacatcatttcaaccctaaa

SEQ ID NO: 202 - DNA, 2011 bp, Homo sapiens
  source 1..2011: mol_type = unassigned DNA
cagccggggcctccgtattgaatgaaagacccagtgcaaagacatcaccatgaacactagcattccttatcagcagaatccttacaatccacggggcagctccaatgtcatccagtgctaccgctgtggagacacctgcaaaggggaagtggtccgcgtgcacaacaaccacttccacatcagatgcttcacctgtcaagtatgtggctgtggcctggcccagtcaggcttcttcttcaagaaccaggagtacatctgcacccaggactaccagcaactctatggcacccgctgtgacagctgccgggacttcatcacaggcgaagtcatctcggccctgggccgcacttaccaccccaagtgcttcgtgtgcagcttgtgcaggaagcctttccccattggagacaaggtgaccttcagcggtaaagaatgtgtgtgccaaacgtgctcccagtccatggccagcagtaagcccatcaagattcgtggaccaagccactgtgccgggtgcaaggaggagatcaagcacggccagtcactcctggctctggacaagcagtggcacgtcagctgcttcaagtgccagacctgcagcgtcatcctcaccggggagtatatcagcaaggatggtgttccatactgtgagtccgactaccatgcccagtttggcattaaatgtgagacttgtgaccgatacatcagtggcagagtcttggaggcaggagggaagcactaccacccaacctgtgccaggtgtgtacgctgccaccagatgttcaccgaaggagaggaaatgtacctcacaggttccgaggtttggcaccccatctgcaaacaggcagcccgggcagagaagaagttaaagcatagacggacatctgaaacctccatctcaccccctggatccagcattgggtcacccaaccgagtcatctgcgctaaagtggataatgagatccttaattacaaagacctggcggctctccccaaggttaagtctatctacgaggtacaacgccccgacctcatttcctatgagcctcattccagatacatgtccgacgagatgctggagagatgtggctatggagagtcgctgggaacattatctccctactcccaggacatctacgagaacctggacctccggcagagacgggcctccagcccggggtacatagactcccccacctacagccggcagggcatgtcccccaccttctcccgctcacctcaccactactaccgctctgctggagacagtaacatctaccggaaacccccgatctacaaacggcatggtgatttgtctacagcaaccaagagcaaaacaagtgaagacatcagccagacctccaagtacagtcccatctactcgccagacccctactatgcttcggagtctgagtactggacctaccatgggtcccccaaagtgccccgagccagaaggttctcgtctggaggagaggaggatgattttgaccgcagcatgcacaagctccaaagtggaattggccggctgattctgaaggaagaaatgaaggcccggtcgagctcctatgcagatccctggacccctccccggagctccaccagcagccgggaagccctgcacacagctggctatgagatgtccctcaatggctcccctcggtcgcactacctggctgacagtgatcctctcatctccaaatctgcctccctgcctgcctaccgaagaaatgggctgcacaggacacccagcgcagacctcttccactacgacagcatgaacgcagtcaactggggcatgcgagagtacaagatctacccttatgaactgctgctggtgactacaagaggaagaaaccgactgcccaaggatgtagacaggacccgtttagagcgccacctgtcccaggaagagttctaccaagtctttggcatgaccatctctgagtttgaccggctggccctctggaagaggaatgaactgaagaagcaagcccggctgttctaggcagaggct

SEQ ID NO: 203 - DNA, 530 bp, Homo sapiens
  source 1..530: mol_type = unassigned DNA
gcacaacaaccacttccacatcagatgcttcacctgtcaagtatgtggctgtggcctggcccagtcaggcttcttcttcaagaaccaggagtacatctgcacccaggactaccagcaactctatggcacccgctgtgacagctgccgggacttcatcacaggcgaagtcatctcggccctgggccgcacttaccaccccaagtgcttcgtgtgcagcttgtgcaggaagcctttccccattggagacaaggtgaccttcagcggtaaagaatgtgtgtgccaaacgtgctcccagtccatggccagcagtaagcccatcaagattcgtggaccaagccgtgagtcctccccacgggtatctccctgtccatgggtgtgatctctctgggctcccctttcccagcactgccaactgctcccacgggcctggagggaagtgggagaggttcccaacctggaggcctcctgcatcatgaccccattggcatgtggcccagactcacaagcttcacaagcacaatgcagggaag

SEQ ID NO: 204 - DNA, 557 bp, Homo sapiens
  source 1..557: mol_type = unassigned DNA
atctcaccccctggatccagcattgggtcacccaaccgagtcatctgcgctaaagtggataatgagatccttaattacaaagacctggcggctctccccaaggttaagtctatctacgaggtacaacgccccgacctcatttcctatgagcctcattccagatacatgtccgacgagatgctggagagatgtggctatggagagtcgctgggaacattatctccctactcccaggacatctacgagaacctggacctccggcagagacgggcctccagcccggggtacatagactcccccacctacagccggcagggcatgtcccccaccttctcccgctcacctcaccactactaccgctctgggcccgagagtggccggagctctccataccatagccagttagatgtgaggtcctccactccaacctcttaccaggctcccaagcactttcacatcccagctggagacagtaacatctaccggaaacccccgatctacaaacggcatggtatggtcagaggtagatagggcttggccacacaaggagagggggg

SEQ ID NO: 205 - DNA, 466 bp, Homo sapiens
  source 1..466: mol_type = unassigned DNA
gctaaagtggataatgagatccttaattacaaagacctggcggctctccccaaggttaagtctatctacgaggtacaacgccccgacctcatttcctatgagcctcattccagatacatgtccgacgagatgctggagagatgtggctatggagagtcgctgggaacattatctccctactcccaggacatctacgagaacctggacctccggcagagacgggcctccagcccggggtacatagactcccccacctacagccggcagggcatgtcccccaccttctcccgctcacctcaccactactaccgctctgccaggaagcaaagtcaagcttgtttctgccaacgtggtgcatgagagcacatgctgcttccgccccggaacctgagcacgctgagacgccccagcccatcccccatctctgctgtcatcacctcaccacttcctaaactgccaccgcgtt

SEQ ID NO: 206 - DNA, 2287 bp, Homo sapiens
  source 1..2287: mol_type = unassigned DNA
ctaagcctcgattgaaggagcacatcccttccattgaagctgcagaggagcagctgccaccctgtgcacccacacttgcttaagggtctagctggataacaaaaggaggcccagaatcggtggagcttggagatgagcgaagcagtcctgcaccaggttctgaactaattagctggtggaggggacaatacgagtttaaacagcggctctgggtgcctaagattctacattttatacagacatccttggttccagagggggctgagcaggggggtccgaggtgagtctgtgagcatgtgcaagtctgtaccagcttgtgaaggacatgccatgtcccctgagtactcatagaaagacaccaacatgacaaaggtagtttggctttatacctagaaaaggcccccaggtcacaagcttctcaggactttgtgggattttccaggtgggccctgaggggtggcactaaagcagactcaagaggagtctggggtggaggtgggttgcttggaaaagagggcggaggaaaaagctaaatgcagtcagccaggaggggctgcccaggacccaagtcaaagagaagaatttgaaagctttggaagcaagtgctgttgtgggggctgcatagcccagggctggctgaagctgatccaccacgctctgccactctggctccacagagcacagagcttgtccctaaagcttcctgtagctgaccatgagaaatggtcatgcagccacacacacttccccagcccctctctctgctctaccagcctgtcacccacgtttgggccacgagaagtcactgctctgtaagtagttgtgactgcagtgggtctttttggtcacccctgtcctgggcttacttcaggtggaagcttgaagctggatggcagctgagccagcagaccgattctgacacttacagatgaggaaactaaggcagagatggtaggacctgcccagtgttacagctgagtaaagtggcagagctgggaccagaacccaggtttgctgactccctgtctagcactccttccttcaggctatgtagtccctgagcagaatgtggcatctcaggttgtgagaaatgatggagttcaaatttataacaaggaaggcttctaaagggctaggaaggcttctaaagggctggggctcacctgggacctgtccagtcttatttgaggagccacacccttagaggtcattctggaacagacctgggaatccatggaatgtgctggaaagagccctgggctgggatctggtccagttctggtgctcacatgctatgtggtcttaagcaagccccttcccctctctggtgctccaattactaaatgcaaaatgagggtttggccccagtgcttttccagctccgatgctccatggcccagttctaacagagagccctgatcttgaagtggactcactcccctgggctggagcctggtaaagataggaaaagggtacacagtcccatcccggtcactctgccttcctgaagtgctctccttgggtcctctgcaggtgatttgtctacagcaaccaagagcaaaacaagtgaagacatcagccagacctccaagtacagtcccatctactcgccagacccctactatgcttcggagtctgagtactggacctaccatgggtcccccaaagtgccccgagccagaaggttctcgtctggaggagaggaggatgattttgaccgcagcatgcacaagctccaaagtggaattggccggctgattctgaaggaagaaatgaaggcccggtcgagctcctatgcagatccctggacccctccccggagctccaccagcagccgggaagccctgcacacagctggctatgagatgtccctcaatggctcccctcggtcgcactacctggctgacagtgatcctctcatctccaaatctgcctccctgcctgcctaccgaagaaatgggctgcacaggacacccagcgcagacctcttccactacgacagcatgaacgcagtcaactggggcatgcgagagtacaagatctacccttatgaactgctgctggtgactacaagaggaagaaaccgactgcccaaggatgtagacaggacccgtttagagcgccacctgtcccaggaagagttctaccaagtctttggcatgaccatctctgagtttgaccggctggccctctggaagaggaatgaactgaagaagcaagcccggctgttctaggcagaggctctataaatatatatgcatttatataaagatatatgtaaaatctc

SEQ ID NO: 207 - DNA, 778 bp, Homo sapiens
  source 1..778: mol_type = unassigned DNA
caacatttcctgtcccttcttggcccacttttcctgaatcctgccctaggtctcttgcctactgaaatcagatactctccctgggcttcagagacactctgttggcttgccagtcaccaaatattagacacttacattcgggaggtcatgtgcccatattattccatgggcacatggcaaatacctccaagcttattcctagtagtattaggggactctcttgggccttgtcttttgagagaaggtatcttaagactgctgggcaaccccaagaagggcagatccagctcttcctccagacttaatttctggccatttctggatagaacagagagcccagacacaaaatgtacctgaaaggaacaagcccaccaccctcacccaagctggagaccacccccctttctccttagatctacccttatgaactgctgctggtgactacaagaggaagaaaccgactgcccaaggatgtagacaggacccgtttagagcgccacctgtcccaggaagagttctaccaagtctttggcatgaccatctctgagtttgaccggctggccctctggaagaggaatgaactgaagaagcaagcccggctgttctaggcagaggctctataaatatatatgcatttatataaagatatatgtaaaatctctctactgaagctcggtataatcctctcttgtgtaatgggacacactgcctgccatgagacttgcttttctgtactgtcaggcaagcccacgtcatcgagatatttttatgctcctta

SEQ ID NO: 208 - DNA, 2290 bp, Homo sapiens
  source 1..2290: mol_type = unassigned DNA
ctaagcctcgattgaaggagcacatcccttccattgaagctgcagaggagcagctgccaccctgtgcacccacacttgcttaagggtctagctggataacaaaaggaggcccagaatcggtggagcttggagatgagcgaagcagtcctgcaccaggttctgaactaattagctggtggaggggacaatacgagtttaaacagcggctctgggtgcctaagattctacattttatacagacatccttggttccagagggggctgagcaggggggtccgaggtgagtctgtgagcatgtgcaagtctgtaccagcttgtgaaggacatgccatgtcccctgagtactcatagaaagacaccaacatgacaaaggtagtttggctttatacctagaaaaggcccccaggtcacaagcttctcaggactttgtgggattttccaggtgggccctgaggggtggcactaaagcagactcaagaggagtctggggtggaggtgggttgcttggaaaagagggcggaggaaaaagctaaatgcagtcagccaggaggggctgcccaggacccaagtcaaagagaagaatttgaaagctttggaagcaagtgctgttgtgggggctgcatagcccagggctggctgaagctgatccaccacgctctgccactctggctccacagagcacagagcttgtccctaaagcttcctgtagctgaccatgagaaatggtcatgcagccacacacacttccccagcccctctctctgctctaccagcctgtcacccacgtttgggccacgagaagtcactgctctgtaagtagttgtgactgcagtgggtctttttggtcacccctgtcctgggcttacttcaggtggaagcttgaagctggatggcagctgagccagcagaccgattctgacacttacagatgaggaaactaaggcagagatggtaggacctgcccagtgttacagctgagtaaagtggcagagctgggaccagaacccaggtttgctgactccctgtctagcactccttccttcaggctatgtagtccctgagcagaatgtggcatctcaggttgtgagaaatgatggagttcaaatttataacaaggaaggcttctaaagggctaggaaggcttctaaagggctggggctcacctgggacctgtccagtcttatttgaggagccacacccttagaggtcattctggaacagacctgggaatccatggaatgtgctggaaagagccctgggctgggatctggtccagttctggtgctcacatgctatgtggtcttaagcaagccccttcccctctctggtgctccaattactaaatgcaaaatgagggtttggccccagtgcttttccagctccgatgctccatggcccagttctaacagagagccctgatcttgaagtggactcactcccctgggctggagcctggtaaagataggaaaagggtacacagtcccatcccggtcactctgccttcctgaagtgctctccttgggtcctctgcaggtgatttgtctacagcaaccaagagcaaaacaagtgaagacatcagccagacctccaagtacagtcccatctactcgccagacccctactatgcttcggagtctgagtactggacctaccatgggtcccccaaagtgccccgagccagaaggttctcgtctggaggagaggaggatgattttgaccgcagcatgcacaagctccaaagtggaattggccggctgattctgaaggaagaaatgaaggcccggtcgagctcctatgcagatccctggacccctccccggagctccaccagcagccgggaagccctgcacacagctggctatgagatgtccctcaatggctcccctcggtcgcactacctggctgacagtgatcctctcatctccaaatctgcctccctgcctgcctaccgaagaaatgggctgcacaggacacccagcgcagacctcttccactacgacagcatgaacgcagtcaactggggcatgcgaggtgagtgcaagatctacccttatgaactgctgctggtgactacaagaggaagaaaccgactgcccaaggatgtagacaggacccgtttagagcgccacctgtcccaggaagagttctaccaagtctttggcatgaccatctctgagtttgaccggctggccctctggaagaggaatgaactgaagaagcaagcccggctgttctaggcagaggctctataaatatatatgcatttatataaagatatatgtaaaatctc

SEQ ID NO: 209 - DNA, 2755 bp, Homo sapiens
  source 1..2755: mol_type = unassigned DNA
cacactcattttagccagtgtccaggctatcagcagagaaagacaggtgggcagcatggctccgggcgaaaaggaaagcggggagggcccagccaagagcgccctccggaagatacgcacagccaccctggtcatcagcttggcccgaggttggcagcagtgggcgaatgagaacagcatcaggcaggcccaggagcctacaggctggctgccgggagggacccaggactcacctcaagctcctaaaccaatcacaccccctacttcacaccagaaagctcagagtgccccaaagtcgccaccccgcctgccagaaggacatggagatggacaaagctcagagaaagcccctgaggtttctcacatcaaaaagaaagaggtgtccaaaacggtggtcagcaagacttatgagagaggaggggacgtgagccacctcagccacaggtacgagagggatgctggtgtgcttgaacctgggcagccagagaatgacattgacagaatcctccacagccacggctccccaacgcggaggagaaaatgtgccaacctggtgtctgagctaaccaagggctggagagtgatggagcaggaggagcccacatggaggagtgacagcgtagacacagaggacagcggctatggaggagaggctgaggagaggcccgagcaggatggagtgcaggtggctgtggtcaggatcaagcgccccttgccctcccaggtaaacagatttacagagaaactcaactgcaaagcccaacagaaatatagcccagtgggcaacttgaaagggagatggcagcagtgggctgatgaacacatacaatcccagaagctcaatcctttcagtgaagagtttgattacgagctggccatgtccacccgcctacacaaaggagatgagggctatggccgccccaaagaaggaaccaaaactgctgaaagggccaagcgtgctgaggagcacatctacagggaaatgatggacatgtgcttcattatctgcacaatggctcgccacagacgagatggcaagatccaggttacttttggagatctctttgacagatacgttcgtatttcagataaagtagtgggcattctcatgcgtgccaggaaacatggactggtagactttgaaggagagatgctatggcaaggccgagatgaccatgttgtgattacgctactcaagtgaaccttcaaaaacaaaagccaaatttggcccactatggtcttaatgctaaatgctcatgtaggtaaaatgaaaatgcaaactctctgtaataagttagtaaatattaaacaatttttacataaacgactttctggcattctatttctatctagaatgaggaattttggagattttgagaaggcacaaagcatttcagaaagcacatagaatgttaatgtataataatagtattaatagttgaaattccacagggtgtttttgtttttgttttgagacagattctctttatgtcaccaaagctggtcttttaactcctggcctcaagtgatcctctcacctcagcctcccaagtagctgggattataggcatgagcaacagcacccagccacttgtatattttaggcaaaatatttagctagtcattgtagaaactactatagatttttaattaaacattacatctaagaagaatgctgacttgagataaatatcagtagaacatataataatgtgtctttatttggaaaaaagaaaataccattaagtttggtaaaactaaacttaaaattttttcagaagcttgactttgtattattgtttatatcatagcatcacttacaaaacaagcacatatataaaaagttgtcaagatgttgctgaaattgttgaagttcctctgtgggcttggattctaacaggtttccagtaagagttcaccttcctcttgtttgatttcagcaaatcacataaaaacagacacttcctgtcttagtaccaacaaaggaaggcacaccctcactaaaagtagagcagaggtgagagattcagatttacttgcctttgtaggacttcttggagaagtttattgtttcattacatgtcagcatataacgagtcaagctgcttgcattaacatcaatgcaatgatatgtatttctccaacaatggagaaatacagaaaatctatgaagtggaatgttcagtattagaaaaatcccatagaatcattggtgaattaaaaacagatttgagacagtttaatgttcctcatactgtaacaaagaaaactttatgaaatgtttaagtcataaaactgcaatattagttctgccaaagtaaaaaatatacaatgatgatggcaaggagaaaatcattggacattaatgtgcctatgtgatcttaaaaacaaatggaatggaatgtgagattgcaattcttactggattcaatgaaattactaaaatgcattgatagtatagcactttggtgttaaatgtaaaaattaatgtctaaatatgatacctcaaaataataggtattagactgctataagaattatatttgttttcatgtatgagtctctttcaaactgaaggttctggtatcttaagaaagtatgcgtattttgtttccataccgtatttataaagctataagttaatgaccaatatttctaagtaggatttcatgtaagatgcacacttctattacaagtgaaacctacgccaaatgttaaagacaaatagcataagaataaaagatgttttcttgta

SEQ ID NO: 210 - DNA, 4902 bp, Homo sapiens
  source 1..4902: mol_type = unassigned DNA
agaagtttgcagagcgctttctcgccggctggtcccggactcgcgctgcgccctgcgccctgcgccgccgcctcctccttctgccgccgccgccctgttctcccgggattccttctctgtggaggactgactctctgcttgtgggaattagaggtggacaagggggagtgccggggggtagcgacggggttctttccagtggcagctgcgagtcgggacgccgggagcgtggggctcctgctggccacggatctcggccaccttcccgcggcctccgggcaggcaatgcggccgccgagccccgcgacgcagagaggaaggagggtggcccggagggcctagagcttgtttctgcccacttgggaaagagggcatggagttgtgagtgcccctcgctcggcgacgccgccctcggcaggctccccatggccgggacgtacagctcgactctgaagacgctggaggacttgaccttggactccgggtatggggccggggactcgtgccgctcgctcagcctctcgtcctccaagtccaactcgcaggcgctcaactcttcggcgcagcagcaccgcggggcggcctggtggtgctactccggctccatgaacagccgccacaacagctgggacacggtgaacacggtgctgcccgaggaccccgaagtggccgacctcttctcgcgctgtccgcggctccccgagctggaggagttcccctggaccgaaggagacgtggcccgggtgctccgcaaaggcgctggcggccggcggctgccccagttctccgccgaggcggtgaggcgcctggccgggctgctccgcagggcactgatccgcgtggcccgcgaggcgcagcgcctgagcgtgctgcacgccaagtgcacccgctttgaggtgcagagcgccgtgcgcctggtgcacagctgggcgctggccgagagctgcgcgctggcagccgtcaaggcgctgtccctgtacagcatgagcgccggcgacgggctgcgccggggcaagtccgcgcgctgcggcctcaccttctcagtgggtcgctttttccgctggatggtggacacccgaatctccgtgcgcatccacgagtacgcagccatctccctcaccgcctgcatggagaacctggtggaggagatccgggccagggtgatggccagccacagccctgatggcggaggggccggaggcggggaggtgtctgctgaggccctggagatggtcatcaacaacgacgccgagctctggggcgtcttgcagccctatgagcatctcatctgcggcaagaacgccaatggtgtcctctccctccccgcatacttcagcccctacaacggcgggtccctgggccatgacgagcgagccgatgcctatgcccagctggagctccgaaccctggagcagtccctcctggccacctgcgtgggcagcatctcggagctgagtgacttggtctcccgtgccatgcaccacatgcaggggcgtcaccccctgtgcccgggtgccagccctgcccgccaggcccgccagccgccacagcccatcacttggtcccccgacgccctccacacgctctactactttctgcggtgtccacagatggagtccatggagaaccccaacctggaccccccgagaatgaccttgaacaatgaacggcccttcatgctgctgccgcccctcatggagtggatgcgcgtggccatcacctacgcagagcaccgccgcagcctcaccgtggacagcggcgacatccggcaggcagcccggctgctgctgcctggtctggactgtgaacctcggcagctcaaacccgaacactgtttcagttccttccggaggctggatgcccgagcagctactgaaaaattcaaccaggacctgggtttccgcatgctcaactgtgggaggacggacctcatcaaccaagccatcgaggccttgggtccggatggggttaacaccatggatgaccagggtatgacgccactgatgtacgcctgcgctgctggggacgaagcgatggtccagatgttgattgatgctggggcaaacttggacatccaggttccaagcaactcccccaggcacccttccatccaccccgacagccggcactggacctcactgacattcgctgtgctgcatggacacatctctgtggtccagttgctgctggatgctggtgcccatgtcgagggctcggcagtgaacggcggcgaggacagctatgcggagacgcccctgcagctggcctctgcggcagggaactatgagctggtcagtttgttgctgagccgaggcgccgaccccctcctcagcatgctggaggcccacggcatgggctcctccctccacgaggacatgaactgcttcagccactcagctgcccacggccacaggaacgtcctgaggaagctcctgacgcagccacagcaggctaaagcggacgtgctgtccctggaggagatcctggccgagggtgtggaggaaagtgatgcgtcgagccagggcagtggcagcgaggggcccgtgcggctgagccggacccgcaccaaggccctacaggaggccatgtactacagcgctgagcacggctacgtggacatcaccatggagctgagggcactgggagtcccctggaagctgcacatctggatcgagtctctgaggacctcgttctcgcagtcgcggtactcggtggtgcagagcctcctgcgggacttcagctccatcagagaggaggagtacaacgaggagctggtgaccgagggcttgcagctcatgttcgacatcctcaagaccagcaaaaacgactccgtcatccagcaactggctaccatcttcacccactgctatggcagcagtcccatccccagcatcccagagatccggaagaccctgccggccaggctagatccacactttttgaacaataaggagatgtcagatgtgaccttcctggtggaaggaaagctgttttatgcacataaagtcctgctggtgacagcttctaacaggttcaagacactaatgaccaataaatcagaacaggatggggacagcagcaagaccatcgagatcagcgacatgaagtaccacatttttcagatgatgatgcagtatctgtactacggaggaacagaatccatggagatccccaccactgacatcctggagctgctgtcagctgccagcctgttccagctggatgccctgcagaggcactgcgagatcctgtgctcccagaccctcagcatggagagtgccgtgaacacctacaaatatgccaagatccacaatgccccagaactggccctgttctgtgagggcttcttcctcaagcacatgaaggccctactggagcaggatgccttccggcagctcatctacggccgcagcagcaaagtgcagggcctggatccactgcaggacctgcagaacaccctggcagagcgcgtgcactctgtctacatcacctcccgggtgtgaggcagggggcggaggctgccgaggccagggcctgtggaggtgccagggcccaccatgtcggggtatggttgtaggccctcttggagccaggttcacggggctgtttcctcctcctcccccagatgtcccccctgtcaccgggcagctcaccctcatctcctctgccctagagctgtttgttcaatcactgatgggcaaaggggagatgtagctaactggtggccctcctccccatctcagtttgcaactcaagggcagccatgcactcccccggggtgtcgctctcccctcctgcaggtcagcagctgatcctgatccacctccgcccaggccctccaagctctactcacccctagggcctcagtaaactcagaccatcccaactggggctcctgggggtacaggaatccttatgaatgtatagaatgcatactgcctaggcccccagtcgtctgcagtaattcaaaagctggtatttttcttcctaaatgtcacatagcaaaggctgcccaaatccccaaacttgttcttcaaaggtttgacaggcttaatgtgggcatccagtggcctgtggacccccccctgccaccacgactgctgccacccggagttcccccattgtctttggtgcctgggcttccagagtccctcccatcaggactaccagcttgctcagttagcagcagagggcagttccccagcttgatggtttctgagctaagtctggcatggaggggcaaggggtaggggatggggtgctgtgtaggaatggcctcagctcttgttttgctgctggttttaggggccaaagtaaatgggtggattctggaacctcaggcctagactaggttgcctttgtgggggcgatgaagcagagtcccctggtcaagtctctcggctcctttaatgtaggattgagagctgggcaaacaggtcccactggggactgtgactcttggagattaaaggacagggcattgatggaaggtaagggccaggagaagaggcctttctgctgtgtcccctcacggccttgccctcgaattctgcaggccctgggctcccctgacacctgtcatatttatggaccagacactggggcagcatcaggcacagtctgtctgggtgcaacttcttcagctgtctggccgcaccttaaaaactatttattcaccaaaagccccaggcatttcagaaggtggcactcaggtcaccctgaaaagcccccaggggcttgcaattctggaaaatattttgactagctgcttggctggatgtacaaagaaataggcattattttattgctgtaatattgtatgatactttaactgtacaataatgttgtcacttactgtaaatgtactatggttttattaacaataaacactcattaacaatg

SEQ ID NO: 211 - DNA, 566 bp, Homo sapiens
  source 1..566: mol_type = unassigned DNA
aaaaatgccatggtccagcagccactcagctcagtggggtggtacatacaggggcgcgtgacaaggatgaggtgtcctctccctccccgcatacttcagcccctacaacggcgggtccctgggccatgacgagcgagccgatgcctatgcccagctggagctccgaaccctggagcagtccctcctggccacctgcgtgggcagcatctcggagctgagtgacttggtctcccgtgccatgcaccacatgcaggggcgtcaccccctgtgcccgggtgccagccctgcccgccaggcccgccagccgccacagcccatcacttggtcccccgacgccctccacacgctctactactttctgcggtgtccacagatggagtccatggagaaccccaacctggaccccccgagaatgaccttgaacaatgaacggcccttcatgctgctgccgcccctcatggagtggatgcgcgtggccatcacctacgcagagcaccgccgcagcctcaccgtggacagcggcgacatccggcaggcagcccggctgctgctgcctggtctggact

SEQ ID NO: 212 - DNA, 2249 bp, Homo sapiens
  source 1..2249: mol_type = unassigned DNA
agggtgcagtgggacaggcgttgccgggtcgcaggtcccgccagtgcgagcgcaacggaggtcgaaggcgttcagactcttagctgaacgcggagctgcggcggctatgctgtggagcggctgccggcgtttcggggcgcgcctcggctgcctgcccggcggtctccgggtcctcgtccagaccggccaccggagcttgacctcctgcatcgacccttccatgggacttaatgaagagcagaaagaatttcaaaaagtggcctttgactttgctgcccgagagatggctccaaatatggcagagtgggaccagaaggagctgttcccagtggatgtgatgcggaaggcagcccagctaggcttcggaggggtctacatacaaacagatgtgggcgggtctgggctgtcacgtcttgatacctctgtcatttttgaagccttggctacaggctgcaccagcaccacagcctatataagcatccacaacatgtgtgcctggatgattgatagcttcggaaatgaggaacagaggcacaaattttgcccaccgctctgtaccatggagaagtttgcttcctactgcctcactgaaccaggaagtgggagtgatgctgcctctcttctgacctccgctaagaaacagggagatcattacatcctcaatggctccaaggccttcatcagtggtgctggtgagtcagacatctatgtggtcatgtgccgaacaggaggaccaggccccaagggcatctcatgcatagttgttgagaaggggacccctggcctcagctttggcaagaaggagaaaaaggtggggtggaactcccagccaacacgagctgtgatcttcgaagactgtgctgtccctgtggccaacagaattgggagcgaggggcagggcttcctcattgccgtgagaggactgaacggagggaggatcaatattgcttcctgctccctgggggctgcccacgcctctgtcatcctcacccgagaccacctcaatgtccggaagcagtttggagagcctctggccagtaaccagtacttgcaattcacactggctgatatggcaacaaggctggtggccgcgcggctgatggtccgcaatgcagcagtggctctgcaggaggagaggaaggatgcagtggccttgtgctccatggccaagctctttgctacagatgaatgctttgccatctgcaaccaggccttgcagatgcacgggggctacggctacctgaaggattacgctgttcagcagtacgtgcgggactccagggtccaccagattctagaaggtagcaatgaagtgatgaggatactgatctctagaagcctgcttcaggagtagaacccacacttgttctggcctggtgttcagtgcgactgcagtcagtgttgagtggtgccatgtgggccgctctattccaaaggaatcatggattagacccaagggctgagctcctctagggcaggacctgcaccctgtgtgttggcaccagcatcgggtcttggactggggcagaatccccagtggaaccggaagagctggactgatgagaaacatcagaagaacacatactaccttgttttcctaatgccagaagggtgaccagtgaagattcaccgtcaaaccatgaaagtcctttcttggatccactttatcttgattagtctgcattttactagttcactggatccctcctctaggggcctggggactttcactgatgctcttcctgattctagagcaaaggtgtgggaaggggaaatggaggaatgccctcctgtctgtgtcgttctctgtgccacagctacagatgcagaaggtttctctggatagcacacctctgaatgtaaatcatgataaaatggatatttggaaacttactcctaagctgtgatttagggtgtatttctacttctggactgcctcaatatcaagggctgagacttttgaattttgaatattcgttgggtttcatgttaagaagcctgtggtctaggagtgctattcagtgtttcttttcctgataaacactttgaatattttttttgtgtttttgtttccttttctgaagctgttcctccttttaaatatttttaatcacattgataaaatctatccttcaccacctctggttctactatagttgatttttattttaaatgtttaattgtatttgattaaacacttaactggattttggaataataaaactctcgtccaatttggcttttaaaaa

SEQ ID NO: 213 - DNA, 1336 bp, Homo sapiens
  source 1..1336: mol_type = unassigned DNA
aacggaggtcgaaggcgttcagactcttagctgaacgcggagctgcggcggctatgctgtggagcggctgccggcgtttcggggcgcgcctcggctgcctgcccggcggtctccgggtcctcgtccagaccggccaccggagcttgacctcctgcatcgaccgagctgttcccagtggatgtgatgcggaaggcagcccagctaggcttcggaggggtctacatacaaacagatgtgggcgggtctgggctgtcacgtcttgatacctctgtcatttttgaagccttggctacaggctgcaccagcaccacagcctatataagcatccacaacatgtgtgcctggatgattgatagcttcggaaatgaggaacagaggcacaaattttgcccaccgctctgtaccatggagaagtttgcttcctactgcctcactgaaccaggaagtgggagtgatgctgcctctcttctgacctccgctaagaaacagggagatcattacatcctcaatggctccaaggccttcatcagtggtgctggtgagtcagacatctatgtggtcatgtgccgaacaggaggaccaggccccaagggcatctcatgcatagttgttgagaaggggacccctggcctcagctttggcaagaaggagaaaaaggtggggtggaactcccagccaacacgagctgtgatcttcgaagactgtgctgtccctgtggccaacagaattgggagcgaggggcagggcttcctcattgccgtgagaggactgaacggagggaggatcaatattgcttcctgctccctgggggctgcccacgcctctgtcatcctcacccgagaccacctcaatgtccggaagcagtttggagagcctctggccagtaaccagtacttgcaattcacactggctgatatggcaacaaggctggtggccgcgcggctgatggtccgcaatgcagcagtggctctgcaggaggagaggaaggatgcagtggccttgtgctccatggccaagctctttgctacagatgaatgctttgccatctgcaaccaggccttgcagatgcacgggggctacggctacctgaaggattacgctgttcagcagtacgtgcgggactccagggtccaccagattctagaagagctgttctggcaggggcctggagtccagagccgcagcttcgtccctttcggggggcctcagatcgctctgctgctgcccttttcctctggagatctgcgagaagggtgaactgagataatggatgagaaagcatgttgaaaaccacagccggggcttttctctaaggttatcgagtacgtggttctca

SEQ ID NO: 214 - DNA, 1189 bp, Homo sapiens
  source 1..1189: mol_type = unassigned DNA
gaaggcgttcagactcttagctgaacgcggagctgcggcggctatgctgtggagcggctgccggcgtttcggggcgcgcctcggctgcctgcccggcggtctccgggtcctcgtccagaccggccaccggagcttgacctcctgcatcgacccttccatgggacttaatgaagagcagaaagaatttcaaaaagtggcctttgactttgctgcccgagagatggctccaaatatggcagagtgggaccagaagcatgtgtgcctggatgattgatagcttcggaaatgaggaacagaggcacaaattttgcccaccgctctgtaccatggagaagtttgcttcctactgcctcactgaaccaggaagtgggagtgatgctgcctctcttctgacctccgctaagaaacagggagatcattacatcctcaatggctccaaggccttcatcagtggtgctggtgagtcagacatctatgtggtcatgtgccgaacaggaggaccaggccccaagggcatctcatgcatagttgttgagaaggggacccctggcctcagctttggcaagaaggagaaaaaggtggggtggaactcccagccaacacgagctgtgatcttcgaagactgtgctgtccctgtggccaacagaattgggagcgaggggcagggcttcctcattgccgtgagaggactgaacggagggaggatcaatattgcttcctgctccctgggggctgcccacgcctctgtcatcctcacccgagaccacctcaatgtccggaagcagtttggagagcctctggccagtaaccagaaaaagcaagagactttgaagctttggatcacttagaaaaggcgcctccgagatgtcttaccgaggctcctgcaccaggtgctggtctaagcccctcagtcttgtctggttctctgctccctgtgctgcagtacttgcaattcacactggctgatatggcaacaaggctggtggccgcgcggctgatggtccgcaatgcagcagtggctctgcaggaggagaggaaggatgcagtggccttgtgctccatggccaagctctttgctacagatgaatgctttgccatctgcaaccaggccttgcagatgcacgggggctacggctacctgaaggattacgctgttcagcagtacgtgcgggactccagggtccaccag

SEQ ID NO: 215 - DNA, 1032 bp, Homo sapiens
  source 1..1032: mol_type = unassigned DNA
aaggcgttcagactcttagctgaacgcggagctgcggcggctatgctgtggagcggctgccggcgtttcggggcgcgcctcggctgcctgcccggcggtctccgggtcctcgtccagaccggccaccggagcttgacctcctgcatcgacccttccatgggacttaatgaagagcagaaagaatttcaaaaagtggcctttgactttgctgcccgagagatggctccaaatatggcagagtgggaccagaaggagctgttcccagtggatgtgatgcggaaggcagcccagctaggcttcggaggggtctacatacaaacagatgtgggcgggtctgggctgtcacgtcttgatacctctgtcatttttgaagccttggctacaggctgcaccagcaccacagcctatataagcatccacaagaagtgggagtgatgctgcctctcttctgacctccgctaagaaacagggagatcattacatcctcaatggctccaaggccttcatcagtggtgctggtgagtcagacatctatgtggtcatgtgccgaacaggaggaccaggccccaagggcatctcatgcatagttgttgagaaggggacccctggcctcagctttggcaagaaggagaaaaaggtgagtggctgttggacaggaaacaattcaggttatgagactctgccacctgccagcccaactcctgctctatttcagaaaacaggtttgcatacttgctaacctacctttgaagcagttgcttctattaggattttcaacaggagcatatgaaatacaacagggcattattaaacactaggcctctggggaaagtgacaatgtttgccagtaaattcttcaagccacctgtgagtgttctgacctctcctgcctctgcttttggcctgtgttccttatccagctgcttacgttggtgcactttgttgctccaggaagagacgcttagagaagacctggtgttggccacaagtctcagtaatggaaggcgtgtggtcccttttgcttctttgatt

SEQ ID NO: 216 - DNA, 1797 bp, Homo sapiens
  source 1..1797: mol_type = unassigned DNA
ggcgttcagactcttagctgaacgcggagctgcggcggctatgctgtggagcggctgccggcgtttcggggcgcgcctcggctgcctgcccggcggtctccgggtcctcgtccagaccggccaccggagcttgacctcctgcatcgaccgaagtgggagtgatgctgcctctcttctgacctccgctaagaaacagggagatcattacatcctcaatggctccaaggccttcatcagtggtgctggtgagtcagacatctatgtggtcatgtgccgaacaggaggaccaggccccaagggcatctcatgcatagttgttgagaaggggacccctggcctcagctttggcaagaaggagaaaaaggtggggtggaactcccagccaacacgagctgtgatcttcgaagactgtgctgtccctgtggccaacagaattgggagcgaggggcagggcttcctcattgccgtgagaggactgaacggagggaggatcaatattgcttcctgctccctgggggctgcccacgcctctgtcatcctcacccgagaccacctcaatgtccggaagcagtttggagagcctctggccagtaaccagtacttgcaattcacactggctgatatggcaacaaggctggtggccgcgcggctgatggtccgcaatgcagcagtggctctgcaggaggagaggaaggatgcagtggccttgtgctccatggccaagctctttgctacagatgaatgctttgccatctgcaaccaggccttgcagatgcacgggggctacggctacctgaaggattacgctgttcagcagtacgtgcgggactccagggtccaccagattctagaaggtagcaatgaagtgatgaggatactgatctctagaagcctgcttcaggagtagaacccacacttgttctggcctggtgttcagtgcgactgcagtcagtgttgagtggtgccatgtgggccgctctattccaaaggaatcatggattagacccaagggctgagctcctctagggcaggacctgcaccctgtgtgttggcaccagcatcgggtcttggactggggcagaatccccagtggaaccggaagagctggactgatgagaaacatcagaagaacacatactaccttgttttcctaatgccagaagggtgaccagtgaagattcaccgtcaaaccatgaaagtcctttcttggatccactttatcttgattagtctgcattttactagttcactggatccctcctctaggggcctggggactttcactgatgctcttcctgattctagagcaaaggtgtgggaaggggaaatggaggaatgccctcctgtctgtgtcgttctctgtgccacagctacagatgcagaaggtttctctggatagcacacctctgaatgtaaatcatgataaaatggatatttggaaacttactcctaagctgtgatttagggtgtatttctacttctggactgcctcaatatcaagggctgagacttttgaattttgaatattcgttgggtttcatgttaagaagcctgtggtctaggagtgctattcagtgtttcttttcctgataaacactttgaatattttttttgtgtttttgtttccttttctgaagctgttcctccttttaaatatttttaatcacattgataaaatctatccttcaccacctctggttctactatagttgatttttattttaaatgtttaattgtatttgattaaacacttaactggattttggaataataaaactctcgtccaatttggctttt

SEQ ID NO: 217 - DNA, 509 bp, Homo sapiens
  source 1..509: mol_type = unassigned DNA
gttcagactcttagctgaacgcggagctgcggcggctatgctgtggagcggctgccggcgtttcggggcgcgcctcggctgcctgcccggcggtctccgggtcctcgtccagaccggccaccggagcttgacctcctgcatcgacccttccatgggacttaatgaagagcagaaagaatttcaaaaagtggcctttgactttgctgcccgagagatggctccaaatatggcagagtgggaccagaaggtaggcgtttttcttgtgcttagacgttctaacaacagatgtctcaggcagacctttatctttgtctcctgataatgtaattgttaaatgtctcctccacttaccaactcttactgcaagtgagaataccggtagtggatgatttttcctagaaggcatcctgatcatcttgtacataactttttttttgttagttgaataaagatttggatataaaactaaggcagttctatagataataaaaagaaacttcttaatgcca

SEQ ID NO: 218 - DNA, 1437 bp, Homo sapiens
  source 1..1437: mol_type = unassigned DNA
agactcttagctgaacgcggagctgcggcggctatgctgtggagcggctgccggcgtttcggggcgcgcctcggctgcctgcccggcggtctccgggtcctcgtccagaccggccaccggagcttgacctcctgcatcgacccttccatgggacttaatgaagagcagaaagaatttcaaaaagtggcctttgactttgctgcccgagagatggctccaaatatggcagagtgggaccagaagcatgtgtgcctggatgattgatagcttcggaaatgaggaacagaggcacaaattttgcccaccgctctgtaccatggagaagtttgcttcctactgcctcactgaaccaggaagtgggagtgatgctgcctctcttctgacctccgctaagaaacagggagatcattacatcctcaatggctccaaggccttcatcagtggtgctggtgagtcagacatctatgtggtcatgtgccgaacaggaggaccaggccccaagggcatctcatgcatagttgttgagaaggggacccctggcctcagctttggcaagaaggagaaaaaggtgagtggctgttggacaggaaacaattcaggttatgagactctgccacctgccagcccaactcctgctctatttcagaaaacaggtttgcatacttgctaacctacctttgaagcagttgcttctattaggattttcaacaggagcatatgaaatacaacagggcattattaaacactaggcctctggggaaagtgacaatgtttgccagtaaattcttcaagccacctgtgagtgttctgacctctcctgcctctgcttttggcctgtgttccttatccagctgcttacgttggtgcactttgttgctccaggaagagacgcttagagaagacctggtgttggccacaagtctcagtaatggaaggcgtgtggtcccttttgcttctttgattaaaaataaagtaaaactcattggagatgattgtgggtatttcagcaacccaagaaggacacttaggtactgtaagtaatttgaaaagtaagatacttctaggattaagagccgccatggccagggcatgaacaggagacttgtgatcatgtaaccgtaattggtaataagggctcaagacccattcagattttttagaccagatgctcaaagcagtcatctctctctagtttgtactgttatggggggactttgtgagagaaggcaggtaatgaaatgacccctaagtgtacctctttctcacagctcctcgggtttctgtattttcctacaggatccttcctgatcctctgtaactgtaaggcattatgcattttagcatccccttctctttggtaacacagcaaccatttcctaggcttctactgtgtgtgaagcccatgctaactcctgggcaggaagaccttcagtaaaa

SEQ ID NO: 219 - DNA, 566 bp, Homo sapiens
  source 1..566: mol_type = unassigned DNA
gactcttagctgaacgcggagctgcggcggctatgctgtggagcggctgccggcgtttcggggcgcgcctcggctgcctgcccggcggtctccgggtcctcgtccagaccggccaccggagcttgacctcctgcatcgacccatgtgtgcctggatgattgatagcttcggaaatgaggaacagaggcacaaattttgcccaccgctctgtaccatggagaagtttgcttcctactgcctcactgaaccaggaagtgggagtgatgctgcctctcttctgacctccgctaagaaacagggagatcattacatcctcaatggctccaaggccttcatcagtggtgctggtgagtcagacatctatgtggtcatgtgccgaacaggaggaccaggccccaagggcatctcatgcatagttgttgagaaggggacccctggcctcagctttggcaagaaggagaaaaaggtgagtggctgttggacaggaaacaattcaggttatgagactctgccacctgccagcccaactcctgctctatttcagaaaacaggtttgcatacttgct

SEQ ID NO: 220 - DNA, 3197 bp, Homo sapiens
  source 1..3197: mol_type = unassigned DNA
gactcttagctgaacgcggagctgcggcggctatgctgtggagcggctgccggcgtttcggggcgcgcctcggctgcctgcccggcggtctccgggtcctcgtccagaccggccaccggagcttgacctcctgcatcgacccatgtgtgcctggatgattgatagcttcggaaatgaggaacagaggcacaaattttgcccaccgctctgtaccatggagaagtttgcttcctactgcctcactgaaccaggaagtgggagtgatgctgcctctcttctgacctccgctaagaaacagggagatcattacatcctcaatggctccaaggccttcatcagtggtgctggtgagtcagacatctatgtggtcatgtgccgaacaggaggaccaggccccaagggcatctcatgcatagttgttgagaaggggacccctggcctcagctttggcaagaaggagaaaaaggtgagtggctgttggacaggaaacaattcaggttatgagactctgccacctgccagcccaactcctgctctatttcagaaaacaggtttgcatacttgctaacctacctttgaagcagttgcttctattaggattttcaacaggagcatatgaaatacaacagggcattattaaacactaggcctctggggaaagtgacaatgtttgccagtaaattcttcaagccacctgtgagtgttctgacctctcctgcctctgcttttggcctgtgttccttatccagctgcttacgttggtgcactttgttgctccaggaagagacgcttagagaagacctggtgttggccacaagtctcagtaatggaaggcgtgtggtcccttttgcttctttgattaaaaataaagtaaaactcattggagatgattgtgggtatttcagcaacccaagaaggacacttaggtactgtaagtaatttgaaaagtaagatacttctaggattaagagccgccatggccagggcatgaacaggagacttgtgatcatgtaaccgtaattggtaataagggctcaagacccattcagattttttagaccagatgctcaaagcagtcatctctctctagtttgtactgttatggggggactttgtgagagaaggcaggtaatgaaatgacccctaagtgtacctctttctcacagctcctcgggtttctgtattttcctacaggatccttcctgatcctctgtaactgtaaggcattatgcattttagcatccccttctctttggtaacacagcaaccatttcctaggcttctactgtgtgtgaagcccatgctaactcctgggcaggaagaccttcagtaaaaggcttagaaatggagtttatcctatcaacaaaagagagcaaggaaatgatgtaaaggcagtctattttcagagccagagaggaactgggagattgtagatagtttgtggttttcaattagaggcactgaaattgggggcagttggtgtcacaatcctaaaagaagttgtgagaagtgtttgtaggttagtcaggtagagtagacattagtagattctcttaataagttagaaaatgtttagctgaaacaggtatctttctgagtgctgacaggcctttaaacctgaactttttctttttcctcattttaagttcttgtgggtctaagtcttgggtgctgaaacccatacctcacaggctcccgtccccagggaaggccgccctacctgctggattgttgggcaaccacgcagtccctgatttttgccaggtggggtggaactcccagccaacacgagctgtgatcttcgaagactgtgctgtccctgtggccaacagaattgggagcgaggggcagggcttcctcattgccgtgagaggactgaacggagggaggatcaatattgcttcctgctccctgggggctgcccacgcctctgtcatcctcacccgagaccacctcaatgtccggaagcagtttggagagcctctggccagtaaccagtacttgcaattcacactggctgatatggcaacaaggctggtggccgcgcggctgatggtccgcaatgcagcagtggctctgcaggaggagaggaaggatgcagtggccttgtgctccatggccaagctctttgctacagatgaatgctttgccatctgcaaccaggccttgcagatgcacgggggctacggctacctgaaggattacgctgttcagcagtacgtgcgggactccagggtccaccagattctagaaggtagcaatgaagtgatgaggatactgatctctagaagcctgcttcaggagtagaacccacacttgttctggcctggtgttcagtgcgactgcagtcagtgttgagtggtgccatgtgggccgctctattccaaaggaatcatggattagacccaagggctgagctcctctagggcaggacctgcaccctgtgtgttggcaccagcatcgggtcttggactggggcagaatccccagtggaaccggaagagctggactgatgagaaacatcagaagaacacatactaccttgttttcctaatgccagaagggtgaccagtgaagattcaccgtcaaaccatgaaagtcctttcttggatccactttatcttgattagtctgcattttactagttcactggatccctcctctaggggcctggggactttcactgatgctcttcctgattctagagcaaaggtgtgggaaggggaaatggaggaatgccctcctgtctgtgtcgttctctgtgccacagctacagatgcagaaggtttctctggatagcacacctctgaatgtaaatcatgataaaatggatatttggaaacttactcctaagctgtgatttagggtgtatttctacttctggactgcctcaatatcaagggctgagacttttgaattttgaatattcgttgggtttcatgttaagaagcctgtggtctaggagtgctattcagtgtttcttttcctgataaacactttgaatattttttttgtgtttttgtttccttttctgaagctgttcctccttttaaatatttttaatcacattgataaaatctatccttcaccacctctggttctactatagttgatttttattttaaatgtttaattgtatttgattaaacacttaactggattttggaataataaaactctcgtccaatttggctttt

SEQ ID NO: 221 - DNA, 1262 bp, Homo sapiens
  source 1..1262: mol_type = unassigned DNA
gctgaacgcggagctgcggcggctatgctgtggagcggctgccggcgtttcggggcgcgcctcggctgcctgcccggcggtctccgggtcctcgtccagaccggccaccggagcttgacctcctgcatcgacccttccatgggacttaatgaagagcagaaagaatttcaaaaagtggcctttgactttgctgcccgagagatggctccaaatatggcagagtgggaccagaagcatgtgtgcctggatgattgatagcttcggaaatgaggaacagaggcacaaattttgcccaccgctctgtaccatggagaagtttgcttcctactgcctcactgaaccaggaagtgggagtgatgctgcctctcttctgacctccgctaagaaacagggagatcattacatcctcaatggctccaaggtactagcgtgcgtcctcccagagcactttggagattgttcccagcttcctcctgacatcctctggttccttcacatccgcgggttaatactcccataggatttttatgtgttgggaagagaacctctgacccatttctctttctttattctcactgtttgtatctctcctaatctgattccagatcatttcgttgacttttgtctatcctttttatactctcttggactgcctctctgatctgcagtcactgcagcgaccttttacctcacctcagtctctgtgccattggaccttattgtcagtctctgtgccattggaccttattgtcagtctctgtgccattggaccttattgtcagtctctgtgccattggaccttattgtcagtctctgtgccattggaccttattgtcagtctctgtgccattggaccttattgtcaggaggacccagtggtgttcccagacgctgtgagaactcaagcattccctggtccttttgcaccccttttacccccacaggccttcatcagtggtgctggtgagtcagacatctatgtggtcatgtgccgaacaggaggaccaggccccaagggcatctcatgcatagttgttgagaaggggacccctggcctcagctttggcaagaaggagaaaaaggtgagtggctgttggacaggaaacaattcaggttatgagactctgccacctgccagcccaactcctgctctatttcagaaaacaggtttgcatacttgctaacctacctttgaagcagttgcttctattaggattttcaacaggagcatatgaaatacaacagggcattattaaacacta

SEQ ID NO: 222 - DNA, 703 bp, Homo sapiens
  source 1..703: mol_type = unassigned DNA
gccggcgtttcggggcgcgcctcggctgcctgcccggcggtctccgggtcctcgtccagaccggccaccggagcttgacctcctgcatcgaccgaagtgggagtgatgctgcctctcttctgacctccgctaagaaacagggagatcattacatcctcaatggctccaaggccttcatcagtggtgctggtgagtcagacatctatgtggtcatgtgccgaacaggaggaccaggccccaagggcatctcatgcatagttgttgagaaggggacccctggcctcagctttggcaagaaggagaaaaaggtggggtggaactcccagccaacacgagctgtgatcttcgaagactgtgctgtccctgtggccaacagaattgggagcgaggggcagggcttcctcattgccgtgagaggactgaacggagggaggatcaatattgcttcctgctccctgggggctgcccacgcctctgtcatcctcacccgagaccacctcaatgtccggaagcagtttggagagcctctggccagtaaccagtacttgcaattcacactggctgatatggcaacaaggctggtggccgcgcggctgatggtccgcaatgcagcagtggctctgcaggaggagaggaaggatgcagtggccttgtgctccatggccaagctctttgctacagatgaatgctttgccatctgcaa

SEQ ID NO: 223 - DNA, 3315 bp, Homo sapiens
  source 1..3315: mol_type = unassigned DNA
caaaaagtggcctttgactttgctgcccgagagatggctccaaatatggcagagtgggaccagaaggagctgttcccagtggatgtgatgcggaaggcagcccagctaggcttcggaggggtctacatacaaacagatgtgggcgggtctgggctgtcacgtcttgatacctctgtcatttttgaagccttggctacaggctgcaccagcaccacagcctatataagcatccacaacatgtgtgcctggatgattgatagcttcggaaatgaggaacagaggcacaaattttgcccaccgctctgtaccatggagaagtttgcttcctactgcctcactgaaccaggaagtgggagtgatgctgcctctcttctgacctccgctaagaaacagggagatcattacatcctcaatggctccaaggccttcatcagtggtgctggtgagtcagacatctatgtggtcatgtgccgaacaggaggaccaggccccaagggcatctcatgcatagttgttgagaaggggacccctggcctcagctttggcaagaaggagaaaaaggtggggtggaactcccagccaacacgagctgtgatcttcgaagactgtgctgtccctgtggccaacagaattgggagcgaggggcagggcttcctcattgccgtgagaggactgaacggagggaggatcaatattgcttcctgctccctgggggctgcccacgcctctgtcatcctcacccgagaccacctcaatgtccggaagcagtttggagagcctctggccagtaaccagtacttgcaattcacactggctgatatggcaacaaggctggtggccgcgcggctgatggtccgcaatgcagcagtggctctgcaggaggagaggaaggatgcagtggccttgtgctccatggccaagctctttgctacagatgaatgctttgccgcgagaaaccacctttggaaggttcacagcagccccaatttagcactctgccatgtttacattgtcaggctgcattgccactagggggaaccatagctttttatcatcccagccagggtggctgtgggcagcttctgcctggcaggtaataagggagaggggcagagggctttgagtcgcctgtctggggggaactgacaagtttagtaggtgaacttcccttgtctctaaccatacagaatgtggaggccctctttgagcttggctgtttgtggttctttcatgggtttatggcgggctgccagatcgtgggctggggtaggaagggaagctgcttgctccacagtcttcccagagtccaagacgtctagtccctgtctccctgcagatctgcaaccaggccttgcagatgcacgggggctacggctacctgaaggattacgctgttcagcagtacgtgcgggactccagggtccaccagattctagaaggtaaaaattgccagaggttattctcttcccttcagaacgggggcgggatcgctgctttccccactctctgtccccatgcctcctgggcctcagggtgcagtcaagccctgtctgtctcgaggcttcctcctccctcccgttccgcagagctgttctggcaggggcctggagtccagagccgcagcttcgtccctttcggggggcctcagatcgctctgctgctgcccttttcctctggagatctgcgagaagggtgaactgagataatggatgagaaagcatgttgaaaaccacagccggggcttttctctaaggttatcgagtacgtggttctcagggatccaagaacagtgatggacaaggcaaatgtgagccagtatggtcatcagtagctctatattgattatcagccagatggcctaaaagatacctgtctcaatattactagtgtatttttcaataaaataaaccatcactatatgggtatcttcttggtagtcacagacattctatcgaggaaacatggaagccgttggggtcgggctcggagcctggctgtctccactctctacagccagtgcggaagtcttgaaatgacacgactcttggaaaagcaggaggggcagaggcttctttgagtgacttcggtgaagcaacgtgaggctgccttgctggaaacattatataatggggcttccctgcccctttcacagcacccttctcaaacctcagcctgtgctggaatcgcctggagggcatgggagcgcagattgcgggcctcaaccccagagcttctgctccagagggtctagtgtgggcctgggaatttgtatctgcaacaagtcttcaagtgaggctgccacagcttgtctgagaaccacactttgagacccaccgctctggtgttaatgtcagagtcacaggctaccacaggtagcaatgaagtgatgaggatactgatctctagaagcctgcttcaggagtagaacccacacttgttctggcctggtgttcagtgcgactgcagtcagtgttgagtggtgccatgtgggccgctctattccaaaggaatcatggattagacccaagggctgagctcctctagggcaggacctgcaccctgtgtgttggcaccagcatcgggtcttggactggggcagaatccccagtggaaccggaagagctggactgatgagaaacatcagaagaacacatactaccttgttttcctaatgccagaagggtgaccagtgaagattcaccgtcaaaccatgaaagtcctttcttggatccactttatcttgattagtctgcattttactagttcactggatccctcctctaggggcctggggactttcactgatgctcttcctgattctagagcaaaggtgtgggaaggggaaatggaggaatgccctcctgtctgtgtcgttctctgtgccacagctacagatgcagaaggtttctctggatagcacacctctgaatgtaaatcatgataaaatggatatttggaaacttactcctaagctgtgatttagggtgtatttctacttctggactgcctcaatatcaagggctgagacttttgaattttgaatattcgttgggtttcatgttaagaagcctgtggtctaggagtgctattcagtgtttcttttcctgataaacactttgaatattttttttgtgtttttgtttccttttctgaagctgttcctccttttaaatatttttaatcacattgataaaatctatccttcaccacctctggttctactatagttgatttttattttaaatgtttaattgtatttgattaaacacttaactggattttggaataataaaactctcgtccaatttggctttt

SEQ ID NO: 224 - DNA, 1071 bp, Homo sapiens
  source 1..1071: mol_type = unassigned DNA
cgagagatggctccaaatatggcagagtgggaccagaaggagctgttcccagtggatgtgatgcggaaggcagcccagctaggcttcggaggggtctacatacaaacagatgtgggcgggtctgggctgtcacgtcttgatacctctgtcatttttgaagccttggctacaggctgcaccagcaccacagcctatataagcatccacaacatgtgtgcctggatgattgatagcttcggaaatgaggaacagaggcacaaattttgcccaccgctctgtaccatggagaagtttgcttcctactgcctcactgaaccaggaagtgggagtgatgctgcctctcttctgacctccgctaagaaacagggagatcattacatcctcaatggctccaaggccttcatcagtggtgctggtgagtcagacatctatgtggtcatgtgccgaacaggaggaccaggccccaagggcatctcatgcatagttgttgagaaggggacccctggcctcagctttggcaagaaggagaaaaaggtgagtggctgttggacaggaaacaattcaggttatgagactctgccacctgccagcccaactcctgctctatttcagaaaacaggtttgcatacttgctaacctacctttgaagcagttgcttctattaggattttcaacaggagcatatgaaatacaacagggcattattaaacactaggcctctggggaaagtgacaatgtttgccagtaaattcttcaagccacctgtgagtgttctgacctctcctgcctctgcttttggcctgtgttccttatccagctgcttacgttggtgcactttgttgctccaggaagagacgcttagagaagacctggtgttggccacaagtctcagtaatggaaggcgtgtggtcccttttgcttctttgattaaaaataaagtaaaactcattggagatgattgtgggtatttcagcaacccaagaaggacacttaggtactgtaagtaatttgaaaagtaagatacttctaggattaagagccgccatggccagggcatgaacaggagacttg

SEQ ID NO: 225 - DNA, 1475 bp, Homo sapiens
  source 1..1475: mol_type = unassigned DNA
tattgcttagggaatcaggtcagccagctttctcagaaatcttattttgagctggtaccaggagacttctccaatagagtgatcagggtcctctcacccttttatttatttatttatttttaagacagagtctcgctctgttgcccaggctagggtgcagtggcatgacctcggctcactgcaacctccgtctccccggttcaagtgattctcctgcctcagcctcctgagtagctgggattacaggcacgtgccaccacacctggctaattttttttcatatttagtagagatggggtttcaccatgttagtcaggctggtctcaaactcctgaccttgtgttctgcctgcctcggcctcccatagtgctgggattacagatgtgagccaccgcacccggcccctctcacccttttcctcaatccaaagatggaactgccagtgatttgaggaagtaatagaaactactaatagaaagcacatataactctgatttttagaggctcgtgtaacctaactagaagtagtacaaacgtgctggtgagaagtacctcagcctggttatctctgggtagtccttattccaggaatatgttttaatccaccgtttgcctttaaagagtcttcccaattgtgactctccccttcccactcttctgctttactccactgccctgccctttgttctctttccccttctcccccatttttttttcttttccatctttatttctgtcattgtcttttcttcttggtgtacctatcagcatgtgtgcctggatgattgatagcttcggaaatgaggaacagaggcacaaattttgcccaccgctctgtaccatggagaagtttgcttcctactgcctcactgaaccaggaagtgggagtgatgctgcctctcttctgacctccgctaagaaacagggagatcattacatcctcaatggctccaaggccttcatcagtggtgctggtgagtcagacatctatgtggtcatgtgccgaacaggaggaccaggccccaagggcatctcatgcatagttgttgagaaggggacccctggcctcagctttggcaagaaggagaaaaaggtggggtggaactcccagccaacacgagctgtgatcttcgaagactgtgctgtccctgtggccaacagaattgggagcgaggggcagggcttcctcattgccgtgagaggactgaacggagggaggatcaatattgcttcctgctccctgggggctgcccacgcctctgtcatcctcacccgagaccacctcaatgtccggaagcagtttggagagcctctggccagtaaccagtacttgcaattcacactggctgatatggcaacaaggctggtggccgcgcggctgatggtccgcaatgcagcagtggctctgcaggaggagaggaaggatgcagtggccttgtgctccatggccaagctctttgctacagatgaatgct

SEQ ID NO: 226 - DNA, 467 bp, Homo sapiens
  source 1..467: mol_type = unassigned DNA
acactctgagcagggtctgtttagagaagatttcctagaagatagaattgtgctgggctccctcgacctcactgactttctcaccttctctctgctgccttttgatccctcctcaggaagtgggagtgatgctgcctctcttctgacctccgctaagaaacagggagatcattacatcctcaatggctccaaggccttcatcagtggtgctggtgagtcagacatctatgtggtcatgtgccgaacaggaggaccaggccccaagggcatctcatgcatagttgttgagaaggggacccctggcctcagctttggcaagaaggagaaaaaggtggggtggaactcccagccaacacgagctgtgatcttcgaagactgtgctgtccctgtggccaacagaattgggagcgaggggcagggcttcctcattgccgtgagaggactgaacggagggaggatcaatattg

SEQ ID NO: 227 - DNA, 1032 bp, Homo sapiens
  source 1..1032: mol_type = unassigned DNA
actgtttgtatctctcctaatctgattccagatcatttcgttgacttttgtctatcctttttatactctcttggactgcctctctgatctgcagtcactgcagcgaccttttacctcacctcagtctctgtgccattggaccttattgtcagtctctgtgccattggaccttattgtcagtctctgtgccattggaccttattgtcagtctctgtgccattggaccttattgtcagtctctgtgccattggaccttattgtcagtctctgtgccattggaccttattgtcaggaggacccagtggtgttcccagacgctgtgagaactcaagcattccctggtccttttgcaccccttttacccccacaggccttcatcagtggtgctggtgagtcagacatctatgtggtcatgtgccgaacaggaggaccaggccccaagggcatctcatgcatagttgttgagaaggggacccctggcctcagctttggcaagaaggagaaaaagctgcttacgttggtgcactttgttgctccaggaagagacgcttagagaagacctggtgttggccacaagtctcagtaatggaaggcgtgtggtcccttttgcttctttgattaaaaataaagtaaaactcattggagatgattgtgggtatttcagcaacccaagaaggacacttaggtactgtaagtaatttgaaaagtaagatacttctaggattaagagccgccatggccagggcatgaacaggagacttgtgatcatgtaaccgtaattggtaataagggctcaagacccattcagattttttagaccagatgctcaaagcagtcatctctctctagtttgtactgttatggggggactttgtgagagaaggcaggtaatgaaatgacccctaagtgtacctctttctcacagctcctcgggtttctgtattttcctacaggatccttcctgatcctctgtaactgtaaggcattatgcattttagcatccccttctctttggtaacacagcaaccattt

SEQ ID NO: 228 - DNA, 1487 bp, Homo sapiens
  source 1..1487: mol_type = unassigned DNA
tgtttacattgtcaggctgcattgccactagggggaaccatagctttttatcatcccagccagggtggctgtgggcagcttctgcctggcagatctgcaaccaggccttgcagatgcacgggggctacggctacctgaaggattacgctgttcagcagtacgtgcgggactccagggtccaccagattctagaagagctgttctggcaggggcctggagtccagagccgcagcttcgtccctttcggggggcctcagatcgctctgctgctgcccttttcctctggagatctgcgagaagggtgaactgagataatggatgagaaagcatgttgaaaaccacagccggggcttttctctaaggttatcgagtacgtggttctcagggatccaagaacagtgatggacaaggcaaatgtgagccagtatggtcatcagtagctctatattgattatcagccagatggcctaaaagatacctgtctcaatattactagtgtatttttcaataaaataaaccatcactatatgggtatcttcttggtagtcacagacattctatcgaggaaacatggaagccgttggggtcgggctcggagcctggctgtctccactctctacagccagtgcggaagtcttgaaatgacacgactcttggaaaagcaggaggggcagaggcttctttgagtgacttcggtgaagcaacgtgaggctgccttgctggaaacattatataatggggcttccctgcccctttcacagcacccttctcaaacctcagcctgtgctggaatcgcctggagggcatgggagcgcagattgcgggcctcaaccccagagcttctgctccagagggtctagtgtgggcctgggaatttgtatctgcaacaagtcttcaagtgaggctgccacagcttgtctgagaaccacactttgagacccaccgctctggtgttaatgtcagagtcacaggctaccacaggttagaccgctgctttcttctgcaaacctcattccagaaagatgtttatgggctcagtcgccagtgttcaaactgaattcccgagagtcgttttccttccattactcttggaattgctttctcactgagctttatgtgcgtaggaaacttcgccttcattctaactctctctccaccctgcaataataagcaggaaaacatttattgtaggccacaccatcacccacttacagaagaattggggcactcatcactgtatcactttgtttcatcatggactttactgttggataaatctacagtttatgctttatttgagacgatgtgactactgattcctcgagggggtttatatttctttttgcattaaaggccactgctaaaaatgaagcaaataattgataccctcctttcagggaaaatgttttcattcttttgtaagtcagttttctgattaccaaagaaatgtgtatttattgttgaaaccttataaaattaggaaaagt

SEQ ID NO: 229 - DNA, 3896 bp, Homo sapiens
  source 1..3896: mol_type = unassigned DNA
agtgacagcgggcggtgcgcgcgggcggctgactttggcgacgctccccggcggtgacaggcggggcggggcgcggcgcggcggcctcattccggggcgggcgggcgccgaggcggcgcgggcgggacgagcggtccgggccggcgcggctgccgctcggcgccgcggtcctcgtgccagtgagcgccgcggccgccgcagccatgaccgtggagttcgaggagtgcgtcaaggactccccgcgcttcagggcgaccattgacgaggtggagacggacgtggtggagattgaggccaaactggacaagctggtgaagctgtgcagtggcatggtggaagccggtaaggcctacgtcagcaccagcaggcttttcgtgagcggcgtccgcgacctgtcccagcagtgccagggcgacaccgtcatctcggaatgtctgcagaggttcgctgacagcctacaggaggtggtgaactaccacatgatcctgtttgaccaggcccagaggtccgtgcggcagcagctccagagctttgtcaaagaggatgtgcggaagttcaaggagacaaagaagcagtttgacaaggtgcgggaggacctggagctgtccctggtgaggaacgcccaggccccgaggcaccggccccacgaggtggaggaagccaccggggccctcaccctcaccaggaagtgcttccgccacctggcactggactatgtgctccagatcaatgttctgcaggccaagaagaagtttgagatcctggactctatgctgtccttcatgcacgcccagtccagcttcttccagcagggctacagcctcctgcaccagctggacccctacatgaagaagctggcagccgagctggaccagctggtgatcgactctgcggtggaaaagcgtgagatggagcgaaagcacgccgccatccagcagcggacgctgctgcaggacttctcctacgatgagtccaaagtggagtttgacgtggacgcgcccagtggggtggtgatggagggctacctcttcaagagggccagcaacgctttcaagacatggaaccggcgctggttctccattcagaacagccagctggtctaccagaagaagctcaaggatgccctcaccgtggtggtggatgacctccgcctgtgctctgtgaagccgtgtgaggacatcgagcggaggttctgcttcgaggtgctgtcacccaccaagagctgcatgctgcaggctgactccgagaagctgcggcaagcctgggtccaggctgtgcaggccagcatcgcctccgcctaccgcgagagccctgacagttgctatagcgagaggctggaccgcacagcatccccgtccacgagcagcatcgactccgccaccgacactcgggagcgtggcgtgaagggcgagagtgtgctgcagcgtgtgcagagtgtggccggcaacagccagtgcggcgactgcggccagccggacccccgctgggccagcatcaacctgggcgtgctgctctgcattgagtgctccggcatccacaggagcctgggtgtccactgctccaaggtgcggtccctgacgctggactcgtgggagcctgagctgctaaagctgatgtgtgagcttggaaacagcgctgtgaatcagatctatgaggcccagtgtgagggtgcaggcagcaggaaacccacagccagcagctcccggcaggacaaggaggcctggatcaaggacaaatacgtggaaaagaagtttctgcggaaggcgcccatggcaccagccctggaggccccaagacgctggagggtgcagaagtgcctgcggccccacagctctccccgcgctcccactgcccgccgcaaggtccggcttgagcccgttctgccctgtgtggccgctctgtcctcagtgggcaccctggatcgtaagttccgccgagactccctcttctgtcccgacgagctggactcgctcttctcctacttcgacgcaggggccgcaggggctggccctcgcagtctgagtagcgacagtggccttgggggcagctcggatggcagctcggacgtcctggctttcggctcgggctctgtggtggacagcgtcactgaggaggagggtgcagagtcggaggagtccagcggtgaggcagacggggacactgaggccgaggcctggggcctggcggacgtgcgcgagctgcacccggggctcttggcgcaccgcgcagcgcgtgcccgcgaccttcctgcgctggcggcggcgctggcccacggggccgaggtcaactgggcggacgcggaggatgagggcaagacgccgctggtgcaggccgtgctagggggctccttgatcgtctgtgagttcctgctgcaaaacggagcggacgtgaaccaaagagacagccggggccgggcgcccctgcaccacgccacgctgctgggccgcaccggccaggtttgcctgttcctgaagcggggcgcggaccagcacgccctggaccaagagcagcgggacccgttggccatcgcagtgcaggcggccaacgctgacatcgtgacactgctccgtctggcgcgcatggcggaggaaatgcgcgaggccgaggctgcccctggtcccccgggcgccctggcgggcagccccacggagctccagttccgcaggtgtatccaggagttcatcagcctccacctggaagagagctagggccgggcaggccgggcagctgccaccccgcccggcccgacgccccgcatgccccgaagtccctggcgcccacccggccgcggccctgcgtgtgacccgcgggtcgatacctggcagccccagtgctggggcgccgcggccctgctcgcccaggaggagagcgagggccccacactgagtctcttgaagcctcacgtttccctgggggggtgctgcatcgtcgggtgtccctcaccccacctggggaacctctgtcttcaggtcaccccttttcaggggcctgggttgctcatgtcacaagccacttttaaggcccgtgtcacctgtgtccctgtgtcctcagggcctgtgttacttcgtgccccacttctgcccagaacactgacctgttagctggctccctcctgcacaccccagagcctcctcccagggcagaaagggtggcccatccagggaaccaacgagtacctcacttagtgaccccagcatccaggctggcgtcgcgggtgctgggcgggaggggctctggcctgggtcctcagccctggctggacgcgggcgtcccaaggccacgtggctggccacgaaggtccccgtgccagacagccccagccgcatcccggcctcctccggaggcaccttctcctggtactcggcccagagcctgcgcataaagccactttgccactttgcagccctcatctcatgttctttgtagcggaccgagtgggtttgctataggcctcgtctgactttgtcttgcgtcttttctctgtggactcttgaggacgcctgagccccagccctgcccctgaccagcctcccccttgggtccaggggtctttcggctcatattgcagggcctgccaatgccttcacgcaccccttccccaaaggtgcccggcagggaggcagggcctcccccactcagcgcaggtcaggctaaggccagtcggctggtcactatgcaatgctgccctggggaggctccctgagggcacagtgggcgctggacccggccccccaactctcttgcctgctgcctgtgaccctgaagaacagaattgattcttgcccctctccctgtgtgagcttggccccgcctcttgccccaggcccctgctggcgggtctcaccccccacccctcgctttgaataaagcacttgcgcccactgcctgctcctggg

SEQ ID NO: 230 - DNA, 5319 bp, Homo sapiens
  source 1..5319: mol_type = unassigned DNA
tgtaacgtggagcctggtcgccccagcccgggagagggggaccctgcccgcaccctcctggtctggggagggcctagtggcagcccaggtgcagtgggccggaggccaggggagcccgtgtaggggaaccgcctggcctctgttcagtgtgcccctcccctgggtggggcttcaggcgctgagtcatggctttggttggggggcagcctcaccctcctccccgtcctccaagctgctgaggaaatcctgggctgagcacagcagaggaggcctaggtccccaggactgaggaagggagagctgaggggctcccagcagtgggagcggctctcggggcctctgccagggcccaccctgtccccatgagcacgtccgtgagctcctgggtgcagccatccccccttgctggctctccagggacacgggcgccccaaacccgagggcggcagctctgggtgcagctgtctctgcatccggccctgctcaggggtggctgcaactcctggggtgtggcgctctctgctgccttctcctgggaggatggtcccttctctgttctgggatcctccagctgaggtagaggtcagggtccaggggctgcaggctgggcactggcggtcagcggacaccacagcgagattccctccatcgccccctgcttcgggattcagagtcctcttagccccttgggaacaagagagggctgctcagagaggacctagtgtccttctggggtggctgggacccttcaaggtccctggctggggcagcctggtgcctgcagctccagctcctaattgaggacacgccccatgtaaaccacaggcccctcccccgaggcctgggacaccggtcagggtagcaaggtacgagggactgtaggccctgatggcctctgctcctggacccctgccctagacctggagtcctggccccagcccgggccctgtggtgcccaatccccaggaggccagatggcccggacagccagtgagccgattgtgtggagggctgccgggatcctggccctgtttccctgttgcctgctcccggagggggtggtcacgtgcccgatccatctgcctcctgtcttccggggattctcccgccgaggcttctctggtgatgtcatgccttaactcttctctccccaggcagccccactgtcaggctgtcctggtgggagtgggctctgaggaggatggcctacccgtctttccagcggaccatgccgcttgcagctgtgaggttgggggagccgggggcgtctctccccagctggtctgggtcctcctggtgctgccaggaccgagagcagctgccctactgcccccaccctgtcccacagtgcatgggtgccagacctggatgggctgcagtagtgcagtggggtgaggggaggtgccgcagggttgaggggctccagatgggtccagggttgactctgaactcctagaggagaggcgggtgaggctggctcagcccttggtgggcactgtccctgagggactcccagcggccggctgtcctgggagaggctggtccagccttcttccccgagggcacagcagcggctgcctctgcctgcctggggttgggggggcggggggaagtgcactgaacctggtcccagtcctgcccccgtagcaggcaggcgtctgtctcccagcctgtttcctgaaagccccttcccatggtggagcccctcagggaggtgcggggggaggtgaagccccgagggggctgaggctgcaggtgaccccagccagccccgttcttgctttagggcgaccattgacgaggtggagacggacgtggtggagattgaggccaaactggacaagctggtgaagctgtgcagtggcatggtggaagccggtaaggcctacgtcagcaccagcaggcttttcgtgagcggcgtccgcgacctgtcccagcagtgccagggcgacaccgtcatctcggaatgtctgcagaggttcgctgacagcctacaggaggtggtgaactaccacatgatcctgtttgaccaggcccagaggtccgtgcggcagcagctccagagctttgtcaaagaggatgtgcggaagttcaaggagacaaagaagcagtttgacaaggtgcgggaggacctggagctgtccctggtgaggaacgcccaggccccgaggcaccggccccacgaggtggaggaagccaccggggccctcaccctcaccaggaagtgcttccgccacctggcactggactatgtgctccagatcaatgttctgcaggccaagaagaagtttgagatcctggactctatgctgtccttcatgcacgcccagtccagcttcttccagcagggctacagcctcctgcaccagctggacccctacatgaagaagctggcagccgagctggaccagctggtgatcgactctgcggtggaaaagcgtgagatggagcgaaagcacgccgccatccagcagcggacgctgctgcaggacttctcctacgatgagtccaaagtggagtttgacgtggacgcgcccagtggggtggtgatggagggctacctcttcaagagggccagcaacgctttcaagacatggaaccggcgctggttctccattcagaacagccagctggtctaccagaagaagctcaaggatgccctcaccgtggtggtggatgacctccgcctgtgctctgtgaagccgtgtgaggacatcgagcggaggttctgcttcgaggtgctgtcacccaccaagagctgcatgctgcaggctgactccgagaagctgcggcaagcctgggtccaggctgtgcaggccagcatcgcctccgcctaccgcgagagccctgacagttgctatagcgagaggctggaccgcacagcatccccgtccacgagcagcatcgactccgccaccgacactcgggagcgtggcgtgaagggcgagagtgtgctgcagcgtgtgcagagtgtggccggcaacagccagtgcggcgactgcggccagccggacccccgctgggccagcatcaacctgggcgtgctgctctgcattgagtgctccggcatccacaggagcctgggtgtccactgctccaaggtgcggtccctgacgctggactcgtgggagcctgagctgctaaagctgatgtgtgagcttggaaacagcgctgtgaatcagatctatgaggcccagtgtgagggtgcaggcagcaggaaacccacagccagcagctcccggcaggacaaggaggcctggatcaaggacaaatacgtggaaaagaagtttctgcggaaggcgcccatggcaccagccctggaggccccaagacgctggagggtgcagaagtgcctgcggccccacagctctccccgcgctcccactgcccgccgcaaggtccggcttgagcccgttctgccctgtgtggccgctctgtcctcagtgggcaccctggatcgtaagttccgccgagactccctcttctgtcccgacgagctggactcgctcttctcctacttcgacgcaggggccgcaggggctggccctcgcaagggtgcagagtcggaggagtccagcggtgaggcagacggggacactgaggccgaggcctggggcctggcggacgtgcgcgagctgcacccggggctcttggcgcaccgcgcagcgcgtgcccgcgaccttcctgcgctggcggcggcgctggcccacggggccgaggtcaactgggcggacgcggaggatgagggcaagacgccgctggtgcaggccgtgctagggggctccttgatcgtctgtgagttcctgctgcaaaacggagcggacgtgaaccaaagagacagccggggccgggcgcccctgcaccacgccacgctgctgggccgcaccggccaggtttgcctgttcctgaagcggggcgcggaccagcacgccctggaccaagagcagcgggacccgttggccatcgcagtgcaggcggccaacgctgacatcgtgacactgctccgtctggcgcgcatggcggaggaaatgcgcgaggccgaggctgcccctggtcccccgggcgccctggcgggcagccccacggagctccagttccgcaggtgtatccaggagttcatcagcctccacctggaagagagctagggccgggcaggccgggcagctgccaccccgcccggcccgacgccccgcatgccccgaagtccctggcgcccacccggccgcggccctgcgtgtgacccgcgggtcgatacctggcagccccagtgctggggcgccgcggccctgctcgcccaggaggagagcgagggccccacactgagtctcttgaagcctcacgtttccctgggggggtgctgcatcgtcgggtgtccctcaccccacctggggaacctctgtcttcaggtcaccccttttcaggggcctgggttgctcatgtcacaagccacttttaaggcccgtgtcacctgtgtccctgtgtcctcagggcctgtgttacttcgtgccccacttctgcccagaacactgacctgttagctggctccctcctgcacaccccagagcctcctcccagggcagaaagggtggcccatccagggaaccaacgagtacctcacttagtgaccccagcatccaggctggcgtcgcgggtgctgggcgggaggggctctggcctgggtcctcagccctggctggacgcgggcgtcccaaggccacgtggctggccacgaaggtccccgtgccagacagccccagccgcatcccggcctcctccggaggcaccttctcctggtactcggcccagagcctgcgcataaagccactttgccactttgcagccctcatctcatgttctttgtagcggaccgagtgggtttgctataggcctcgtctgactttgtcttgcgtcttttctctgtggactcttgaggacgcctgagccccagccctgcccctgaccagcctcccccttgggtccaggggtctttcggctcatattgcagggcctgccaatgccttcacgcaccccttccccaaaggtgcccggcagggaggcagggcctcccccactcagcgcaggtcaggctaaggccagtcggctggtcactatgcaatgctgccctggggaggctccctgagggcacagtgggcgctggacccggccccccaactctcttgcctgctgcctgtgaccctgaagaacagaattgattcttgcccctctccctgtgtgagcttggccccgcctcttgccccaggcccctgctggcgggtctcaccccccacccctcgctttgaataaagcacttgcgcccac

SEQ ID NO: 231 - DNA, 2725 bp, Homo sapiens
  source 1..2725: mol_type = unassigned DNA
cagcctgctggtccctgcagggctggggtggggccggcactctcgggcccccagctgtgaacgtgaggggtctgccccacgggttgcagggctgggggccttgctcaggtcaagaagtggctgtggtgaacagagggtctctcgtctgagcgtgtggtccgtgggccgtgtggcagcctcagacaaggacctcacccccacctgtgctccgggaaagcacggagggtagcagggcccctggggtgggcactgagggggcgggttccatccccccaggacttctcctacgatgagtccaaagtggagtttgacgtggacgcgcccagtggggtggtgatggagggctacctcttcaagagggccagcaacgctttcaagacatggaaccggcgctggttctccattcagaacagccagctggtctaccagaagaagctcaaggatgccctcaccgtggtggtggatgacctccgcctgtgctctgtgaagccgtgtgaggacatcgagcggaggttctgcttcgaggtgctgtcacccaccaagagctgcatgctgcaggctgactccgagaagctgcggcaagcctgggtccaggctgtgcaggccagcatcgcctccgcctaccgcgagagccctgacagttgctatagcgagaggctggaccgcacagcatccccgtccacgagcagcatcgactccgccaccgacactcgggagcgtggcgtgaagggcgagagtgtgctgcagcgtgtgcagagtgtggccggcaacagccagtgcggcgactgcggccagccggacccccgctgggccagcatcaacctgggcgtgctgctctgcattgagtgctccggcatccacaggagcctgggtgtccactgctccaaggtgcggtccctgacgctggactcgtgggagcctgagctgctaaagctgatgtgtgagcttggaaacagcgctgtgaatcagatctatgaggcccagtgtgagggtgcaggcagcaggaaacccacagccagcagctcccggcaggacaaggaggcctggatcaaggacaaatacgtggaaaagaagtttctgcggaaggcgcccatggcaccagccctggaggccccaagacgctggagggtgcagaagtgcctgcggccccacagctctccccgcgctcccactgcccgccgcaaggtccggcttgagcccgttctgccctgtgtggccgctctgtcctcagtgggcaccctggatcgtaagttccgccgagactccctcttctgtcccgacgagctggactcgctcttctcctacttcgacgcaggggccgcaggggctggccctcgcagtctgagtagcgacagtggccttgggggcagctcggatggcagctcggacgtcctggctttcggctcgggctctgtggtggacagcgtcactgaggaggagggtgcagagtcggaggagtccagcggtgaggcagacggggacactgaggccgaggcctggggcctggcggacgtgcgcgagctgcacccggggctcttggcgcaccgcgcagcgcgtgcccgcgaccttcctgcgctggcggcggcgctggcccacggggccgaggtcaactgggcggacgcggaggatgagggcaagacgccgctggtgcaggccgtgctagggggctccttgatcgtctgtgagttcctgctgcaaaacggagcggacgtgaaccaaagagacagccggggccgggcgcccctgcaccacgccacgctgctgggccgcaccggccaggtttgcctgttcctgaagcggggcgcggaccagcacgccctggaccaagagcagcgggacccgttggccatcgcagtgcaggcggccaacgctgacatcgtgacactgctccgtctggcgcgcatggcggaggaaatgcgcgaggccgaggctgcccctggtcccccgggcgccctggcgggcagccccacggagctccagttccgcaggtgtatccaggagttcatcagcctccacctggaagagagctagggccgggcaggccgggcagctgccaccccgcccggcccgacgccccgcatgccccgaagtccctggcgcccacccggccgcggccctgcgtgtgacccgcgggtcgatacctggcagccccagtgctggggcgccgcggccctgctcgcccaggaggagagcgagggccccacactgagtctcttgaagcctcacgtttccctgggggggtgctgcatcgtcgggtgtccctcaccccacctggggaacctctgtcttcaggtcaccccttttcaggggcctgggttgctcatgtcacaagccacttttaaggcccgtgtcacctgtgtccctgtgtcctcagggcctgtgttacttcgtgccccacttctgcccagaacactgacctgttagctggctccctcctgcacaccccagagcctcctcccagggcagaaagggtggcccatccagggaaccaacgagtacctcacttagtgaccccagcatccaggctggcgtcgcgggtgctgggcgggaggggctctggcctgggtcctcagccctggctggacgcgggcgtcccaaggccacgtggctggccacgaaggtccccgtgccagacagccccagccgcatcccggcctcctccggaggcaccttctcctggtactcggcccagagcctgcgcataaagccactttgccactttgca

SEQ ID NO: 232 - DNA, 421 bp, Homo sapiens
  source 1..421: mol_type = unassigned DNA
cctttgagctgttatttggttttctctcctttgctcctagcctgcagctggctccccccggccctgggtgggagctggtcctgtccctaggggtggcccctggagggtgggtggagttccagccttgccccagggctctggacggagtctgggcctcccaccctcaggacccccttccctgcggacctgcaggtctgagtagcgacagtggccttgggggcagctcggatggcagctcggacgtcctggctttcggctcgggctctgtggtggacagcgtcactgaggaggagggtgcagagtcggaggagtccagcggtgaggcagacggggacactgaggccgaggcctggggcctggcggacgtgcgcgagctgcacccggggctcttggcgcaccgcgcagcgcgtgcccgcgacct

SEQ ID NO: 233 - DNA, 492 bp, Homo sapiens
  source 1..492: mol_type = unassigned DNA
acgccggagccggaacagtcagggagcagagagctggacacggggcttggggctcaggcagtcggcctccgggtctccaaggatgccctcaccgtggtggtggatgacctccgcctgtgctctgtgaagccgtgtgaggacatcgagcggaggttctgcttcgaggtgctgtcacccaccaagagctgcatgctgcaggctgactccgagaagctgcggcaagcctgggtccaggctgtgcaggccagcatcgcctccgcctaccgcgagagccctgacagttgctatagcgagaggctggaccgcacagcatccccgtccacgagcagcatcgactccgccaccgacactcgggagcgtggcgtgaagggcgagagtgtgctgcagcgtgtgcagagtgtggccggcaacagccagtgcggcgactgcggccagccggacccccgctgggccagcatcaacctgggcgtgctgctctgcattgagtgctcc

SEQ ID NO: 234 - DNA, 819 bp, Homo sapiens
  source 1..819: mol_type = unassigned DNA
cggtggtcacctctgtggcctcagtcactggctccttgcggggcctttgcttgcctgtgggacagcagccccggccaccatcccgggcagaggttggctgcaggcaggagtggctattttgggataggggagagccccccaggagttggggacgggtccaccagtcaccaggagttggggacgggtccaccagtcaccaggagttggcagccgtcactcactggctttctccccctaccccctcctgctccggccctccagacgctgctgcaggacttctcctacgatgagtccaaagtggagtttgacgtggacgcgcccagtggggtggtgatggagggctacctcttcaagagggccagcaacgctttcaagacatggaaccggcgctggttctccattcagaacagccagctggtctaccagaagaagctcaaggatgccctcaccgtggtggtggatgacctccgcctgtgctctgtgaagccgtgtgaggacatcgagcggaggttctgcttcgaggtgctgtcacccaccaagagctgcatgctgcaggctgactccgagaagctgcggcaagcctgggtccaggctgtgcaggccagcatcgcctccgcctaccgcgagagccctgacagttgctatagcgagaggctggaccgcacagcatccccgtccacgagcagcatcgactccgccaccgacactcgggagcgtggcgtgaagggcgagagtgtgctgcagcgtgtgcagagtgtggccggcaacagccagtgcggcgactgcggccagccggacccccgctgggccagcatcaac

SEQ ID NO: 235 - DNA, 326 bp, Homo sapiens
  source 1..326: mol_type = unassigned DNA
agcagagagctggacacggggcttggggctcaggcagtcggcctccgggtctccaaggtgaagcaggaagtgggtggtcggggccgggtggtggctgagggcaggggccacagcggtgccgcccacaggatgccctcaccgtggtggtggatgacctccgcctgtgctctgtgaagccgtgtgaggacatcgagcggaggttctgcttcgaggtgctgtcacccaccaagagctgcatgctgcaggctgactccgagaagctgcggcaagcctgggtccaggctgtgcaggccagcatcgcctccgcctaccgcgagagccctgac

SEQ ID NO: 236 - DNA, 1946 bp, Homo sapiens
  source 1..1946: mol_type = unassigned DNA
actcactctgccgggagagtccagcataggttgcgttcaaacaccggcagctcatcacgccggtgacagccagtggccaggcggtacaggtaggtccgggacgtggctgcgtgacgagcgtggaagtcgctgggcactcggaaggcccgcaggaccctatggcggcagggcgaccattgacgaggtggagacggacgtggtggagattgaggccaaactggacaagctggtgaagctgtgcagtggcatggtggaagccggtaaggcctacgtcagcaccagcaggcttttcgtgagcggcgtccgcgacctgtcccagcagtgccagggcgacaccgtcatctcggaatgtctgcagaggttcgctgacagcctacaggaggtggtgaactaccacatgatcctgtttgaccaggcccagaggtccgtgcggcagcagctccagagctttgtcaaagaggatgtgcggaagttcaaggagacaaagaagcagtttgacaaggtgcgggaggacctggagctgtccctggtgaggaacgcccaggccccgaggcaccggccccacgaggtggaggaagccaccggggccctcaccctcaccaggaagtgcttccgccacctggcactggactatgtgctccagatcaatgttctgcaggccaagaagaagtttgagatcctggactctatgctgtccttcatgcacgcccagtccagcttcttccagcagggctacagcctcctgcaccagctggacccctacatgaagaagctggcagccgagctggaccagctggtgatcgactctgcggtggaaaagcgtgagatggagcgaaagcacgccgccatccagcagcgggtgaggccgcgcagccggctccctgcacaccaggcgcctgggaggcccctgcgtcctcaccccatgcccggcacaccctccccgccccttcctcctgcctgtctcccacctgccctgcccacaccctctctaggggaccaaggctgctccctttgatgtgtgcagtggaggggcacgtgtgggtggggccgctgctgggatctccttttgaggcggtggtcacctctgtggcctcagtcactggctccttgcggggcctttgcttgcctgtgggacagcagccccggccaccatcccgggcagaggttggctgcaggcaggagtggctattttgggataggggagagccccccaggagttggggacgggtccaccagtcaccaggagttggggacgggtccaccagtcaccaggagttggcagccgtcactcactggctttctccccctaccccctcctgctccggccctccagacgctgctgcaggtaagtgagcacgggccctgggcgggctgtgggtcgggggagaccagatggggcggtgcctttccctcctctaccccaagggcacttcagcaccaaggacacctcccaccagtctcggctcctgctgctgatgcggctgtgaggggctggctccggccagacctccacattccccgtggggttggcggcagctgtcccttcccatcccatgtggcctggggagcaggtggccgcccctcccctctgcttccctggcctgccagatggcgggacacacagggccctcagtgactcccaggcctcctgaatggggctctgtccgcccagctggccacatgaatggggcactcaggatgcggagggtgggggcgcagcttccttcctgatcgcagcctgctggtccctgcagggctggggtggggccggcactctcgggcccccagctgtgaacgtgaggggtctgccccacgggttgcagggctgggggccttgctcaggtcaagaagtggctgtggtgaacagagggtctctcgtctgagcgtgtggtccgtgggccgtgtggcagcctcagacaaggacctcacccccacctgtgctccgg

SEQ ID NO: 237 - DNA, 582 bp, Homo sapiens
  source 1..582: mol_type = unassigned DNA
gcagccatgaccgtggagttcgaggagtgcgtcaaggactccccgcgcttcagagcagcgcgtggggaacaggcagctggagccgcgtttaaggcctgggggcgaccattgacgaggtggagacggacgtggtggagattgaggccaaactggacaagctggtgaagctgtgcagtggcatggtggaagccggtaaggcctacgtcagcaccagcaggcttttcgtgagcggcgtccgcgacctgtcccagcagtgccagggcgacaccgtcatctcggaatgtctgcagaggttcgctgacagcctacaggaggtggtgaactaccacatgatcctgtttgaccaggcccagaggtccgtgcggcagcagctccagagctttgtcaaagaggatgtgcggaagttcaaggagacaaagaagcagtttgacaaggtgcgggaggacctggagctgtccctggtgaggaacgcccaggccccgaggcaccggccccacgaggtggaggaagccaccggggccctcaccctcaccaggaagtgcttccgccacctggcactggactatgtgctccagatcaatg

SEQ ID NO: 238 - DNA, 2393 bp, Homo sapiens
  source 1..2393: mol_type = unassigned DNA
ctgtttccctgttgcctgctcccggagggggtggtcacgtgcccgatccatctgcctcctgtcttccggggattctcccgccgaggcttctctggtgatgtcatgccttaactcttctctccccaggcagccccactgtcaggctgtcctggtgggagtgggctctgaggaggatggcctacccgtctttccagcggaccatgccgcttgcagctgtgaggttgggggagccgggggcgtctctccccagctggtctgggtcctcctggtgctgccaggaccgagagcagctgccctactgcccccaccctgtcccacagtgcatgggtgccagacctggatgggctgcagtagtgcagtggggtgaggggaggtgccgcagggttgaggggctccagatgggtccagggttgactctgaactcctagaggagaggcgggtgaggctggctcagcccttggtgggcactgtccctgagggactcccagcggccggctgtcctgggagaggctggtccagccttcttccccgagggcacagcagcggctgcctctgcctgcctggggttgggggggcggggggaagtgcactgaacctggtcccagtcctgcccccgtagcaggcaggcgtctgtctcccagcctgtttcctgaaagccccttcccatggtggagcccctcagggaggtgcggggggaggtgaagccccgagggggctgaggctgcaggtgaccccagccagccccgttcttgctttagggcgaccattgacgaggtggagacggacgtggtggagattgaggccaaactggacaaggtgaagggcgggcctggagcgccctgtgcccggccaagcttgggatggccacatggccagactcgccctccaggccttactaagccacttacaccccccatatgtggagcatgcgtgtggtgctccaggtcctggtccctgtgtcttagcatgtgtgttccagggtgcacatgtcacatgcacacatgtggctggccctgagtctcgtcccatctgggaggggctgggctgtggtgagtccccgacccacggtggctgcccgtcccctctgctgggctggtgacacggggacagctgctgtgtgggctgagccttggtgtggctggggctggggctgagaaaggggagggggcaacaggccgtggaggggggagccgtgtccatgagccccacatgggctgagaaagagggggcaacaggccgtggagaggggagccgtgtccatgagccccacatgggctgagaaagaggagggggcaacaggccgtggagctgggagtgggcagccttatccatgagccccacatgggctggttctgctggtcctgctggccctgggtcccctgcctggctcctggtccctcccagccgagccgtggcggccccaccctcccctcccagacgggcctccaagccccaggcaggcccaggcgtgaggaagctgcaccggggcactgagtcctgagtgccaacgccctgagtggaacctaccctgggagctcttcctgcctctgagtggccgtgtgtggtggcgagtgcaggcgccagtgcccactgtgctcaccacgccccgctggcccacagctggtgaagctgtgcagtggcatggtggaagccggtaaggcctacgtcagcaccagcaggcttttcgtgagcggcgtccgcgacctgtcccagcagtgccagggcgacaccgtcatctcggaatgtctgcagaggttcgctgacagcctacaggaggtggtgaactaccacatgatcctgtttgaccaggcccagaggtccgtgcggcagcagctccagagctttgtcaaagagtgagtggcccccagggctgggggaagaacactgaggccacgctccctcccttggaggggaagggggtctggggcagagcagaggcaccttgggcccaggcctccaggctgtgcagcggctccacaaggcagaaggctcagaggcagacagccgggtggagtgcggggggttccacaccctgcatgtgtgggtggggtgtccagcccccacagcagagaggtccagtccacgttgggtttgggggtctggagtctggggcatggctggggtctgggctggacagatcttgagagtgaggtggggaggggctggggaggcctggagcagatgatcggggtcagcaggggtgcgggcaggcctgggataggctggtgaggaaggaggctatgcccaggagcaaagaaagggcctggagtggaggggggtggggctgggcatggtggctcacacctgtaatcccagcgtttgggaggccaaggccagagaatgccaggagtttgagaccagcctgggcaacgtaatgagacctccatctctac

SEQ ID NO: 239 - DNA, 485 bp, Homo sapiens
  source 1..485: mol_type = unassigned DNA
gcggccgccgcagccatgaccgtggagttcgaggagtgcgtcaaggactccccgcgcttcagggcgaccattgacgaggtggagacggacgtggtggagattgaggccaaactggacaagctggtgaagctgtgcagtggcatggtggaagccggtaaggcctacgtcagcaccagcaggcttttcgtgagcggcgtccgcgacctgtcccagcagtgccagggcgacaccgtcatctcggaatgtctgcagaggttcgctgacagcctacaggaggtggtgaactaccacatgatcctgtttgaccaggcccagaggtccgtgcggcagcagctccagagctttgtcaaagagtgagtggcccccagggctgggggaagaacactgaggccacgctccctcccttggaggggaagggggtctggggcagagcagaggcaccttgggcccaggcctccaggctgtgcagcggctccacaaggcag

SEQ ID NO: 240 - DNA, 265 bp, Homo sapiens
  source 1..265: mol_type = unassigned DNA
gccatgaccgtggagttcgaggagtgcgtcaaggactccccgcgcttcagacgtgtgcacaagtgtgcatcggctttgcttggtggacatttggcaaacgacaatggaggcaaagaaacctctctgcatccccaaggcgaccattgacgaggtggagacggacgtggtggagattgaggccaaactggacaagctggtgaagctgtgcagtggcatggtggaagccggtaaggcctacgtcagcaccagcaggcttttcgtgagc

SEQ ID NO: 241 - DNA, 2280 bp, Homo sapiens
  source 1..2280: mol_type = unassigned DNA
atggtggaagccggtaaggcctacgtcagcaccagcaggcttttcgtgagcggcgtccgcgacctgtcccagcagtgccagggcgacaccgtcatctcggaatgtctgcagaggttcgctgacagcctacaggaggtggtgaactaccacatgatcctgtttgaccaggcccagaggtccgtgcggcagcagctccagagctttgtcaaagaggatgtgcggaagttcaaggagacaaagaagcagtttgacaaggtgcgggaggacctggagctgtccctggtgaggaacgcccaggccccgaggcaccggccccacgaggtggaggaagccaccggggccctcaccctcaccaggaagtgcttccgccacctggcactggactatgtgctccagatcaatgttctgcaggccaagaagaagtttgagatcctggactctatgctgtccttcatgcacgcccagtccagcttcttccagcagggctacagcctcctgcaccagctggacccctacatgaagaagctggcagccgagctggaccagctggtgatcgactctgcggtggaaaagcgtgagatggagcgaaagcacgccgccatccagcagcggacgctgctgcaggacttctcctacgatgagtccaaagtggagtttgacgtggacgcgcccagtggggtggtgatggagggctacctcttcaagagggccagcaacgctttcaagacatggaaccggcgctggttctccattcagaacagccagctggtctaccagaagaagctcaaggatgccctcaccgtggtggtggatgacctccgcctgtgctctgtgaagccgtgtgaggacatcgagcggaggttctgcttcgaggtgctgtcacccaccaagagctgcatgctgcaggctgactccgagaagctgcggcaagcctgggtccaggctgtgcaggccagcatcgcctccgcctaccgcgagagccctgacagttgctatagcgagaggctggaccgcacagcatccccgtccacgagcagcatcgactccgccaccgacactcgggagcgtggcgtgaagggcgagagtgtgctgcagcgtgtgcagagtgtggccggcaacagccagtgcggcgactgcggccagccggacccccgctgggccagcatcaacctgggcgtgctgctctgcattgagtgctccggcatccacaggagcctgggtgtccactgctccaaggtgcggtccctgacgctggactcgtgggagcctgagctgctaaagctgatgtgtgagcttggaaacagcgctgtgaatcagatctatgaggcccagtgtgagggtgcaggcagcaggaaacccacagccagcagctcccggcaggacaaggaggcctggatcaaggacaaatacgtggaaaagaagtttctgcggaaggcgcccatggcaccagccctggaggccccaagacgctggagggtgcagaagtgcctgcggccccacagctctccccgcgctcccactgcccgccgcaaggtccggcttgagcccgttctgccctgtgtggccgctctgtcctcagtgggcaccctggatcgtaagttccgccgagactccctcttctgtcccgacgagctggactcgctcttctcctacttcgacgcaggggccgcaggggctggccctcgcaagggtgcagagtcggaggagtccagcggtgaggcagacggggacactgaggccgaggcctggggcctggcggacgtgcgcgagctgcacccggggctcttggcgcaccgcgcagcgcgtgcccgcgaccttcctgcgctggcggcggcgctggcccacggggccgaggtcaactgggcggacgcggaggatgagggcaagacgccgctggtgcaggccgtgctagggggctccttgatcgtctgtgagttcctgctgcaaaacggagcggacgtgaaccaaagagacagccggggccgggcgcccctgcaccacgccacgctgctgggccgcaccggccaggtttgcctgttcctgaagcggggcgcggaccagcacgccctggaccaagagcagcgggacccgttggccatcgcagtgcaggcggccaacgctgacatcgtgacactgctccgtctggcgcgcatggcggaggaaatgcgcgaggccgaggctgcccctggtcccccgggcgccctggcgggcagccccacggagctccagttccgcaggtgtatccaggagttcatcagcctccacctggaagagagctag

SEQ ID NO: 242 - DNA, 539 bp, Homo sapiens
  source 1..539: mol_type = unassigned DNA
agaaggggcagagccgagcaccgcgcaccgcgtcatgggggccgcctcgggccgccgggggccggggctgctgctgccgctgccgctgctgttgctgctgccgccgcagcccgccctggcgttggaccccgggctgcagcccggcaacttttctgctgacgaggccggggcgcagctcttcgcgcagagctacaactccagcgccgaacaggtgctgttccagagcgtggccgccagctgggcgcacgacaccaacatcaccgcggagaatgcaaggcgccaggaggaagcagccctgctcagccaggagtttgcggaggcctggggccagaaggccaaggagctgtatgaaccgatctggcagaacttcacggacccgcagctgcgcaggatcatcggagctgtgcgcaccctgggctctgccaacctgcccctggctaagcggcagcaggctgcctccactggcaggggactcagaagtgatccggtcacactaagtgacacttagtgatcagaagtgccccggtgccactgagtgg

SEQ ID NO: 243 - DNA, 1475 bp, Homo sapiens
  source 1..1475: mol_type = unassigned DNA
agaaggggcagagccgagcaccgcgcaccgcgtcatgggggccgcctcgggccgccgggggccggggctgctgctgccgctgccgctgctgttgctgctgccgccgcagcccgccctggcgttggaccccgggctgcagcccggcaacttttctgctgacgaggccggggcgcagctcttcgcgcagagctacaactccagcgccgaacaggtgctgttccagagcgtggccgccagctgggcgcacgacaccaacatcaccgcggagaatgcaaggcgccaggaggaagcagccctgctcagccaggagtttgcggaggcctggggccagaaggccaaggagctgtatgaaccgatctggcagaacttcacggacccgcagctgcgcaggatcatcggagctgtgcgcaccctgggctctgccaacctgcccctggctaagcggcagcagtacaacgccctgctaagcaacatgagcaggatctactccaccgccaaggtctgcctccccaacaagactgccacctgctggtccctggacccagatctcaccaacatcctggcttcctcgcgaagctacgccatgctcctgtttgcctgggagggctggcacaacgctgcgggcatcccgctgaaaccgctgtacgaggatttcactgccctcagcaatgaagcctacaagcaggacggcttcacagacacgggggcctactggcgctcctggtacaactcccccaccttcgaggacgatctggaacacctctaccaacagctagagcccctctacctgaacctccatgccttcgtccgccgcgcactgcatcgccgatacggagacagatacatcaacctcaggggacccatccctgctcatctgctgggagacatgtgggcccagagctgggaaaacatctacgacatggtggtgcctttcccagacaagcccaacctcgatgtcaccagtactatgctgcagcagggctggaacgccacgcacatgttccgggtggcagaggagttcttcacctccctggagctctcccccatgcctcccgagttctgggaagggtcgatgctggagaagccggccgacgggcgggaagtggtgtgccacgcctcggcttgggacttctacaacaggaaagacttcaggatcaagcagtgcacacgggtcacgatggaccagctctccacagtgcaccatgagatgggccatatacagtactacctgcagtacaaggatctgcccgtctccctgcgtcggggggccaaccccggcttccatgaggccattggggacgtgctggcgctctcggtctccactcctgaacatctgcacaaaatcggcctgctggaccgtgtcaccaatgacacggaaccaagtatcaggggatctgtcctcctgttacccgaaacgaaacccactttgatgctggagctaagtttcatgttccaaatgtgacaccatacatcag

SEQ ID NO: 244 - DNA, 2398 bp, Homo sapiens
  source 1..2398: mol_type = unassigned DNA
agaaggggcagagccgagcaccgcgcaccgcgtcatgggggccgcctcgggccgccgggggccggggctgctgctgccgctgccgctgctgttgctgctgccgccgcagcccgccctggcgttggaccccgggctgcagcccggcaacttttctgctgacgaggccggggcgcagctcttcgcgcagagctacaactccagcgccgaacaggtgctgttccagagcgtggccgccagctgggcgcacgacaccaacatcaccgcggagaatgcaaggcgccaggaggaagcagccctgctcagccaggagtttgcggaggcctggggccagaaggccaaggagctgtatgaaccgatctggcagaacttcacggacccgcagctgcgcaggatcatcggagctgtgcgcaccctgggctctgccaacctgcccctggctaagcggcagcagatctcaccaacatcctggcttcctcgcgaagctacgccatgctcctgtttgcctgggagggctggcacaacgctgcgggcatcccgctgaaaccgctgtacgaggatttcactgccctcagcaatgaagcctacaagcaggacggcttcacagacacgggggcctactggcgctcctggtacaactcccccaccttcgaggacgatctggaacacctctaccaacagctagagcccctctacctgaacctccatgccttcgtccgccgcgcactgcatcgccgatacggagacagatacatcaacctcaggggacccatccctgctcatctgctgggagacatgtgggcccagagctgggaaaacatctacgacatggtggtgcctttcccagacaagcccaacctcgatgtcaccagtactatgctgcagcagggctggaacgccacgcacatgttccgggtggcagaggagttcttcacctccctggagctctcccccatgcctcccgagttctgggaagggtcgatgctggagaagccggccgacgggcgggaagtggtgtgccacgcctcggcttgggacttctacaacaggaaagacttcaggatcaagcagtgcacacgggtcacgatggaccagctctccacagtgcaccatgagatgggccatatacagtactacctgcagtacaaggatctgcccgtctccctgcgtcggggggccaaccccggcttccatgaggccattggggacgtgctggcgctctcggtctccactcctgaacatctgcacaaaatcggcctgctggaccgtgtcaccaatgacacggaaagtgacatcaattacttgctaaaaatggcactggaaaaaattgccttcctgccctttggctacttggtggaccagtggcgctggggggtctttagtgggcgtacccccccttcccgctacaacttcgactggtggtatcttcgaaccaagtatcaggggatctgtcctcctgttacccgaaacgaaacccactttgatgctggagctaagtttcatgttccaaatgtgacaccatacatcaggtactttgtgagttttgtcctgcagttccagttccatgaagccctgtgcaaggaggcaggctatgagggcccactgcaccagtgtgacatctaccggtccaccaaggcaggggccaagctccggaaggtgctgcaggctggctcctccaggccctggcaggaggtgctgaaggacatggtcggcttagatgccctggatgcccagccgctgctcaagtacttccagccagtcacccagtggctgcaggagcagaaccagcagaacggcgaggtcctgggctggcccgagtaccagtggcacccgccgttgcctgacaactacccggagggcatagacctggtgactgatgaggctgaggccagcaagtttgtggaggaatatgaccggacatcccaggtggtgtggaacgagtatgccgaggccaactggaactacaacaccaacatcaccacagagaccagcaagattctggtgggagccacctccccacccccaaacctgagcatgtgcatacacacagagatgctgtcccgctcaccacacagtggggctgccaccacattttaaattgaatatttaaaacaatactcaatttcgggccgggcgcggtggctcacgcctgtaatcccagcactttgggagggggaggcgggcggatcacgaggtcagatcaagaccatcctggctaacacggtgaaaccccatctctagtaaaaatacaaaaattagccgggtgtggtggcgagcacctgtagtcccagtactcaggaggctgaggcaggagaatggcatgaacccgggaggcagagcttgcagtgagccgagatggcaccactgcactccagcctgggcgacagagcgagactccatc

SEQ ID NO: 245 - DNA, 861 bp, Homo sapiens
  source 1..861: mol_type = unassigned DNA
agagccgagcaccgcgcaccgcgtcatgggggccgcctcgggccgccgggggccggggctgctgctgccgctgccgctgctgttgctgctgccgccgcagcccgccctggcgttggaccccgggctgcagcccggcaacttttctgctgacgaggccggggcgcagctcttcgcgcagagctacaactccagcgccgaacaggtgctgttccagagcgtggccgccagctgggcgcacgacaccaacatcaccgcggagaatgcaaggcgccaggaggaagcagccctgctcagccaggagtttgcggaggcctggggccagaaggccaaggagctgtatgaaccgatctggcagaacttcacggacccgcagctgcgcaggatcatcggagctgtgcgcaccctgggctctgccaacctgcccctggctaagcggcagcaggtgggctgagggctgaggcagagctcgggggcggcctcctagtgccccatcgtgggggtcgggggagagcagcccatcagggagggaggaaccctgggatccacatgggccctgacagaagggaaagcccaggtaagcacagaatggctttctgagcattgatttttcttggagatggggtggggagttactttctgttaaaggaagcattctggagtaggaagccaaattcaaatacacttctccctaggctggtttatgagcttctttggaagagttgagaagggctgggcgtggtggctcaagcctgtaatcccagcactttgggaggctgaggtgggcgcatcgcttgagcccaggagttcaagaccagcctggccaacatggcaaaacctcgtctctacaaaaaaaaaatagct

SEQ ID NO: 246 - DNA, 4959 bp, Homo sapiens
  source 1..4959: mol_type = unassigned DNA
gagccgagcaccgcgcaccgcgtcatgggggccgcctcgggccgccgggggccggggctgctgctgccgctgccgctgctgttgctgctgccgccgcagcccgccctggcgttggaccccgggctgcagcccggcaacttttctgctgacgaggccggggcgcagctcttcgcgcagagctacaactccagcgccgaacaggtgctgttccagagcgtggccgccagctgggcgcacgacaccaacatcaccgcggagaatgcaaggcgccaggaggaagcagccctgctcagccaggagtttgcggaggcctggggccagaaggccaaggagctgtatgaaccgatctggcagaacttcacggacccgcagctgcgcaggatcatcggagctgtgcgcaccctgggctctgccaacctgcccctggctaagcggcagcagtacaacgccctgctaagcaacatgagcaggatctactccaccgccaaggtctgcctccccaacaagactgccacctgctggtccctggacccagatctcaccaacatcctggcttcctcgcgaagctacgccatgctcctgtttgcctgggagggctggcacaacgctgcgggcatcccgctgaaaccgctgtacgaggatttcactgccctcagcaatgaagcctacaagcaggacggcttcacagacacgggggcctactggcgctcctggtacaactcccccaccttcgaggacgatctggaacacctctaccaacagctagagcccctctacctgaacctccatgccttcgtccgccgcgcactgcatcgccgatacggagacagatacatcaacctcaggggacccatccctgctcatctgctgggagacatgtgggcccagagctgggaaaacatctacgacatggtggtgcctttcccagacaagcccaacctcgatgtcaccagtactatgctgcagcagggctggaacgccacgcacatgttccgggtggcagaggagttcttcacctccctggagctctcccccatgcctcccgagttctgggaagggtcgatgctggagaagccggccgacgggcgggaagtggtgtgccacgcctcggcttgggacttctacaacaggaaagacttcaggatcaagcagtgcacacgggtcacgatggaccagctctccacagtgcaccatgagatgggccatatacagtactacctgcagtacaaggatctgcccgtctccctgcgtcggggggccaaccccggcttccatgaggccattggggacgtgctggcgctctcggtctccactcctgaacatctgcacaaaatcggcctgctggaccgtgtcaccaatgacacggaaagtgacatcaattacttgctaaaaatggcactggaaaaaattgccttcctgccctttggctacttggtggaccagtggcgctggggggtctttagtgggcgtacccccccttcccgctacaacttcgactggtggtatcttcgaaccaagtatcaggggatctgtcctcctgttacccgaaacgaaacccactttgatgctggagctaagtttcatgttccaaatgtgacaccatacatcaggtactttgtgagttttgtcctgcagttccagttccatgaagccctgtgcaaggaggcaggctatgagggcccactgcaccagtgtgacatctaccggtccaccaaggcaggggccaagctccggaaggtgctgcaggctggctcctccaggccctggcaggaggtgctgaaggacatggtcggcttagatgccctggatgcccagccgctgctcaagtacttccagccagtcacccagtggctgcaggagcagaaccagcagaacggcgaggtcctgggctggcccgagtaccagtggcacccgccgttgcctgacaactacccggagggcatagacctggtgactgatgaggctgaggccagcaagtttgtggaggaatatgaccggacatcccaggtggtgtggaacgagtatgccgaggccaactggaactacaacaccaacatcaccacagagaccagcaagattctgctgcagaagaacatgcaaatagccaaccacaccctgaagtacggcacccaggccaggaagtttgatgtgaaccagttgcagaacaccactatcaagcggatcataaagaaggttcaggacctagaacgggcagcactgcctgcccaggagctggaggagtacaacaagatcctgttggatatggaaaccacctacagcgtggccactgtgtgccacccgaatggcagctgcctgcagctcgagccagatctgacgaatgtgatggccacgtcccggaaatatgaagacctgttatgggcatgggagggctggcgagacaaggcggggagagccatcctccagttttacccgaaatacgtggaactcatcaaccaggctgcccggctcaatggctatgtagatgcaggggactcgtggaggtctatgtacgagacaccatccctggagcaagacctggagcggctcttccaggagctgcagccactctacctcaacctgcatgcctacgtgcgccgggccctgcaccgtcactacggggcccagcacatcaacctggaggggcccattcctgctcacctgctggggaacatgtgggcgcagacctggtccaacatctatgacttggtggtgcccttcccttcagccccctcgatggacaccacagaggctatgctaaagcagggctggacgcccaggaggatgtttaaggaggctgatgatttcttcacctccctggggctgctgcccgtgcctcctgagttctggaacaagtcgatgctggagaagccaaccgacgggcgggaggtggtctgccacgcctcggcctgggacttctacaacggcaaggacttccggatcaagcagtgcaccaccgtgaacttggaggacctggtggtggcccaccacgaaatgggccacatccagtatttcatgcagtacaaagacttacctgtggccttgagggagggtgccaaccccggcttccatgaggccattggggacgtgctagccctctcagtgtctacgcccaagcacctgcacagtctcaacctgctgagcagtgagggtggcagcgacgagcatgacatcaactttctgatgaagatggcccttgacaagatcgcctttatccccttcagctacctcgtcgatcagtggcgctggagggtatttgatggaagcatcaccaaggagaactataaccaggagtggtggagcctcaggctgaagtaccagggcctctgccccccagtgcccaggactcaaggtgactttgacccaggggccaagttccacattccttctagcgtgccttacatcaggtactttgtcagcttcatcatccagttccagttccacgaggcactgtgccaggcagctggccacacgggccccctgcacaagtgtgacatctaccagtccaaggaggccgggcagcgcctggcgaccgccatgaagctgggcttcagtaggccgtggccggaagccatgcagctgatcacgggccagcccaacatgagcgcctcggccatgttgagctacttcaagccgctgctggactggctccgcacggagaacgagctgcatggggagaagctgggctggccgcagtacaactggacgccgaactccgctcgctcagaagggcccctcccagacagcggccgcgtcagcttcctgggcctggacctggatgcgcagcaggcccgcgtgggccagtggctgctgctcttcctgggcatcgccctgctggtagccaccctgggcctcagccagcggctcttcagcatccgccaccgcagcctccaccggcactcccacgggccccagttcggctccgaggtggagctgagacactcctgaggtgacccggctgggtcggccctgcccaagggcctcccaccagagactgggatgggaacactggtgggcagctgaggacacaccccacaccccagcccaccctgctcctcctgccctgtccctgtccccctcccctcccagtcctccagaccaccagccgccccagccccttctcccagcacacggctgcctgacactgagccccacctctccaagtctctctgtgaatacaattaaaggtcctgccctccccatctgagtctgtgtccctcacagggaagccagggacagggacaggctgctttcctgcctcctggcagtcaagtgggtcccgttactaggtttgttcctccatcctccttcaggagccggggaggatccccagagctctgccccagcacctcctggcgctggcgcctgtcttccctccagcccaggcagcccgccactgtcctgccaccgcaggcagcccctgtctggcccaagcactgacccacgcggactctgggaagcagacatcctgggctgctggcctcacatttccactggcagtggagcctttccctgctccacaaatggccaggtccccccaggggaaggcttccggctgttatcggctgcctcagggggcgagtaccttggagggcctgcttcaaggagggtgccccctggagggcacacaccagcctagtgcttaccttggctcctgcctgtaccagctccatgactctgctcgggtgaacagccttggctctcagacagccattctaacactgccagtgcagaggggcctcagacgctggagtgtagcagtggctgcacctgcacagggattagctgccagcagccaccctgctggcgtcccagcacacacctcctcactccctgcattggagggagtgtcattttaagggacatttttatgacttttatgtgtatgtttatgtagaaatttggaaaatacagaaaactgtaaagaaaataaaagccctttatatcaacgtcaagagataa

SEQ ID NO: 247 - DNA, 1002 bp, Homo sapiens
  source 1..1002: mol_type = unassigned DNA
ccgcggggcccgagcgccgggctgcgcgcacggcctgcgctcccagcatgcacgagttggatggatgagggtggctgctcccaggccgcgcccgccttcgccgaaggtgctgggcttggctctggggcccccgcgctctcgggcagctgccttctcacctccggacgctgtcgctgtcaccgtcaccgcactgcactgtccatccaccctccactcgcccggcctcttttctggtcccaatttctgctccaccattcccatgaggcagattccctccagaaggaggaagcgcggcttccgcaaactaaggaggaagcagccctgctcagccaggagtttgcggaggcctggggccagaaggccaaggagctgtatgaaccgatctggcagaacttcacggacccgcagctgcgcaggatcatcggagctgtgcgcaccctgggctctgccaacctgcccctggctaagcggcagcagtacaacgccctgctaagcaacatgagcaggatctactccaccgccaaggtctgcctccccaacaagactgccacctgctggtccctggacccagatctcaccaacatcctggcttcctcgcgaagctacgccatgctcctgtttgcctgggagggctggcacaacgctgcgggcatcccgctgaaaccgctgtacgaggatttcactgccctcagcaatgaagcctacaagcaggacggcttcacagacacgggggcctactggcgctcctggtacaactcccccaccttcgaggacgatctggaacacctctaccaacagctagagcccctctacctgaacctccatgccttcgtccgccgcgcactgcatcgccgatacggagacagatacatcaacctcaggggacccatccctgctcatctgctgggagacatgtgggcccagagctgggaaaacatctacgacatggtggtgcctttcccagacaagcccaacctcgatgtcaccagtactatgctgcag

SEQ ID NO: 248 - DNA, 933 bp, Homo sapiens
  source 1..933: mol_type = unassigned DNA
gagcgccgggctgcgcgcacggcctgcgctcccagcatgcacgagttggatggatgagggtggctgctcccaggccgcgcccgccttcgccgaaggtgctgggcttggctctggggcccccgcgctctcgggcagctgccttctcacctccggacgctgtcgctgtcaccgtcaccgcactgcactgtccatccaccctccactcgcccggcctcttttctggtcccaatttctgctccaccattcccatgaggcagattccctccagaaggaggaagcgcggcttccgcaaactaaggtctcccgcagggatctccccagggcccgggctctggaagcccttggccttcctcccctcccccagcaccgtggcttctcctttatggcctgcatctaagcagggtcctacaccctccctgccctcctggtgcccaataggaggaagcagccctgctcagccaggagtttgcggaggcctggggccagaaggccaaggagctgtatgaaccgatctggcagaacttcacggacccgcagctgcgcaggatcatcggagctgtgcgcaccctgggctctgccaacctgcccctggctaagcggcagcagtacaacgccctgctaagcaacatgagcaggatctactccaccgccaaggtctgcctccccaacaagactgccacctgctggtccctggacccagatctcaccaacatcctggcttcctcgcgaagctacgccatgctcctgtttgcctgggagggctggcacaacgctgcgggcatcccgctgaaaccgctgtacgaggatttcactgccctcagcaatgaagcctacaagcaggacggcttcacagacacgggggcctactggcgctcctggtacaactcccccaccttcgaggacgatctggaacacctctaccaacagctagag

SEQ ID NO: 249 - DNA, 867 bp, Homo sapiens
  source 1..867: mol_type = unassigned DNA
tgcaggctggctcctccaggccctggcaggaggtgctgaaggacatggtcggcttagatgccctggatgcccagccgctgctcaagtacttccagccagtcacccagtggctgcaggagcagaaccagcagaacggcgaggtcctgggctggcccgagtaccagtggcacccgccgttgcctgacaactacccggagggcataggtgacagtcacccatgggacaagcagccaggcaacaaccagcagccagacaaccacccaccaggcgacggcccaccagacatcagcccagagcccaagtgggaccatgcaggggaggggcagggtgccaggggtgggagaggcggggccgggtagggacagggcagggtacaagggagtgcgagagggataatggcttctggtgagaccacaaacctggagaggggaggcagaggtttgtctgtttccctgcactctgtcccacagacctggtgactgatgaggctgaggccagcaagtttgtggaggaatatgaccggacatcccaggtggtgtggaacgagtatgccgaggccaactggaactacaacaccaacatcaccacagagaccagcaagattctggcatccagggaggctgcagaagaacatgcaaatagccaaccacaccctgaagtacggcacccaggccaggaagtttgatgtgaaccagttgcagaacaccactatcaagcggatcataaagaaggttcaggacctagaacgggcagcactgcctgcccaggagctggaggagtacaacaagatcctgttggatatggaaaccacctacagcgtggccactgtgtgccacccgaatggcagctgcctgcagctcgagccag

SEQ ID NO: 250 - DNA, 2479 bp, Homo sapiens
  source 1..2479: mol_type = unassigned DNA
agctgcaggactctgctctcctgcggccatgggccagggttgggctactgcaggacttcccagcctcctcttcctgctgctctgctacgggcaccctctgctggtccccagccaggaggcatcccaacaggtgacagtcacccatgggacaagcagccaggcaacaaccagcagccagacaaccacccaccaggcgacggcccaccagacatcagcccagagcccaaacctggtgactgatgaggctgaggccagcaagtttgtggaggaatatgaccggacatcccaggtggtgtggaacgagtatgccgaggccaactggaactacaacaccaacatcaccacagagaccagcaagattctgctgcagaagaacatgcaaatagccaaccacaccctgaagtacggcacccaggccaggaagtttgatgtgaaccagttgcagaacaccactatcaagcggatcataaagaaggttcaggacctagaacgggcagcactgcctgcccaggagctggaggagtacaacaagatcctgttggatatggaaaccacctacagcgtggccactgtgtgccacccgaatggcagctgcctgcagctcgagccagatctgacgaatgtgatggccacgtcccggaaatatgaagacctgttatgggcatgggagggctggcgagacaaggcggggagagccatcctccagttttacccgaaatacgtggaactcatcaaccaggctgcccggctcaatggctatgtagatgcaggggactcgtggaggtctatgtacgagacaccatccctggagcaagacctggagcggctcttccaggagctgcagccactctacctcaacctgcatgcctacgtgcgccgggccctgcaccgtcactacggggcccagcacatcaacctggaggggcccattcctgctcacctgctggggaacatgtgggcgcagacctggtccaacatctatgacttggtggtgcccttcccttcagccccctcgatggacaccacagaggctatgctaaagcagggctggacgcccaggaggatgtttaaggaggctgatgatttcttcacctccctggggctgctgcccgtgcctcctgagttctggaacaagtcgatgctggagaagccaaccgacgggcgggaggtggtctgccacgcctcggcctgggacttctacaacggcaaggacttccggatcaagcagtgcaccaccgtgaacttggaggacctggtggtggcccaccacgaaatgggccacatccagtatttcatgcagtacaaagacttacctgtggccttgagggagggtgccaaccccggcttccatgaggccattggggacgtgctagccctctcagtgtctacgcccaagcacctgcacagtctcaacctgctgagcagtgagggtggcagcgacgagcatgacatcaactttctgatgaagatggcccttgacaagatcgcctttatccccttcagctacctcgtcgatcagtggcgctggagggtatttgatggaagcatcaccaaggagaactataaccaggagtggtggagcctcaggctgaagtaccagggcctctgccccccagtgcccaggactcaaggtgactttgacccaggggccaagttccacattccttctagcgtgccttacatcaggtactttgtcagcttcatcatccagttccagttccacgaggcactgtgccaggcagctggccacacgggccccctgcacaagtgtgacatctaccagtccaaggaggccgggcagcgcctggcgaccgccatgaagctgggcttcagtaggccgtggccggaagccatgcagctgatcacgggccagcccaacatgagcgcctcggccatgttgagctacttcaagccgctgctggactggctccgcacggagaacgagctgcatggggagaagctgggctggccgcagtacaactggacgccgaactccgctcgctcagaagggcccctcccagacagcggccgcgtcagcttcctgggcctggacctggatgcgcagcaggcccgcgtgggccagtggctgctgctcttcctgggcatcgccctgctggtagccaccctgggcctcagccagcggctcttcagcatccgccaccgcagcctccaccggcactcccacgggccccagttcggctccgaggtggagctgagacactcctgaggtgacccggctgggtcggccctgcccaagggcctcccaccagagactgggatgggaacactggtgggcagctgaggacacaccccacaccccagcccaccctgctcctcctgccctgtccctgtccccctcccctcccagtcctccagaccaccagccgccccagccccttctcccagcacacggctgcctgacactgagccccacctctccaagtctctctgtgaatacaattaaaggtcctgccctccc

SEQ ID NO: 251 - DNA, 982 bp, Homo sapiens
  source 1..982: mol_type = unassigned DNA
gcaggactctgctctcctgcggccatgggccagggttgggctactgcaggacttcccagcctcctcttcctgctgctctgctacgggcaccctctgctggtccccagccaggaggcatcccaacaggtgacagtcacccatgggacaagcagccaggcaacaaccagcagccagacaaccacccaccaggcgacggcccaccagacatcagcccagagcccaaacctggtgactgatgaggctgaggccagcaagtttgtggaggaatatgaccggacatcccaggtggtgtggaacgagtatgccgaggccaactggaactacaacaccaacatcaccacagagaccagcaagattctgggcctttacgacacttgggggtcttctcttctctgcccctgcctggatatgtgttgcttgaccgcaggcatccagggaggctgcagaagaacatgcaaatagccaaccacaccctgaagtacggcacccaggccaggaagtttgatgtgaaccagttgcagaacaccactatcaagcggatcataaagaaggttcaggacctagaacgggcagcactgcctgcccaggagctggaggagtacaacaagatcctgttggatatggaaaccacctacagcgtggccactgtgtgccacccgaatggcagctgcctgcagctcgagccagatctgacgaatgtgatggccacgtcccggaaatatgaagacctgttatgggcatgggagggctggcgagacaaggcggggagagccatcctccagttttacccgaaatacgtggaactcatcaaccaggctgcccggctcaatggctatgtagatgcaggggactcgtggaggtctatgtacgagacaccatccctggagcaagacctggagcggctcttccaggagctgcagccactctacctcaacctgcatgcctacgtgcgccgggccctgcaccgtcactacggggccca

SEQ ID NO: 252 - DNA, 1881 bp, Homo sapiens
  source 1..1881: mol_type = unassigned DNA
aggactctgctctcctgcggccatgggccagggttgggctactgcaggacttcccagcctcctcttcctgctgctctgctacgggcaccctctgctggtccccagccaggaggcatcccaacagacctggtgactgatgaggctgaggccagcaagtttgtggaggaatatgaccggacatcccaggtggtgtggaacgagtatgccgaggccaactggaactacaacaccaacatcaccacagagaccagcaagattctgctgcagaagaacatgcaaatagccaaccacaccctgaagtacggcacccaggccaggaagtttgatgtgaaccagttgcagaacaccactatcaagcggatcataaagaaggttcaggacctagaacgggcagcactgcctgcccaggagctggaggagtacaacaagatcctgttggatatggaaaccacctacagcgtggccactgtgtgccacccgaatggcagctgcctgcagctcgagccagatctgacgaatgtgatggccacgtcccggaaatatgaagacctgttatgggcatgggagggctggcgagacaaggcggggagagccatcctccagttttacccgaaatacgtggaactcatcaaccaggctgcccggctcaatgggaacatgtgggcgcagacctggtccaacatctatgacttggtggtgcccttcccttcagccccctcgatggacaccacagaggctatgctaaagcagggctggacgcccaggaggatgtttaaggaggctgatgatttcttcacctccctggggctgctgcccgtgcctcctgagttctggaacaagtcgatgctggagaagccaaccgacgggcgggaggtggtctgccacgcctcggcctgggacttctacaacggcaaggacttccggatcaagcagtgcaccaccgtgaacttggaggacctggtggtggcccaccacgaaatgggccacatccagtatttcatgcagtacaaagacttacctgtggccttgagggagggtgccaaccccggcttccatgaggccattggggacgtgctagccctctcagtgtctacgcccaagcacctgcacagtctcaacctgctgagcagtgagggtggcagcgacgagcatgacatcaactttctgatgaagatggcccttgacaagatcgcctttatccccttcagctacctcgtcgatcagtggcgctggagggtatttgatggaagcatcaccaaggagaactataaccaggagtggtggagcctcaggctgaagtaccagggcctctgccccccagtgcccaggactcaaggtgactttgacccaggggccaagttccacattccttctagcgtgccttacatcaggaccgccatgaagctgggcttcagtaggccgtggccggaagccatgcagctgatcacgggccagcccaacatgagcgcctcggccatgttgagctacttcaagccgctgctggactggctccgcacggagaacgagctgcatggggagaagctgggctggccgcagtacaactggacgccgaactccgctcgctcagaagggcccctcccagacagcggccgcgtcagcttcctgggcctggacctggatgcgcagcaggcccgcgtgggccagtggctgctgctcttcctgggcatcgccctgctggtagccaccctgggcctcagccagcggctcttcagcatccgccaccgcagcctccaccggcactcccacgggccccagttcggctccgaggtggagctgagacactcctgaggtgacccggctgggtcggccctgcccaagggcctcccaccagagactgggatgggaacactggtgggcagc

SEQ ID NO: 253 - DNA, 2237 bp, Homo sapiens
  source 1..2237: mol_type = unassigned DNA
aggactctgctctcctgcggccatgggccagggttgggctactgcaggacttcccagcctcctcttcctgctgctctgctacgggcaccctctgctggtccccagccaggaggcatcccaacaggtgacagtcacccatgggacaagcagccaggcaacaaccagcagccagacaaccacccaccaggcgacggcccaccagacatcagcccagagcccaaacctggtgactgatgaggctgaggccagcaagtttgtggaggaatatgaccggacatcccaggtggtgtggaacgagtatgccgaggccaactggaactacaacaccaacatcaccacagagaccagcaagattctgctgcagaagaacatgcaaatagccaaccacaccctgaagtacggcacccaggccaggaagtttgatgtgaaccagttgcagaacaccactatcaagcggatcataaagaaggttcaggacctagaacgggcagcactgcctgcccaggagctggaggagtacaacaagatcctgttggatatggaaaccacctacagcgtggccactgtgtgccacccgaatggcagctgcctgcagctcgagccagatctgacgaatgtgatggccacgtcccggaaatatgaagacctgttatgggcatgggagggctggcgagacaaggcggggagagccatcctccagttttacccgaaatacgtggaactcatcaaccaggctgcccggctcaatggctatgtagatgcaggggactcgtggaggtctatgtacgagacaccatccctggagcaagacctggagcggctcttccaggagctgcagccactctacctcaacctgcatgcctacgtgcgccgggccctgcaccgtcactacggggcccagcacatcaacctggaggggcccattcctgctcacctgctggggaacatgtgggcgcagacctggtccaacatctatgacttggtggtgcccttcccttcagccccctcgatggacaccacagaggctatgctaaagcagggctggacgcccaggaggatgtttaaggaggctgatgatttcttcacctccctggggctgctgcccgtgcctcctgagttctggaacaagtcgatgctggagaagccaaccgacgggcgggaggtggtctgccacgcctcggcctgggacttctacaacggcaaggacttccggatcaagcagtgcaccaccgtgaacttggaggacctggtggtggcccaccacgaaatgggccacatccagtatttcatgcagtacaaagacttacctgtggccttgagggagggtgccaaccccggcttccatgaggccattggggacgtgctagccctctcagtgtctacgcccaagcacctgcacagtctcaacctgctgagcagtgagggtggcagcgacgagcatgacatcaactttctgatgaagatggcccttgacaagatcgcctttatccccttcagctacctcgtcgatcagtggcgctggagggtatttgatggaagcatcaccaaggagaactataaccaggagtggtggagcctcaggctgaagtaccagggcctctgccccccagtgcccaggactcaaggtgactttgacccaggggccaagttccacattccttctagcgtgccttacatcaggaccgccatgaagctgggcttcagtaggccgtggccggaagccatgcagctgatcacgggccagcccaacatgagcgcctcggccatgttgagctacttcaagccgctgctggactggctccgcacggagaacgagctgcatggggagaagctgggctggccgcagtacaactggacgccgaactccgctcgctcagaagggcccctcccagacagcggccgcgtcagcttcctgggcctggacctggatgcgcagcaggcccgcgtgggccagtggctgctgctcttcctgggcatcgccctgctggtagccaccctgggcctcagccagcggctcttcagcatccgccaccgcagcctccaccggcactcccacgggccccagttcggctccgaggtggagctgagacactcctgaggtgacccggctgggtcggccctgcccaagggcctcccaccagagactgggatgggaacactggtgggcagctgaggacacaccccacaccccagcccaccctgctcctcctgccctgtccctgtccccctcccctccc

SEQ ID NO: 254 - DNA, 2551 bp, Homo sapiens
  source 1..2551: mol_type = unassigned DNA
aggactctgctctcctgcggccatgggccagggttgggctactgcaggacttcccagcctcctcttcctgctgctctgctacgggcaccctctgctggtccccagccaggaggcatcccaacaggtgacagtcacccatgggacaagcagccaggcaacaaccagcagccagacaaccacccaccaggcgacggcccaccagacatcagcccagagcccaaacctggtgactgatgaggctgaggccagcaagtttgtggaggaatatgaccggacatcccaggtggtgtggaacgagtatgccgaggccaactggaactacaacaccaacatcaccacagagaccagcaagattctgctgcagaagaacatgcaaatagccaaccacaccctgaagtacggcacccaggccaggaagtttgatgtgaaccagttgcagaacaccactatcaagcggatcataaagaaggttcaggacctagaacgggcagcactgcctgcccaggagctggaggagtacaacaagatcctgttggatatggaaaccacctacagcgtggccactgtgtgccacccgaatggcagctgcctgcagctcgagccagctctgaaattctctgagctccccttacaagcagaggtgagctaagggctggagctcaaggcattcaaacccctaccagatctgacgaatgtgatggccacgtcccggaaatatgaagacctgttatgggcatgggagggctggcgagacaaggcggggagagccatcctccagttttacccgaaatacgtggaactcatcaaccaggctgcccggctcaatggctatgtagatgcaggggactcgtggaggtctatgtacgagacaccatccctggagcaagacctggagcggctcttccaggagctgcagccactctacctcaacctgcatgcctacgtgcgccgggccctgcaccgtcactacggggcccagcacatcaacctggaggggcccattcctgctcacctgctggggaacatgtgggcgcagacctggtccaacatctatgacttggtggtgcccttcccttcagccccctcgatggacaccacagaggctatgctaaagcagggctggacgcccaggaggatgtttaaggaggctgatgatttcttcacctccctggggctgctgcccgtgcctcctgagttctggaacaagtcgatgctggagaagccaaccgacgggcgggaggtggtctgccacgcctcggcctgggacttctacaacggcaaggacttccggatcaagcagtgcaccaccgtgaacttggaggacctggtggtggcccaccacgaaatgggccacatccagtatttcatgcagtacaaagacttacctgtggccttgagggagggtgccaaccccggcttccatgaggccattggggacgtgctagccctctcagtgtctacgcccaagcacctgcacagtctcaacctgctgagcagtgagggtggcagcgacgagcatgacatcaactttctgatgaagatggcccttgacaagatcgcctttatccccttcagctacctcgtcgatcagtggcgctggagggtatttgatggaagcatcaccaaggagaactataaccaggagtggtggagcctcaggctgaagtaccagggcctctgccccccagtgcccaggactcaaggtgactttgacccaggggccaagttccacattccttctagcgtgccttacatcaggtactttgtcagcttcatcatccagttccagttccacgaggcactgtgccaggcagctggccacacgggccccctgcacaagtgtgacatctaccagtccaaggaggccgggcagcgcctggcgaccgccatgaagctgggcttcagtaggccgtggccggaagccatgcagctgatcacgggccagcccaacatgagcgcctcggccatgttgagctacttcaagccgctgctggactggctccgcacggagaacgagctgcatggggagaagctgggctggccgcagtacaactggacgccgaactccgctcgctcagaagggcccctcccagacagcggccgcgtcagcttcctgggcctggacctggatgcgcagcaggcccgcgtgggccagtggctgctgctcttcctgggcatcgccctgctggtagccaccctgggcctcagccagcggctcttcagcatccgccaccgcagcctccaccggcactcccacgggccccagttcggctccgaggtggagctgagacactcctgaggtgacccggctgggtcggccctgcccaagggcctcccaccagagactgggatgggaacactggtgggcagctgaggacacaccccacaccccagcccaccctgctcctcctgccctgtccctgtccccctcccctcccagtcctccagaccaccagccgccccagccccttctcccagcacacggctgcctgacactgagccccacctctccaagtctctctgtgaatacaattaaaggtcctgccctccc

SEQ ID NO: 255 - DNA, 808 bp, Homo sapiens
  source 1..808: mol_type = unassigned DNA
atgggccagggttgggctactgcaggacttcccagcctcctcttcctgctgctctgctacgggcaccctctgctggtccccagccaggaggcatcccaacagacctggtgactgatgaggctgaggccagcaagtttgtggaggaatatgaccggacatcccaggtggtgtggaacgagtatgccgaggccaactggaactacaacaccaacatcaccacagagaccagcaagattctgctgcagaagaacatgcaaatagccaaccacaccctgaagtacggcacccaggccaggaagtttgatgtgaaccagttgcagaacaccactatcaagcggatcataaagaaggttcaggacctagaacgggcagcactgcctgcccaggagctggaggagtacaacaagatcctgttggatatggaaaccacctacagcgtggccactgtgtgccacccgaatggcagctgcctgcagctcgagccagctctgaaattctctgagctccccttacaagcagaggtgagctaagggctggagctcaaggcattcaaacccctaccagatctgacgaatgtgatggccacgtcccggaaatatgaagacctgttatgggcatgggagggctggcgagacaaggcggggagagccatcctccagttttacccgaaatacgtggaactcatcaaccaggctgcccggctcaatggctatgtagatgcaggggactcgtggaggtctatgtacgagacaccatccctggagcaagacctggagcggctcttccaggagctgcagccactctacct

SEQ ID NO: 256 - DNA, 1080 bp, Homo sapiens
  source 1..1080: mol_type = unassigned DNA
atggcatctgccatgcgatgtgcacctcagaactgctgagagggcagcgctccccagctccctggctccccacctgccagcccatggggcctgggggtagtgcaggccccagagagaccaagtgcaaaggagtacagctcattgcctctccttcctcctgcagtacaacaagatcctgttggatatggaaaccacctacagcgtggccactgtgtgccacccgaatggcagctgcctgcagctcgagccagatctgacgaatgtgatggccacgtcccggaaatatgaagacctgttatgggcatgggagggctggcgagacaaggcggggagagccatcctccagttttacccgaaatacgtggaactcatcaaccaggctgcccggctcaatggctatgtagatgcaggggactcgtggaggtctatgtacgagacaccatccctggagcaagacctggagcggctcttccaggagctgcagccactctacctcaacctgcatgcctacgtgcgccgggccctgcaccgtcactacggggcccagcacatcaacctggaggggcccattcctgctcacctgctggggaacatgtgggcgcagacctggtccaacatctatgacttggtggtgcccttcccttcagccccctcgatggacaccacagaggctatgctaaagcagggctggacgcccaggaggatgtttaaggaggctgatgatttcttcacctccctggggctgctgcccgtgcctcctgagttctggaacaagtcgatgctggagaagccaaccgacgggcgggaggtggtctgccacgcctcggcctgggacttctacaacggcaaggacttccggatcaagcagtgcaccaccgtgaacttggaggacctggtggtggcccaccacgaaatgggccacatccagtatttcatgcagtacaaagacttacctgtggccttgagggagggtgccaaccccggcttccatgaggccattggggacgtgctagccctctcagtgtctacgcccaagcacctgcacagtctcaacctgctgagcagtgagggtggcagcga

SEQ ID NO: 257 - DNA, 846 bp, Homo sapiens
  source 1..846: mol_type = unassigned DNA
ttggatatggaaaccacctacagcgtggccactgtgtgccacccgaatggcagctgcctgcagctcgagccagatctgacgaatgtgatggccacgtcccggaaatatgaagacctgttatgggcatgggagggctggcgagacaaggcggggagagccatcctccagttttacccgaaatacgtggaactcatcaaccaggctgcccggctcaatggctatgtagatgcaggggactcgtggaggtctatgtacgagacaccatccctggagcaagacctggagcggctcttccaggagctgcagccactctacctcaacctgcatgcctacgtgcgccgggccctgcaccgtcactacggggcccagcacatcaacctggaggggcccattcctgctcacctgctggggaacatgtgggcgcagacctggtccaacatctatgacttggtggtgcccttcccttcagccccctcgatggacaccacagaggctatgctaaagcagggctggacgcccaggaggatgtttaaggaggctgatgatttcttcacctccctggggctgctgcccgtgcctcctgagttctggaacaagtcgatgctggagaagccaaccgacgggcgggaggtggtctgccacgcctcggcctgggacttctacaacgagcatgacatcaactttctgatgaagatggcccttgacaagatcgcctttatccccttcagctacctcgtcgatcagtggcgctggagggtatttgatggaagcatcaccaaggagaactataaccaggagtggtggagcctcaggctgaagtaccagggcctctgccccccagtgccc

SEQ ID NO: 258 - DNA, 728 bp, Homo sapiens
  source 1..728: mol_type = unassigned DNA
ggtgagaccaaagaacatctggtgatgtcacagtggacgtcagttcaccaactgggagacacaggccccgggaagaaaagcaacatgcccagcgtggcctgggagctggggcagagctggccttagaactcagcccctgacaattgagcatgacatcaactttctgatgaagatggcccttgacaagatcgcctttatccccttcagctacctcgtcgatcagtggcgctggagggtatttgatggaagcatcaccaaggagaactataaccaggagtggtggagcctcaggctgaagtaccagggcctctgccccccagtgcccaggactcaaggtgactttgacccaggggccaagttccacattccttctagcgtgccttacatcaggtactttgtcagcttcatcatccagttccagttccacgaggcactgtgccaggcagctggccacacgggccccctgcacaagtgtgacatctaccagtccaaggaggccgggcagcgcctggcgaccgccatgaagctgggcttcagtaggccgtggccggaagccatgcagctgatcacgggccagcccaacatgagcgcctcggccatgttgagctacttcaagccgctgctggactggctccgcacggagaacgagctgcatggggagaagctgggctggccgcagtacaactggacgccgaactccgctcgctcagaagggcccctcccagaca

SEQ ID NO: 259 - DNA, 888 bp, Homo sapiens
  source 1..888: mol_type = unassigned DNA
ctggttcctgtcagagttgctgagctgcagacaccgacctcaggtggtgcggaggggacatggcagagtggctggtgaagagagcagcctgccagcctttcaatcccagccctgccacttaggagccgtgggcccccggcgaggggggcggtcacttaactctccagcctgtttcctttactagccaatgggaatcgtgacagtacctgggtgcagacaggattgaaagtgaattcacacaatgttcttggtgcagagccaataagaggtggccaccggggtgtaggtgttctggggacctgtaatgtcctcacatgtcagcagttgctagtcacattggtctccactgctcacggacagtgaagaccacctggattccctgataaccagcaaggcccccacctagagccaggcagtaatgacctactgggctggatatgcacaccaaagatgatgtgtgcctcaaagcttgcaaacagtaggtgctcaagaaatgccactatgattagcaggactgggatctggagcgctcttcctgcaggagggcattgagcctaagtaacatttgtctttcctctctctgccgtcccccacactcgcctccagggaacatgtgggcgcagacctggtccaacatctatgacttggtggtgcccttcccttcagccccctcgatggacaccacagaggctatgctaaagcagggctggacgcccaggaggatgtttaaggaggctgatgatttcttcacctccctggggctgctgcccgtgcctcctgagttctggaacaagtcgatgctggagaagccaaccgacgggcgggaggtggtctgccacgcctcggcctgggacttctacaacggcaaggacttccggatcaagcagt

SEQ ID NO: 260 - DNA, 407 bp, Homo sapiens
  source 1..407: mol_type = unassigned DNA
ggtgtggggcagagcaatcggaaggaagggagccacccagaccatcccaggaggcaggtcacagggcccaaaaggtacagcacccccacccctccaccatcacaggcacaccagggccaagccgctaggaccctgggtctgacagctgggctcccttcccttgcagagcatgacatcaactttctgatgaagatggcccttgacaagatcgcctttatccccttcagctacctcgtcgatcagtggcgctggagggtatttgatggaagcatcaccaaggagaactataaccaggagtggtggagcctcaggctgaagtaccagggcctctgccccccagtgcccaggactcaaggtgactttgacccaggggccaagttccacattccttctagcgtgccttacat

SEQ ID NO: 261 - DNA, 546 bp, Homo sapiens
  source 1..546: mol_type = unassigned DNA
ccaggactcaaggtgactttgacccaggggccaagttccacattccttctagcgtgccttacatcaggtactttgtcagcttcatcatccagttccagttccacgaggcactgtgccaggcagctggccacacgggccccctgcacaagtgtgacatctaccagtccaaggaggccgggcagcgcctggcgaccgccatgaagctgggcttcagtaggccgtggccggaagccatgcagctgatcacgggccagcccaacatgagcgcctcggccatgttgagctacttcaagccgctgctggactggctccgcacggagaacgagctgcatggggagaagctgggctggccgcagtacaactggacgccgaactccggtaccgccacccaccccacctccagccttgggtcttaaccccctccccaggctgggcagccatgcggctgacctcggagcctggccctgccccgcacccttgccctgccctgccctgccctgcccatgctgtctccttgcttcccgctcagctcgctcagaagggccc

SEQ ID NO: 262 - DNA, 565 bp, Homo sapiens
  source 1..565: mol_type = unassigned DNA
ctcctgagttgtggaggcagctctgtgggtgggaggcatctacacaggcacggctaggaagaggctcagacaatgctaagagctggggtgggggagctcaccctgatagctgtgggcagagttggggggccttggctctgctgtgcgcatgtgacttagcacacatcacatgtgatgtgcagaagggcctggggcccagtggcacaaggccctcaaccaactccgccccgggccacggcctcgctctgctccaggtactttgtcagcttcatcatccagttccagttccacgaggcactgtgccaggcagctggccacacgggccccctgcacaagtgtgacatctaccagtccaaggaggccgggcagcgcctggcgaccgccatgaagctgggcttcagtaggccgtggccggaagccatgcagctgatcacgggccagcccaacatgagcgcctcggccatgttgagctacttcaagccgctgctggactggctccgcacggagaacgagctgcatggggagaagctgggctggccgcagtacaactggacgccgaactccg

SEQ ID NO: 263 - DNA, 5120 bp, Homo sapiens
  source 1..5120: mol_type = unassigned DNA
agaaggggcagagccgagcaccgcgcaccgcgtcatgggggccgcctcgggccgccgggggccggggctgctgctgccgctgccgctgctgttgctgctgccgccgcagcccgccctggcgttggaccccgggctgcagcccggcaacttttctgctgacgaggccggggcgcagctcttcgcgcagagctacaactccagcgccgaacaggtgctgttccagagcgtggccgccagctgggcgcacgacaccaacatcaccgcggagaatgcaaggcgccaggaggaagcagccctgctcagccaggagtttgcggaggcctggggccagaaggccaaggagctgtatgaaccgatctggcagaacttcacggacccgcagctgcgcaggatcatcggagctgtgcgcaccctgggctctgccaacctgcccctggctaagcggcagcagtacaacgccctgctaagcaacatgagcaggatctactccaccgccaaggtctgcctccccaacaagactgccacctgctggtccctggacccagatctcaccaacatcctggcttcctcgcgaagctacgccatgctcctgtttgcctgggagggctggcacaacgctgcgggcatcccgctgaaaccgctgtacgaggatttcactgccctcagcaatgaagcctacaagcaggacggcttcacagacacgggggcctactggcgctcctggtacaactcccccaccttcgaggacgatctggaacacctctaccaacagctagagcccctctacctgaacctccatgccttcgtccgccgcgcactgcatcgccgatacggagacagatacatcaacctcaggggacccatccctgctcatctgctgggagacatgtgggcccagagctgggaaaacatctacgacatggtggtgcctttcccagacaagcccaacctcgatgtcaccagtactatgctgcagcagggctggaacgccacgcacatgttccgggtggcagaggagttcttcacctccctggagctctcccccatgcctcccgagttctgggaagggtcgatgctggagaagccggccgacgggcgggaagtggtgtgccacgcctcggcttgggacttctacaacaggaaagacttcaggatcaagcagtgcacacgggtcacgatggaccagctctccacagtgcaccatgagatgggccatatacagtactacctgcagtacaaggatctgcccgtctccctgcgtcggggggccaaccccggcttccatgaggccattggggacgtgctggcgctctcggtctccactcctgaacatctgcacaaaatcggcctgctggaccgtgtcaccaatgacacggaaagtgacatcaattacttgctaaaaatggcactggaaaaaattgccttcctgccctttggctacttggtggaccagtggcgctggggggtctttagtgggcgtacccccccttcccgctacaacttcgactggtggtatcttcgaaccaagtatcaggggatctgtcctcctgttacccgaaacgaaacccactttgatgctggagctaagtttcatgttccaaatgtgacaccatacatcaggtactttgtgagttttgtcctgcagttccagttccatgaagccctgtgcaaggaggcaggctatgagggcccactgcaccagtgtgacatctaccggtccaccaaggcaggggccaagctccggaaggtgctgcaggctggctcctccaggccctggcaggaggtgctgaaggacatggtcggcttagatgccctggatgcccagccgctgctcaagtacttccagccagtcacccagtggctgcaggagcagaaccagcagaacggcgaggtcctgggctggcccgagtaccagtggcacccgccgttgcctgacaactacccggagggcatagacctggtgactgatgaggctgaggccagcaagtttgtggaggaatatgaccggacatcccaggtggtgtggaacgagtatgccgaggccaactggaactacaacaccaacatcaccacagagaccagcaagattctgctgcagaagaacatgcaaatagccaaccacaccctgaagtacggcacccaggccaggaagtttgatgtgaaccagttgcagaacaccactatcaagcggatcataaagaaggttcaggacctagaacgggcagcactgcctgcccaggagctggaggagtacaacaagatcctgttggatatggaaaccacctacagcgtggccactgtgtgccacccgaatggcagctgcctgcagctcgagccagatctgacgaatgtgatggccacgtcccggaaatatgaagacctgttatgggcatgggagggctggcgagacaaggcggggagagccatcctccagttttacccgaaatacgtggaactcatcaaccaggctgcccggctcaatggctatgtagatgcaggggactcgtggaggtctatgtacgagacaccatccctggagcaagacctggagcggctcttccaggagctgcagccactctacctcaacctgcatgcctacgtgcgccgggccctgcaccgtcactacggggcccagcacatcaacctggaggggcccattcctgctcacctgctggggaacatgtgggcgcagacctggtccaacatctatgacttggtggtgcccttcccttcagccccctcgatggacaccacagaggctatgctaaagcagggctggacgcccaggaggatgtttaaggaggctgatgatttcttcacctccctggggctgctgcccgtgcctcctgagttctggaacaagtcgatgctggagaagccaaccgacgggcgggaggtggtctgccacgcctcggcctgggacttctacaacggcaaggacttccggatcaagcagtgcaccaccgtgaacttggaggacctggtggtggcccaccacgaaatgggccacatccagtatttcatgcagtacaaagacttacctgtggccttgagggagggtgccaaccccggcttccatgaggccattggggacgtgctagccctctcagtgtctacgcccaagcacctgcacagtctcaacctgctgagcagtgagggtggcagcgacgagcatgacatcaactttctgatgaagatggcccttgacaagatcgcctttatccccttcagctacctcgtcgatcagtggcgctggagggtatttgatggaagcatcaccaaggagaactataaccaggagtggtggagcctcaggctgaagtaccagggcctctgccccccagtgcccaggactcaaggtgactttgacccaggggccaagttccacattccttctagcgtgccttacatcaggtactttgtcagcttcatcatccagttccagttccacgaggcactgtgccaggcagctggccacacgggccccctgcacaagtgtgacatctaccagtccaaggaggccgggcagcgcctggcgaccgccatgaagctgggcttcagtaggccgtggccggaagccatgcagctgatcacgggccagcccaacatgagcgcctcggccatgttgagctacttcaagccgctgctggactggctccgcacggagaacgagctgcatggggagaagctgggctggccgcagtacaactggacgccgaactccggtaccgccacccaccccacctccagccttgggtcttaaccccctccccaggctgggcagccatgcggctgacctcggagcctggccctgccccgcacccttgccctgccctgccctgccctgcccatgctgtctccttgcttcccgctcagctcgctcagaagggcccctcccagacagcggccgcgtcagcttcctgggcctggacctggatgcgcagcaggcccgcgtgggccagtggctgctgctcttcctgggcatcgccctgctggtagccaccctgggcctcagccagcggctcttcagcatccgccaccgcagcctccaccggcactcccacgggccccagttcggctccgaggtggagctgagacactcctgaggtgacccggctgggtcggccctgcccaagggcctcccaccagagactgggatgggaacactggtgggcagctgaggacacaccccacaccccagcccaccctgctcctcctgccctgtccctgtccccctcccctcccagtcctccagaccaccagccgccccagccccttctcccagcacacggctgcctgacactgagccccacctctccaagtctctctgtgaatacaattaaaggtcctgccctccccatctgagtctgtgtccctcacagggaagccagggacagggacaggctgctttcctgcctcctggcagtcaagtgggtcccgttactaggtttgttcctccatcctccttcaggagccggggaggatccccagagctctgccccagcacctcctggcgctggcgcctgtcttccctccagcccaggcagcccgccactgtcctgccaccgcaggcagcccctgtctggcccaagcactgacccacgcggactctgggaagcagacatcctgggctgctggcctcacatttccactggcagtggagcctttccctgctccacaaatggccaggtccccccaggggaaggcttccggctgttatcggctgcctcagggggcgagtaccttggagggcctgcttcaaggagggtgccccctggagggcacacaccagcctagtgcttaccttggctcctgcctgtaccagctccatgactctgctcgggtgaacagccttggctctcagacagccattctaacactgccagtgcagaggggcctcagacgctggagtgtagcagtggctgcacctgcacagggattagctgccagcagccaccctgctggcgtcccagcacacacctcctcactccctgcattggagggagtgtcattttaagggacatttttatgacttttatgtgtatgtttatgtagaaatttggaaaatacagaaaactgtaaagaaaataaaagccctttatatcaacgtcaagagataa

SEQ ID NO: 264 - DNA, 834 bp, Homo sapiens
  source 1..834: mol_type = unassigned DNA
agggccgggcggggcgcgagcgagcgcgcgggctgggccggagccggcctggtcgccagcctaacccggcacagtgagcggagcgcctgggcggcggcggcggcggcgtgatggctccggccgcggaccgagagggctactggggccccacgacctccacgctggactggtgcgaggagaactactccgtgacctgggaatacagtgagtaacctgatcatgattatacctccaatgttcggtgcagttcagagtgttagagacggtctggaaaagcggtacattgcttcttatttagcactcacagtggtaggaatgggatcctggtgcttccacatgactctgaaatatgaaatgcagctattggatgaactcccaatgatatacagctgttgcatatttgtgtactgcatgtttgaatgtttcaagatcaagaactcagtaaactaccatctgctttttaccttagttctattcagtttaatagtaaccacagtttaccttaaggtaaaagagccgatattccatcaggtcatgtatggaatgttggtctttacattagtacttcgatctatttatattgttacatgggtttatccatggcttagaggactgggttatacatcattgggtatatttttattgggatttttattttggaatatagataacatattttgtgagtcactgaggaactttcgaaagaaggtaccacctatcataggtattaccacacaatttcatgcatggtggcatattttaactggccttggttcctatcttcacatccttttcagtttgtatacaagaacactttacctgagatataggcca

SEQ ID NO: 265 - DNA, 7378 bp, Homo sapiens
  source 1..7378: mol_type = unassigned DNA
gggcggggcgcgagcgagcgcgcgggctgggccggagccggcctggtcgccagcctaacccggcacagtgagcggagcgcctgggcggcggcggcggcggcgtgatggctccggccgcggaccgagagggctactggggccccacgacctccacgctggactggtgcgaggagaactactccgtgacctggtacatcgccgagttctggaatacagtgagtaacctgatcatgattatacctccaatgttcggtgcagttcagagtgttagagacggtctggaaaagcggtacattgcttcttatttagcactcacagtggtaggaatgggatcctggtgcttccacatgactctgaaatatgaaatgcagctattggatgaactcccaatgatatacagctgttgcatatttgtgtactgcatgtttgaatgtttcaagatcaagaactcagtaaactaccatctgctttttaccttagttctattcagtttaatagtaaccacagtttaccttaaggtaaaagagccgatattccatcaggtcatgtatggaatgttggtctttacattagtacttcgatctatttatattgttacatgggtttatccatggcttagaggactgggttatacatcattgggtatatttttattgggatttttattttggaatatagataacatattttgtgagtcactgaggaactttcgaaagaaggtaccacctatcataggtattaccacacaatttcatgcatggtggcatattttaactggccttggttcctatcttcacatccttttcagtttgtatacaagaacactttacctgagatataggccaaaagtgaagtttctctttggaatctggccagtgatcctgtttgagcctctcaggaagcattgatgaatcattccaccaagaaaacaaacaagcacctaccatagacctggcagaataaataaggaaatccttaaagatctacaagttcaaatatgtcatgaccatcacagcagaggagtgactttctgactaatgctgccacccacacagagaataaggagtagggcctgctgggtgtttagctcatggctttatcttatttgtccccctcctcctttcacgctccagtttataaagaaacagagatgatgtgtgtgtatgcctcaaatgcagaaacagttgggcttttcttaacaggttaacagtttgtgctggttataagaaattaaccttcttttctttttgccaagggttgcatgtgaattatacctttcttaatatttgattaaataatgcagtcagctaagagccaacaaaaccccatatccagatagttagctgtgagccagcactcagctgtgtcagatttgattaatattgtattaatctcatggatggttctcaaaggtaaaaaaagagagagaaagagagagagctagctgtgggattctgtgtagttcttcactatctgttccagggctagtcggaggatcataagcaagctcagacctgcccccagttcagtacttgaccacatcccaggatttatggtgtctgtctatggccacagccaaccagaatgagtgggtcatcttataacctttctgaagctccatgaggacatgtatagaatgctgcaccttcagccagctctgctctgatctttgcagatctttaagttgtcactgtttctacggctagacaaatatgactggtggtctagactacccatagttcatcctcctcacataacttatttgaagttgtcagggaatgtcattacactctgatttttaaaattatgcagtattttccagttctcagagaggtcatggttgtgcccagggaagtgtgttgcattaactaaagctaaaattatcagaatcctatttacataaagcatattaaaatatctgctccttaattttctgaaggaaatagatgtaagtttctgctacttgaaacctacagaaccgacaaaaattagggtgctaaaaaaatgacagtgaaatctcatcgtaaggcagctagttctaatttgcatttgaatgtataacaaattgcatcacttttcacaaacttaacacctgcctggagtaaaaatctgatttgacccctctgctcatgtttcatcatatttgtagctctgcatcatttagcatttttatgactttttttgctttatataaattattgtaaaatccagattgtttttaccacatgatgacgtgactcaggattaaatcctgagctacagtttcaaaaggaaaatcatttttttcttatgcaaagatggtaaaacactgttgtcattttttccagtattcaataagtagcctttgtacaaatttaaaaccaaaaactattctgttgtttttcttcacctactagccttagtttttaaccaagtatccaaggatgtcaacttgacatccttcccttagcatgccaacaagccattagactgattcttccacctatttttatgaacctccaggaagaaaaacacttgccaaaacattaagagaactttgattctgccttaagagggtataaaactaaaccatttgaaggcacagcccataagactatacttgattttgccccaagattctgacttctggctacatttcacctgcagttacctgggctatcggccgtgatacattttttaattcatttgttttccaccattatatttttatacttttcagttagatatacttctgcataaagagtatatatacagtgtaggataaaggcatatcgtacatggcaatgctgttaaacatggtaagactgaggttctgcaggattaaagtcagattaagggtacagaaagcacaccttgatactgaggccatttagagcaatttgtttaatgagtggttcagccatcaccaccagtggccacctgttcaataaaattgcctagcaccacagtggagagtcatctacaccccaaggtgagctgtaagactggccaattctttgaagacctttttttctgttgggagaatggaaagcagaaagggaagccaggctctttaatgttccaagtcagctgtgcctcacacaaggctctctttttagctactaagtaacatactcaagactttgtatctgtgcagcattttatggaaatcactggtgacctataggatattactaaattatttcaatagctttatttttttcctacttggattctaggtggacattacagagttgaattcctcactaccccctcccgctgtcatttgttttattggaaaacttcatgttaactagagtgtacaaaaagtctgtttcctgctgagccaatagtgatttgtttgcatatcacctaatgtgaaaagtgctcatctgtgaactctacagcaaattatattttagaaaatactttgtgaggccgggcatggtggcagagcgagactccgtctcaaaaaaaaaaaaaaaaaaaaaaaagaaaagaaaagaaaatataaggatgtaaaagaagcaatttgcttgcacatctgaatatccttcttgtgcctccattttcactcttgaaaactgaaagcaatttgacttttatttttgtttttctaaagaacagctaggtgaaaggaggttaagctgattgtcactctgcctgcccactacctactccccaccatggtgtttcatgaaacatccccaccacctgaagtgatctttttaatccttgtgatagtaaatgcattgataattaacaggaaaaacatgtttttaaataatctacaaatgagaacccaaatagtagtgttttgtttgacagaagtaaatcaaatattatggtttaaatataatgcaaaatttcaggacagttaatttggacttcccttaccctaagagggtttttcttataataaggagaagaggtgtggttcaaagaaaattaagagacaaaaccttcaggtacataatgcatgaaaatctttaaatgcctgcaaaaattaagttctgttataataccagccaattctgaattagccaatgccctaaaagcatctaacaatttaaggttatcttatgagtcctatgaaaacaattatttgttgctaaatttgagttttagctaccaacgccatgtttacgtgacaagaaattgttttggccctgtggtttatgacgtgctgctggataagcatttatgtaaaactgagtatttcaaagagaaccatttacaattggaatttccacctgtgtggctgtttgcagacctacctctgtcttccattttgcatcctgtcagtgctataattagtttgatcactttgtcttgtttttcagtgtctacaattatagcttattcactatgttctaactatttaaaaataatgggccgggcgcggtggctcatgcctgtaatcccagcactttgggaggccgaggtgagcagatcacaaggtcaggagatcgagaccatcctggctaacacagtgaaaccccgtctctactaaaaatacaaaaaaattagtcgggcatggtggcgggcgcctgtagtcccagctactcgggaggctgaggcaggagaatggcgtgaacctgggaggcagagcttgcagtgagccaagattgtgccactgcactccagcctgggcaacagagcgagactctgtctcaaaaaaaaaaaaaaaaaaaaaaaaaaaagactaaaatttgatttaaagtagttaaacccctttatggaaggagctgcaaaatgaaaaaaaaaaaaaaaaggaatcatgtcatcttgacccagctgactggaaattttcaatactgtcttttaactgttgtactccagccagcctgggcaacagagtgagaccctgtctcaaaaaaaaaaaaaaaaaaaaaaaaaaaaagaattaggaaatacttgttaaaatatctaactacgtaattgctacatgggggagctgctggtgttgttgaggtccttgggagcattccactggacttcaccatttctccaaaattatcagcccagtcagcttcatatacccagatatggacacttctacacgtgaaattcaaactgaagataaaactctgactttggagtataaacttttgccttgagtatgaaaccttgacattgctgaaagaaaagtggaaactgtaagggacaacaagtttcaccaaggcacagtcttctctgataggccagcagagcagctaaggagaagacagatcattcaagaacttaagtcgtttgttagctacagcatttccattgctgtgatacacattcagccattttggaggaaagctaagcaggttctgaccacccattttcatgtactttaaataacaaatattatttctcaaggtcttcattttatcattaaattcagctaattactacctgatttcaaaggcagctagtgtagaagactggtcacaagaatttttttttaaatagaaaaccctaaaatgcaaatcaagaaattcagttacaggctgcaagtgacctaaaattcccctactctagctcagcagccatcagtcagtatagcatcagccacaggtcactgctctgcatacagttccttttcaacccttacaagacctgcttcattgctttaaaaatgtagtgttgatacttgaactgaatttagtcattggtaacttaaatattcacaaaattgtcataaagcttctgaaacatctggcaatgccagatctgtaatcatcacttttaaattgaatttgcagaattaactctaaagttgcagcaaccatatttattagagaaatctttaagcatatacatatggttccctataagcattcattcagagatcatctgtgcctaaaagaaaatgataaaaatgtgtcataatatcaaaggggtctagatcaggggttggtaaactacaacccatgggccaaattcaggctgcgttgtatggcctgcaaggtaagaatggttattttattttattttattctttatatatatatatatatatttatttatttttttgagacagagtctctctctgtcacccacgctggagtgcagtggcaggatctcaactcattgcaacctccgcctcccaaggttcaagcgattctcctgcctcagcctcccgagtagctgggactacaggcacatgccaccatgccaccatgcctggctgatttttgtatttttagtagagctgggttggccaggctggtcttgaactcctgacctcaagtgattcacctgccttggcctcccaaagtcctggaattacaggcgtgagctaccgtgcccagctggtttttacattttaaaaacgtttagagaaagaagaatatgcaacagaaactgtatgtagcctgcaaagcctaaaatgtttactctctggcttgggagtttgtctcccctgctctagactgtcagcaagtggtacagtggtacagtacagtggtactgcccaactgcacttctctgcaaggtgattctagtgtgcacttgtcagaatgaaaatatgttattcatttaagacatctcatgtctttgaatgtaatcacatgatttgtatttaatatttacatgacctaattattttttcacgtcagtttttctagattggcaatagcctgttgcaaagtgcctaaacctttgagaaaaattactatgagcaaggtccatgatttagttttcaatataaagggaattccattctatactgtaaaatccaaaaatgctagttgccctcagcttttgagttgacttccagaaagttgagatcttttgaccattttttctcatgtcatataaaatgtgccacatggtagttgtcaagctgtggtagtcatgtacactttttttcttttttttaactttctaaaaggaaaagttcaaagtcctttccacagttagtcttcgcttcttttggatttttctttttagagctaaattattcataccaatgaataagtgagtctgttctaagatataggggccattatctatttttgcttaatggactcatgtggcattgttcactatcatgcctttccatacttgtaatatttctgagtcacttattaatgtgaccaacagataaactgttcaagctaatacagcatttcctaacttcatagttgtcgcagatgtttgttctagtagcgattatttaataaacatacattgtactgaatcttactagcaactaactattttcaggtaatctcagtctgcttattcactttttccatttgatttgctaatgccacaatcatttttctagaaaatagtaggataatgtattttttcctgtctgctataatggagactatatttctgcattcattacctctcataggtgaaaatattaaattaaataatattgttttgaataaga

SEQ ID NO: 266 - DNA, 551 bp, Homo sapiens
  source 1..551: mol_type = unassigned DNA
gccagcctaacccggcacagtgagcggagcgcctgggcggcggcggcggcggcgtgatggctccggccgcggaccgagagggctactggggccccacgacctccacgctggactggtgcgaggagaactactccgtgacctggtacatcgccgagttctggaatacagtgagtaacctgatcatgattatacctccaatgttcggtgcagttcagagtgttagagacggtctggaaaagcggtacattgcttcttatttagcactcacagtggtaggaatgggatcctggtgcttccacatgactctgaaatatgaaatgcagctattggatgaactcccaatgatatacagctgttgcatatttgtgtactgcatgtttgaatgtttcaagatcaagaactcagtaaactaccatctgctttttaccttagttctattcagtttaatagtaaccacagtttaccttaaggtaaaagagccgatattccatcaggagtctcactctgtcaccccggctgaagtgcaatggcacaatctcggctcattggaa

SEQ ID NO: 267 - DNA, 846 bp, Homo sapiens
  source 1..846: mol_type = unassigned DNA
agcctaacccggcacagtgagcggagcgcctgggcggcggcggcggcggcgtgatggctccggccgcggaccgagagggctactggggccccacgacctccacgctggactggtgcgaggagaactactccgtgacctggtacatcgccgagttctgttccttcctaccatcctccctgaagagcaacctcaaggaatacagtgagtaacctgatcatgattatacctccaatgttcggtgcagttcagagtgttagagacggtctggaaaagcggtacattgcttcttatttagcactcacagaagtacttcagatttgagaaaagagcacataactatggctaaaagatgggatttgtaatctctggagttttttacttcaagtctgaggatccaaactgactaagtgaagtaaagaaataagcagctattggatgaactcccaatgatatacagctgttgcatatttgtgtactgcatgtttgaatgtttcaagatcaagaactcagtaaactaccatctgctttttaccttagttctattcagtttaatagtaaccacagtttaccttaaggtaaaagagccgatattccatcaggagtctcactctgtcaccccggctgaagtgcaatggcacaatctcggctcattggaacctccacctcccaggtcatgtatggaatgttggtctttacattagtacttcgatctatttatattgttacatgggtttatccatggcttagaggactgggttatacatcattgggtatatttttattgggatttttattttggaatatagataacatattttgtgagtcactgaggaactttcgaaagaa

SEQ ID NO: 268 - DNA, 2058 bp, Homo sapiens
  source 1..2058: mol_type = unassigned DNA
gcacagtgagcggagcgcctgggcggcggcggcggcggcgtgatggctccggccgcggaccgagagggctactggggccccacgacctccacgctggactggtgcgaggagaactactccgtgacctggtacatcgccgagttctggaatacagtgagtaacctgatcatgattatacctccaatgttcggtgcagttcagagtgttagagacggtctggaaaagcggtacattgcttcttatttagcactcacagatggagtctcactctgtcgccgaggctgaagtgcagtggcacaatctcggctcactgcaacctccatttcccaggtttacgcgatccttctgcctcagcctcccaagtagctgggactacagtggtaggaatgggatcctggtgcttccacatgactctgaaatatgaaatgcagctattggatgaactcccaatgatatacagctgttgcatatttgtgtactgcatgtttgaatgtttcaagatcaagaactcagtaaactaccatctgctttttaccttagttctattcagtttaatagtaaccacagtttaccttaaggtaaaagagccgatattccatcaggagtctcactctgtcaccccggctgaagtgcaatggcacaatctcggctcattggaacctccacctcccaggtcatgtatggaatgttggtctttacattagtacttcgatctatttatattgttacatgggtttatccatggcttagaggactgggttatacatcattgggtatatttttattgggatttttattttggaatatagataacatattttgtgagtcactgaggaactttcgaaagaaggtaccacctatcataggtattaccacacaatttcatgcatggtggcatattttaactggccttggttcctatcttcacatccttttcagtttgtatacaagaacactttacctgagatataggccaaaagtgaagtttctctttggaatctggccagtgatcctgtttgagcctctcaggaagcattgatgaatcattccaccaagaaaacaaacaagcacctaccatagacctggcagaataaataaggaaatccttaaagatctacaagttcaaatatgtcatgaccatcacagcagaggagtgactttctgactaatgctgccacccacacagagaataaggagtagggcctgctgggtgtttagctcatggctttatcttatttgtccccctcctcctttcacgctccagtttataaagaaacagagatgatgtgtgtgtatgcctcaaatgcagaaacagttgggcttttcttaacaggttaacagtttgtgctggttataagaaattaaccttcttttctttttgccaagggttgcatgtgaattatacctttcttaatatttgattaaataatgcagtcagctaagagccaacaaaaccccatatccagatagttagctgtgagccagcactcagctgtgtcagatttgattaatattgtattaatctcatggatggttctcaaaggtaaaaaaagagagagaaagagagagagctagctgtgggattctgtgtagttcttcactatctgttccagggctagtcggaggatcataagcaagctcagacctgcccccagttcagtacttgaccacatcccaggatttatggtgtctgtctatggccacagccaaccagaatgagtgggtcatcttataacctttctgaagctccatgaggacatgtatagaatgctgcaccttcagccagctctgctctgatctttgcagatctttaagttgtcactgtttctacggctagacaaatatgactggtggtctagactacccatagttcatcctcctcacataacttatttgaagttgtcagggaatgtcattacactctgatttttaaaattatgcagtattttccagttctcagagaggtcatggttgtgcccagggaagtgtgttgcattaactaaagctaaaattatcagaatcctatttacataaagcatattaaaatatctgctcctt

SEQ ID NO: 269 - DNA, 1292 bp, Homo sapiens
  source 1..1292: mol_type = unassigned DNA
cacagtgagcggagcgcctgggcggcggcggcggcggcgtgatggctccggccgcggaccgagagggctactggggccccacgacctccacgctggactggtgcgaggagaactactccgtgacctggtacatcgccgagttctggaatacagtgagtaacctgatcatgattatacctccaatgttcggtgcagttcagagtgttagagacggtctggaaaagcggtacattgcttcttatttagcactcacagctattggatgaactcccaatgatatacagctgttgcatatttgtgtactgcatgtttgaatgtttcaagatcaagaactcagtaaactaccatctgctttttaccttagttctattcagtttaatagtaaccacagtttaccttaaggtaaaagagccgatattccatcaggtcatgtatggaatgttggtctttacattagtacttcgatctatttatattgttacatgggtttatccatggcttagaggactgggttatacatcattgggtatatttttattgggatttttattttggaatatagataacatattttgtgagtcactgaggaactttcgaaagaaggtaccacctatcataggtattaccacacaatttcatgcatggtggcatattttaactggccttggttcctatcttcacatccttttcagtttgtatacaagaacactttacctgagatataggccaaaagtgaagtttctctttggaatctggccagtgatcctgtttgagcctctcaggaagcattgatgaatcattccaccaagaaaacaaacaagcacctaccatagacctggcagaataaataaggaaatccttaaagatctacaagttcaaatatgtcatgaccatcacagcagaggagtgactttctgactaatgctgccacccacacagagaataaggagtagggcctgctgggtgtttagctcatggctttatcttatttgtccccctcctcctttcacgctccagtttataaagaaacagagatgatgtgtgtgtatgcctcaaatgcagaaacagttgggcttttcttaacaggttaacagtttgtgctggttataagaaattaaccttcttttctttttgccaagggttgcatgtgaattatacctttcttaatatttgattaaataatgcagtcagctaagagccaacaaaaccccatatccagatagttagctgtgagccagcactcagctgtgtcagatttgattaatattgtattaatctcatggatggttctc

SEQ ID NO: 270 - DNA, 931 bp, Homo sapiens
  source 1..931: mol_type = unassigned DNA
acagtgagcggagcgcctgggcggcggcggcggcggcgtgatggctccggccgcggaccgagagggctactggggccccacgacctccacgctggactggtgcgaggagaactactccgtgacctggtacatcgccgagttctgttccttcctaccatcctccctgaagagcaacctcaagttagtgagcacacatcaggcttcttttttggtcttgggactctgggctggcagaggtgacatccctgtcatatgaaggaagatgctcctttctctgaaggttattgacagggaatacagtgagtaacctgatcatgattatacctccaatgttcggtgcagttcagagtgttagagacggtctggaaaagcggtacattgcttcttatttagcactcacagtggtaggaatgggatcctggtgcttccacatgactctgaaatatgaaatgcagctattggatgaactcccaatgatatacagctgttgcatatttgtgtactgcatgtttgaatgtttcaagatcaagaactcagtaaactaccatctgctttttaccttagttctattcagtttaatagtaaccacagtttaccttaaggtaaaagagccgatattccatcaggtcatgtatggaatgttggtctttacattagtacttcgatctatttatattgttacatgggtttatccatggcttagaggactgggttatacatcattgggtatatttttattgggatttttattttggaatatagataacatattttgtgagtcactgaggtaagatatattttcattccttcagaaatatttttggaagcattttattaagtagagaattttataaacatatagaaatagtagtgccctgaaatgaatttttactattgttgacatttaaaagatatatacagtataataaag

SEQ ID NO: 271 - DNA, 1269 bp, Homo sapiens
  source 1..1269: mol_type = unassigned DNA
agtgagcggagcgcctgggcggcggcggcggcggcgtgatggctccggccgcggaccgagagggctactggggccccacgacctccacgctggactggtgcgaggagaactactccgtgacctgggaatacagtgagtaacctgatcatgattatacctccaatgttcggtgcagttcagagtgttagagacggtctggaaaagcggtacattgcttcttatttagcactcacagaagtacttcagatttgagaaaagagcacataactatggctaaaagatgggatttgtaatctctggagttttttacttcaagtctgaggatccaaactgactaagtgaagtaaagaaataagcagctattggatgaactcccaatgatatacagctgttgcatatttgtgtactgcatgtttgaatgtttcaagatcaagaactcagtaaactaccatctgctttttaccttagttctattcagtttaatagtaaccacagtttaccttaaggtaaaagagccgatattccatcaggtcatgtatggaatgttggtctttacattagtacttcgatctatttatattgttacatgggtttatccatggcttagaggactgggttatacatcattgggtatatttttattgggatttttattttggaatatagataacatattttgtgagtcactgaggaactttcgaaagaaggtaccacctatcataggtattaccacacaatttcatgcatggtggcatattttaactggccttggttcctatcttcacatccttttcagtttgtatacaagaacactttacctgagatataggccaaaagtgaagtttctctttggaatctggccagtgatcctgtttgagcctctcaggaagcattgatgaatcattccaccaagaaaacaaacaagcacctaccatagacctggcagaataaataaggaaatccttaaagatctacaagttcaaatatgtcatgaccatcacagcagaggagtgactttctgactaatgctgccacccacacagagaataaggagtagggcctgctgggtgtttagctcatggctttatcttatttgtccccctcctcctttcacgctccagtttataaagaaacagagatgatgtgtgtgtatgcctcaaatgcagaaacagttgggcttttcttaacaggttaacagtttgtgctggttataagaaattaaccttcttttctttttgccaagggttgcatgtgaattatacctttctt

SEQ ID NO: 272 - DNA, 929 bp, Homo sapiens
  source 1..929: mol_type = unassigned DNA
gagcggagcgcctgggcggcggcggcggcggcgtgatggctccggccgcggaccgagagggctactggggccccacgacctccacgctggactggtgcgaggagaactactccgtgacctggtacatcgccgagttcttggtaggaatgggatcctggtgcttccacatgactctgaaatatgaaatgcagctattggatgaactcccaatgatatacagctgttgcatatttgtgtactgcatgtttgaatgtttcaagatcaagaactcagtaaactaccatctgctttttaccttagttctattcagtttaatagtaaccacagtttaccttaaggtaaaagagccgatattccatcaggtcatgtatggaatgttggtctttacattagtacttcgatctatttatattgttacatgggtttatccatggcttagaggactgggttatacatcattgggtatatttttattgggatttttattttggaatatagataacatattttgtgagtcactgaggaactttcgaaagaaggtaccacctatcataggtattaccacacaatttcatgcatggtggcatattttaactggccttggttcctatcttcacatccttttcagtttgtatacaagaacactttacctgagatataggccaaaagtgaagtttctctttggaatctggccagtgatcctgtttgagcctctcaggaagcattgatgaatcattccaccaagaaaacaaacaagcacctaccatagacctggcagaataaataaggaaatccttaaagatctacaagttcaaatatgtcatgaccatcacagcagaggagtgactttctgactaatgctgccacccacacagagaataaggagtagggcctgctgggtgtttagctcatggctttatcttatttgt

SEQ ID NO: 273 - DNA, 2093 bp, Homo sapiens
  source 1..2093: mol_type = unassigned DNA
agcggagcgcctgggcggcggcggcggcggcgtgatggctccggccgcggaccgagagggctactggggccccacgacctccacgctggactggtgcgaggagaactactccgtgacctggtacatcgccgagttctgttccttcctaccatcctccctgaagagcaacctcaaggaatacagtgagtaacctgatcatgattatacctccaatgttcggtgcagttcagagtgttagagacggtctggaaaagcggtacattgcttcttatttagcactcacagtggtaggaatgggatcctggtgcttccacatgactctgaaatatgaaatgcagctattggatgaactcccaatgatatacagctgttgcatatttgtgtactgcatgtttgaatgtttcaagatcaagaactcagtaaactaccatctgctttttaccttagttctattcagtttaatagtaaccacagtttaccttaaggtaaaagagccgatattccatcaggtcatgtatggaatgttggtctttacattagtacttcgatctatttatattgttacatgggtttatccatggcttagaggactgggttatacatcattgggtatatttttattgggatttttattttggaatatagataacatattttgtgagtcactgaggaactttcgaaagaaggtaccacctatcataggtattaccacacaatttcatgcatggtggcatattttaactggccttggttcctatcttcacatccttttcagtttgtatacaagaacactttacctgagatataggccaaaagtgaagtttctctttggaatctggccagtgatcctgtttgagcctctcaggaagcattgatgaatcattccaccaagaaaacaaacaagcacctaccatagacctggcagaataaataaggaaatccttaaagatctacaagttcaaatatgtcatgaccatcacagcagaggagtgactttctgactaatgctgccacccacacagagaataaggagtagggcctgctgggtgtttagctcatggctttatcttatttgtccccctcctcctttcacgctccagtttataaagaaacagagatgatgtgtgtgtatgcctcaaatgcagaaacagttgggcttttcttaacaggttaacagtttgtgctggttataagaaattaaccttcttttctttttgccaagggttgcatgtgaattatacctttcttaatatttgattaaataatgcagtcagctaagagccaacaaaaccccatatccagatagttagctgtgagccagcactcagctgtgtcagatttgattaatattgtattaatctcatggatggttctcaaaggtaaaaaaagagagagaaagagagagagctagctgtgggattctgtgtagttcttcactatctgttccagggctagtcggaggatcataagcaagctcagacctgcccccagttcagtacttgaccacatcccaggatttatggtgtctgtctatggccacagccaaccagaatgagtgggtcatcttataacctttctgaagctccatgaggacatgtatagaatgctgcaccttcagccagctctgctctgatctttgcagatctttaagttgtcactgtttctacggctagacaaatatgactggtggtctagactacccatagttcatcctcctcacataacttatttgaagttgtcagggaatgtcattacactctgatttttaaaattatgcagtattttccagttctcagagaggtcatggttgtgcccagggaagtgtgttgcattaactaaagctaaaattatcagaatcctatttacataaagcatattaaaatatctgctccttaattttctgaaggaaatagatgtaagtttctgctacttgaaacctacagaaccgacaaaaattagggtgctaaaaaaatgacagtgaaatctcatcgtaaggcagctagttctaatttgcatttgaatgtataacaaattgcatcacttttcacaaacttaacacctgcctggagtaaaaatctgatttgacccctctg

SEQ ID NO: 274 - DNA, 3500 bp, Homo sapiens
  source 1..3500: mol_type = unassigned DNA
cgcctgggcggcggcggcggcggcgtgatggctccggccgcggaccgagagggctactggggccccacgacctccacgctggactggtgcgaggagaactactccgtgacctggtacatcgccgagttctggaatacagtgagtaacctgatcatgattatacctccaatgttcggtgcagttcagagtgttagagacggtctggaaaagcggtacattgcttcttatttagcactcacagaagtacttcagatttgagaaaagagcacataactatggctaaaagatgggatttgtaatctctggagttttttacttcaagtctgaggatccaaactgactaagtgaagtaaagaaataagcagctattggatgaactcccaatgatatacagctgttgcatatttgtgtactgcatgtttgaatgtttcaagatcaagaactcagtaaactaccatctgctttttaccttagttctattcagtttaatagtaaccacagtttaccttaaggtaaaagagccgatattccatcaggtcatgtatggaatgttggtctttacattagtacttcgatctatttatattgttacatgggtttatccatggcttagaggactgggttatacatcattgggtatatttttattgggatttttattttggaatatagataacatattttgtgagtcactgaggaactttcgaaagaaggtaccacctatcataggtattaccacacaatttcatgcatggtggcatattttaactggccttggttcctatcttcacatccttttcagtttgtatacaagaacactttacctgagatataggccaaaagtgaagtttctctttggaatctggccagtgatcctgtttgagcctctcaggaagcattgatgaatcattccaccaagaaaacaaacaagcacctaccatagacctggcagaataaataaggaaatccttaaagatctacaagttcaaatatgtcatgaccatcacagcagaggagtgactttctgactaatgctgccacccacacagagaataaggagtagggcctgctgggtgtttagctcatggctttatcttatttgtccccctcctcctttcacgctccagtttataaagaaacagagatgatgtgtgtgtatgcctcaaatgcagaaacagttgggcttttcttaacaggttaacagtttgtgctggttataagaaattaaccttcttttctttttgccaagggttgcatgtgaattatacctttcttaatatttgattaaataatgcagtcagctaagagccaacaaaaccccatatccagatagttagctgtgagccagcactcagctgtgtcagatttgattaatattgtattaatctcatggatggttctcaaaggtaaaaaaagagagagaaagagagagagctagctgtgggattctgtgtagttcttcactatctgttccagggctagtcggaggatcataagcaagctcagacctgcccccagttcagtacttgaccacatcccaggatttatggtgtctgtctatggccacagccaaccagaatgagtgggtcatcttataacctttctgaagctccatgaggacatgtatagaatgctgcaccttcagccagctctgctctgatctttgcagatctttaagttgtcactgtttctacggctagacaaatatgactggtggtctagactacccatagttcatcctcctcacataacttatttgaagttgtcagggaatgtcattacactctgatttttaaaattatgcagtattttccagttctcagagaggtcatggttgtgcccagggaagtgtgttgcattaactaaagctaaaattatcagaatcctatttacataaagcatattaaaatatctgctccttaattttctgaaggaaatagatgtaagtttctgctacttgaaacctacagaaccgacaaaaattagggtgctaaaaaaatgacagtgaaatctcatcgtaaggcagctagttctaatttgcatttgaatgtataacaaattgcatcacttttcacaaacttaacacctgcctggagtaaaaatctgatttgacccctctgctcatgtttcatcatatttgtagctctgcatcatttagcatttttatgactttttttgctttatataaattattgtaaaatccagattgtttttaccacatgatgacgtgactcaggattaaatcctgagctacagtttcaaaaggaaaatcatttttttcttatgcaaagatggtaaaacactgttgtcattttttccagtattcaataagtagcctttgtacaaatttaaaaccaaaaactattctgttgtttttcttcacctactagccttagtttttaaccaagtatccaaggatgtcaacttgacatccttcccttagcatgccaacaagccattagactgattcttccacctatttttatgaacctccaggaagaaaaacacttgccaaaacattaagagaactttgattctgccttaagagggtataaaactaaaccatttgaaggcacagcccataagactatacttgattttgccccaagattctgacttctggctacatttcacctgcagttacctgggctatcggccgtgatacattttttaattcatttgttttccaccattatatttttatacttttcagttagatatacttctgcataaagagtatatatacagtgtaggataaaggcatatcgtacatggcaatgctgttaaacatggtaagactgaggttctgcaggattaaagtcagattaagggtacagaaagcacaccttgatactgaggccatttagagcaatttgtttaatgagtggttcagccatcaccaccagtggccacctgttcaataaaattgcctagcaccacagtggagagtcatctacaccccaaggtgagctgtaagactggccaattctttgaagacctttttttctgttgggagaatggaaagcagaaagggaagccaggctctttaatgttccaagtcagctgtgcctcacacaaggctctctttttagctactaagtaacatactcaagactttgtatctgtgcagcattttatggaaatcactggtgacctataggatattactaaattatttcaatagctttatttttttcctacttggattctaggtggacattacagagttgaattcctcactaccccctcccgctgtcatttgttttattggaaaacttcatgttaactagagtgtacaaaaagtctgtttcctgctgagccaatagtgatttgtttgcatatcacctaatgtgaaaagtgctcatctgtgaactctacagcaaattatattttagaaaatactttgtgaggccgggcatggtggcagagcgagactccgtctcaaaaaaaaaaaaaaaaaaaaaaaagaaaagaaaagaaaatataaggatgtaaaagaa

SEQ ID NO: 275 - DNA, 531 bp, Homo sapiens
  source 1..531: mol_type = unassigned DNA
ggaatacagtgagtaacctgatcatgattatacctccaatgttcggtgcagttcagagtgttagagacggtctggaaaagcggtacattgcttcttatttagcactcacagtggtaggaatgggatcctggtgcttccacatgactctgaaatatgaaatgcagctattggatgaactcccaatgatatacagctgttgcatatttgtgtactgcatgtttgaatgtttcaagatcaagaactcagtaaactaccatctgctttttaccttagttctattcagtttaatagtaaccacagtttaccttaaggtaaaagagccgatattccatcaggtcatgtatggaatgttggtctttacattagtacttcgatctatttatattgttacatgaagagtattgctttgaactgcccctgagagctgaagattggccatgggtttatccatggcttagaggactgggttatacatcattgggtatatttttattgggatttttattttggaatatagataacatattttgt

SEQ ID NO: 276 - DNA, 560 bp, Homo sapiens
  source 1..560: mol_type = unassigned DNA
tttaataaagttaagcagactcttaacttttcctcagaagttagcatgatttagtgatttaacacattttttaacattctattctttaaaatgtagtgaaggataataaatatttacatttaattgggaaggctattttggtaggcaaaatagacttcctttgccaaacaataatgattgtactaacctcattttccgttcctatttaggtcatgtatggaatgttggtctttacattagtacttcgatctatttatattgttacatgggtttatccatggcttagaggactgggttatacatcattgggtatatttttattgggatttttattttggaatatagataacatattttgtgagtcactgaggaactttcgaaagaaggtaccacctatcataggtattaccacacaatttcatgcatggtggcatattttaactggccttggttcctatcttcacatccttttcagtttgtatacaagaacactttacctgagatataggccaaaagtgaagtttctctttggaatctggccagtgatcctgtttgagcct

SEQ ID NO: 277 - DNA, 567 bp, Homo sapiens
  source 1..567: mol_type = unassigned DNA
catttacagcatggtttactgaatattttgagtagatgctcaaaaaaaaaacagttgctgaacaaatgaagcatatactcatgttgtttttgcttcgtacatgcagaagcactatggttacgtttgtcagtacgccagtttgcatgaattcaaaatgaatctgaaaagctttccccctcccacttttctttcagtttgtatacaagaacactttacctgagatataggccaaaagtgaagtttctctttggaatctggccagtgatcctgtttgagcctctcaggaagcattgatgaatcattccaccaagaaaacaaacaagcacctaccatagacctggcagaataaataaggaaatccttaaagatctacaagttcaaatatgtcatgaccatcacagcagaggagtgactttctgactaatgctgccacccacacagagaataaggagtagggcctgctgggtgtttagctcatggctttatcttatttgtccccctcctcctttcacgctccagtttataaagaaacagagatgatgtgtgtgtatgcctcaaatgcagaaa

SEQ ID NO: 278 - DNA, 1906 bp, Homo sapiens
  source 1..1906: mol_type = unassigned DNA
cagagtcggctcagcctgcgccggggaacatcggccgcctccagctcccggcgcggcccggcccggcccggctcggccgcctcagacgccgcctgccctgcagccatgaggcccccgcagtgtctgctgcacacgccttccctggcttccccactccttctcctcctcctctggctcctgggtggaggagtgggggctgagggccgggaggatgcagagctgctggtgacggtgcgtgggggccggctgcggggcattcgcctgaagacccccgggggccctgtctctgctttcctgggcatcccctttgcggagccacccatgggaccccgtcgctttctgccaccggagcccaagcagccttggtcaggggtggtagacgctacaaccttccagagtgtctgctaccaatatgtggacaccctatacccaggttttgagggcaccgagatgtggaaccccaaccgtgagctgagcgaggactgcctgtacctcaacgtgtggacaccatacccccggcctacatcccccacccctgtcctcgtctggatctatgggggtggcttctacagtggggcctcctccttggacgtgtacgatggccgcttcttggtacaggccgagaggactgtgctggtgtccatgaactaccgggtgggagcctttggcttcctggccctgccggggagccgagaggccccgggcaatgtgggtctcctggatcagaggctggccctgcagtgggtgcaggagaacgtggcagccttcgggggtgacccgacatcagtgacgctgtttggggagagcgcgggagccgcctcggtgggcatgcacctgctgtccccgcccagccggggcctgttccacagggccgtgctgcagagcggtgcccccaatggaccctgggccacggtgggcatgggagaggcccgtcgcagggccacgcagctggcccaccttgtgggctgtcctccaggcggcactggtgggaatgacacagagctggtagcctgccttcggacacgaccagcgcaggtcctggtgaaccacgaatggcacgtgctgcctcaagaaagcgtcttccggttctccttcgtgcctgtggtagatggagacttcctcagtgacaccccagaggccctcatcaacgcgggagacttccacggcctgcagctggctgggcgactggctgcccagggtgcccgggtctacgcctacgtctttgaacaccgtgcttccacgctctcctggcccctgtggatgggggtgccccacggctacgagatcgagttcatctttgggatccccctggacccctctcgaaactacacggcagaggagaaaatcttcgcccagcgactgatgcgatactgggccaactttgcccgcacaggggatcccaatgagccccgagaccccaaggccccacaatggcccccgtacacggcgggggctcagcagtacgttagtctggacctgcggccgctggaggtgcggcgggggctgcgcgcccaggcctgcgccttctggaaccgcttcctccccaaattgctcagcgccaccgacacgctcgacgaggcggagcgccagtggaaggccgagttccaccgctggagctcctacatggtgcactggaagaaccagttcgaccactacagcaagcaggatcgctgctcagacctgtgaccccggcgggacccccatgtcctccgctccgcccggccccctagctgtatatactatttatttcagggctgggctataacacagacgagccccagactctgcccatccccaccccaccccgacgtcccccggggctcccggtcctctgcatgtctcaggctgagctccctcccccgcggtgccttcgcccctctgggctgccaataaactgttacagcca

SEQ ID NO: 279 - DNA, 2172 bp, Homo sapiens
  source 1..2172: mol_type = unassigned DNA
gtcagagtcggctcagcctgcgccggggaacatcggccgcctccagctcccggcgcggcccggcccggcccggctcggccgcctcagacgccgcctgccctgcagccatgaggcccccgcagtgtctgctgcacacgccttccctggcttccccactccttctcctcctcctctggctcctgggtggaggagtgggggctgagggccgggaggatgcagagctgctggtgacggtgcgtgggggccggctgcggggcattcgcctgaagacccccgggggccctgtctctgctttcctgggcatcccctttgcggagccacccatgggaccccgtcgctttctgccaccggagcccaagcagccttggtcaggggtggtagacgctacaaccttccagagtgtctgctaccaatatgtggacaccctatacccaggttttgagggcaccgagatgtggaaccccaaccgtgagctgagcgaggactgcctgtacctcaacgtgtggacaccatacccccggcctacatcccccacccctgtcctcgtctggatctatgggggtggcttctacagtggggcctcctccttggacgtgtacgatggccgcttcttggtacaggccgagaggactgtgctggtgtccatgaactaccgggtgggagcctttggcttcctggccctgccggggagccgagaggccccgggcaatgtgggtctcctggatcagaggctggccctgcagtgggtgcaggagaacgtggcagccttcgggggtgacccgacatcagtgacgctgtttggggagagcgcgggagccgcctcggtgggcatgcacctgctgtccccgcccagccggggcctgttccacagggccgtgctgcagagcggtgcccccaatggaccctgggccacggtgggcatgggagaggcccgtcgcagggccacgcagctggcccaccttgtgggctgtcctccaggcggcactggtgggaatgacacagagctggtagcctgccttcggacacgaccagcgcaggtcctggtgaaccacgaatggcacgtgctgcctcaagaaagcgtcttccggttctccttcgtgcctgtggtagatggagacttcctcagtgacaccccagaggccctcatcaacgcgggagacttccacggcctgcaggtgctggtgggtgtggtgaaggatgagggctcgtattttctggtttacggggccccaggcttcagcaaagacaacgagtctctcatcagccgggccgagttcctggccggggtgcgggtcggggttccccaggtaagtgacctggcagccgaggctgtggtcctgcattacacagactggctgcatcccgaggacccggcacgcctgagggaggccctgagcgatgtggtgggcgaccacaatgtcgtgtgccccgtggcccagctggctgggcgactggctgcccagggtgcccgggtctacgcctacgtctttgaacaccgtgcttccacgctctcctggcccctgtggatgggggtgccccacggctacgagatcgagttcatctttgggatccccctggacccctctcgaaactacacggcagaggagaaaatcttcgcccagcgactgatgcgatactgggccaactttgcccgcacaggggatcccaatgagccccgagaccccaaggccccacaatggcccccgtacacggcgggggctcagcagtacgttagtctggacctgcggccgctggaggtgcggcgggggctgcgcgcccaggcctgcgccttctggaaccgcttcctccccaaattgctcagcgccaccgacacgctcgacgaggcggagcgccagtggaaggccgagttccaccgctggagctcctacatggtgcactggaagaaccagttcgaccactacagcaagcaggatcgctgctcagacctgtgaccccggcgggacccccatgtcctccgctccgcccggccccctagctgtatatactatttatttcagggctgggctataacacagacgagccccagactctgcccatccccaccccaccccgacgtcccccggggctcccggtcctctgcatgtctcaggctgagctccctcccccgcggtgccttcgcccctctgggctgccaataaactgttacagcca

SEQ ID NO: 280 - DNA, 2159 bp, Homo sapiens
  source 1..2159: mol_type = unassigned DNA
tctactccgccgctgcaggtctttgggtcgcgtctgtcactgcgctctgtcgtcggtcggcgtctggcactggaacgccgcctgccctgcagccatgaggcccccgcagtgtctgctgcacacgccttccctggcttccccactccttctcctcctcctctggctcctgggtggaggagtgggggctgagggccgggaggatgcagagctgctggtgacggtgcgtgggggccggctgcggggcattcgcctgaagacccccgggggccctgtctctgctttcctgggcatcccctttgcggagccacccatgggaccccgtcgctttctgccaccggagcccaagcagccttggtcaggggtggtagacgctacaaccttccagagtgtctgctaccaatatgtggacaccctatacccaggttttgagggcaccgagatgtggaaccccaaccgtgagctgagcgaggactgcctgtacctcaacgtgtggacaccatacccccggcctacatcccccacccctgtcctcgtctggatctatgggggtggcttctacagtggggcctcctccttggacgtgtacgatggccgcttcttggtacaggccgagaggactgtgctggtgtccatgaactaccgggtgggagcctttggcttcctggccctgccggggagccgagaggccccgggcaatgtgggtctcctggatcagaggctggccctgcagtgggtgcaggagaacgtggcagccttcgggggtgacccgacatcagtgacgctgtttggggagagcgcgggagccgcctcggtgggcatgcacctgctgtccccgcccagccggggcctgttccacagggccgtgctgcagagcggtgcccccaatggaccctgggccacggtgggcatgggagaggcccgtcgcagggccacgcagctggcccaccttgtgggctgtcctccaggcggcactggtgggaatgacacagagctggtagcctgccttcggacacgaccagcgcaggtcctggtgaaccacgaatggcacgtgctgcctcaagaaagcgtcttccggttctccttcgtgcctgtggtagatggagacttcctcagtgacaccccagaggccctcatcaacgcgggagacttccacggcctgcaggtgctggtgggtgtggtgaaggatgagggctcgtattttctggtttacggggccccaggcttcagcaaagacaacgagtctctcatcagccgggccgagttcctggccggggtgcgggtcggggttccccaggtaagtgacctggcagccgaggctgtggtcctgcattacacagactggctgcatcccgaggacccggcacgcctgagggaggccctgagcgatgtggtgggcgaccacaatgtcgtgtgccccgtggcccagctggctgggcgactggctgcccagggtgcccgggtctacgcctacgtctttgaacaccgtgcttccacgctctcctggcccctgtggatgggggtgccccacggctacgagatcgagttcatctttgggatccccctggacccctctcgaaactacacggcagaggagaaaatcttcgcccagcgactgatgcgatactgggccaactttgcccgcacaggggatcccaatgagccccgagaccccaaggccccacaatggcccccgtacacggcgggggctcagcagtacgttagtctggacctgcggccgctggaggtgcggcgggggctgcgcgcccaggcctgcgccttctggaaccgcttcctccccaaattgctcagcgccaccgacacgctcgacgaggcggagcgccagtggaaggccgagttccaccgctggagctcctacatggtgcactggaagaaccagttcgaccactacagcaagcaggatcgctgctcagacctgtgaccccggcgggacccccatgtcctccgctccgcccggccccctagctgtatatactatttatttcagggctgggctataacacagacgagccccagactctgcccatccccaccccaccccgacgtcccccggggctcccggtcctctgcatgtctcaggctgagctccctcccccgcggtgccttcgcccctctgggctgccaataaactgttacagcca

SEQ ID NO: 281 - DNA, 2218 bp, Homo sapiens
  source 1..2218: mol_type = unassigned DNA
ctctcccctcatctttgccaacctgccccacctcctctgcagctgagcgataacccttgggccgacagtgccctaatctcctccctcctggcttctcgaccgacccttcaccctttccctttctttctcccagcagacgccgcctgccctgcagccatgaggcccccgcagtgtctgctgcacacgccttccctggcttccccactccttctcctcctcctctggctcctgggtggaggagtgggggctgagggccgggaggatgcagagctgctggtgacggtgcgtgggggccggctgcggggcattcgcctgaagacccccgggggccctgtctctgctttcctgggcatcccctttgcggagccacccatgggaccccgtcgctttctgccaccggagcccaagcagccttggtcaggggtggtagacgctacaaccttccagagtgtctgctaccaatatgtggacaccctatacccaggttttgagggcaccgagatgtggaaccccaaccgtgagctgagcgaggactgcctgtacctcaacgtgtggacaccatacccccggcctacatcccccacccctgtcctcgtctggatctatgggggtggcttctacagtggggcctcctccttggacgtgtacgatggccgcttcttggtacaggccgagaggactgtgctggtgtccatgaactaccgggtgggagcctttggcttcctggccctgccggggagccgagaggccccgggcaatgtgggtctcctggatcagaggctggccctgcagtgggtgcaggagaacgtggcagccttcgggggtgacccgacatcagtgacgctgtttggggagagcgcgggagccgcctcggtgggcatgcacctgctgtccccgcccagccggggcctgttccacagggccgtgctgcagagcggtgcccccaatggaccctgggccacggtgggcatgggagaggcccgtcgcagggccacgcagctggcccaccttgtgggctgtcctccaggcggcactggtgggaatgacacagagctggtagcctgccttcggacacgaccagcgcaggtcctggtgaaccacgaatggcacgtgctgcctcaagaaagcgtcttccggttctccttcgtgcctgtggtagatggagacttcctcagtgacaccccagaggccctcatcaacgcgggagacttccacggcctgcaggtgctggtgggtgtggtgaaggatgagggctcgtattttctggtttacggggccccaggcttcagcaaagacaacgagtctctcatcagccgggccgagttcctggccggggtgcgggtcggggttccccaggtaagtgacctggcagccgaggctgtggtcctgcattacacagactggctgcatcccgaggacccggcacgcctgagggaggccctgagcgatgtggtgggcgaccacaatgtcgtgtgccccgtggcccagctggctgggcgactggctgcccagggtgcccgggtctacgcctacgtctttgaacaccgtgcttccacgctctcctggcccctgtggatgggggtgccccacggctacgagatcgagttcatctttgggatccccctggacccctctcgaaactacacggcagaggagaaaatcttcgcccagcgactgatgcgatactgggccaactttgcccgcacaggggatcccaatgagccccgagaccccaaggccccacaatggcccccgtacacggcgggggctcagcagtacgttagtctggacctgcggccgctggaggtgcggcgggggctgcgcgcccaggcctgcgccttctggaaccgcttcctccccaaattgctcagcgccaccgacacgctcgacgaggcggagcgccagtggaaggccgagttccaccgctggagctcctacatggtgcactggaagaaccagttcgaccactacagcaagcaggatcgctgctcagacctgtgaccccggcgggacccccatgtcctccgctccgcccggccccctagctgtatatactatttatttcagggctgggctataacacagacgagccccagactctgcccatccccaccccaccccgacgtcccccggggctcccggtcctctgcatgtctcaggctgagctccctcccccgcggtgccttcgcccctctgggctgccaataaactgttacag

SEQ ID NO: 282 - DNA, 1194 bp, Homo sapiens
  source 1..1194: mol_type = unassigned DNA
catgaggcccccgcagtgtctgctgcacacgccttccctggcttccccactccttctcctcctcctctggctcctgggtggaggagtgggggctgagggccgggaggatgcagagctgctggtgacggtgcgtgggggccggctgcggggcattcgcctgaagacccccgggggccctgtctctgctttcctgggcatcccctttgcggagccacccatgggaccccgtcgctttctgccaccggagcccaagcagccttggtcaggggtggtagacgctacaaccttccagagtgtctgctaccaatatgtggacaccctatacccaggttttgagggcaccgagatgtggaaccccaaccgtgagctgagcgaggactgcctgtacctcaacgtgtggacaccatacccccggcctacatcccccacccctgtcctcgtctggatctatgggggtggcttctacagtggggcctcctccttggacgtgtacgatggccgcttcttggtacaggccgagaggactgtgctggtgtccatgaactaccgggtgggagcctttggcttcctggccctgccggggagccgagaggccccgggcaatgtgggtctcctggatcagaggctggccctgcagtgggtgcaggagaacgtggcagccttcgggggtgacccgacatcagtgacgctgtttggggagagcgcgggagccgcctcggtgggcatgcacctgctgtccccgcccagccggggcctgttccacagggccgtgctgcagagcggtgcccccaatggaccctgggccacggtgggcatgggagaggcccgtcgcagggccacgcagctggcccaccttgtgggctgtcctccaggcggcactggtgggaatgacacagagctggtagcctgccttcggacacgaccagcgcaggtcctggtgaaccacgaatggcacgtgctgcctcaagaaagcgtcttccggttctccttcgtgcctgtggtagatggagacttcctcagtgacaccccagaggccctcatcaacgcgggagacttccacggcctgcagacacgctcgacgaggcggagcgccagtggaaggccgagttccaccgctggagctcctacatggtgcactggaagaaccagttcgaccactacagcaagcaggatcgctgctcagacctgtgaccc

SEQ ID NO: 283 - DNA, 1496 bp, Homo sapiens
  source 1..1496: mol_type = unassigned DNA
catgaggcccccgcagtgtctgctgcacacgccttccctggcttccccactccttctcctcctcctctggctcctgggtggaggagtgggggctgagggccgggaggatgcagagctgctggtgacggtgcgtgggggccggctgcggggcattcgcctgaagacccccgggggccctgtctctgctttcctgggcatcccctttgcggagccacccatgggaccccgtcgctttctgccaccggagcccaagcagccttggtcaggggtggtagacgctacaaccttccagagtgtctgctaccaatatgtggacaccctatacccaggttttgagggcaccgagatgtggaaccccaaccgtgagctgagcgaggactgcctgtacctcaacgtgtggacaccatacccccggcctacatcccccacccctgtcctcgtctggatctatgggggtggcttctacagtggggcctcctccttggacgtgtacgatggccgcttcttggtacaggccgagaggactgtgctggtgtccatgaactaccgggtgggagcctttggcttcctggccctgccggggagccgagaggccccgggcaatgtgggtctcctggatcagaggctggccctgcagtgggtgcaggagaacgtggcagccttcgggggtgacccgacatcagtgacgctgtttggggagagcgcgggagccgcctcggtgggcatgcacctgctgtccccgcccagccggggcctgttccacagggccgtgctgcagagcggtgcccccaatggaccctgggccacggtgggcatgggagaggcccgtcgcagggccacgcagctggcccaccttgtgggctgtcctccaggcggcactggtgggaatgacacagagctggtagcctgccttcggacacgaccagcgcaggtcctggtgaaccacgaatggcacgtgctgcctcaagaaagcgtcttccggttctccttcgtgcctgtggtagatggagacttcctcagtgacaccccagaggccctcatcaacgcgggagacttccacggcctgcaggtgctggtgggtgtggtgaaggatgagggctcgtattttctggtttacggggccccaggcttcagcaaagacaacgagtctctcatcagccgggccgagttcctggccggggtgcgggtcggggttccccagggatcccaatgagccccgagaccccaaggccccacaatggcccccgtacacggcgggggctcagcagtacgttagtctggacctgcggccgctggaggtgcggcgggggctgcgcgcccaggcctgcgccttctggaaccgcttcctccccaaattgctcagcgccaccgacacgctcgacgaggcggagcgccagtggaaggccgagttccaccgctggagctcctacatggtgcactggaagaaccagttcgaccactacagcaagcaggatcgctgctcagacctgtgaccc

SEQ ID NO: 284 - DNA, 1364 bp, Homo sapiens
  source 1..1364: mol_type = unassigned DNA
catgaggcccccgcagtgtctgctgcacacgccttccctggcttccccactccttctcctcctcctctggctcctgggtggaggagtgggggctgagggccgggaggatgcagagctgctggtgacggtgcgtgggggccggctgcggggcattcgcctgaagacccccgggggccctgtctctgctttcctgggcatcccctttgcggagccacccatgggaccccgtcgctttctgccaccggagcccaagcagccttggtcaggggtggtagacgctacaaccttccagagtgtctgctaccaatatgtggacaccctatacccaggttttgagggcaccgagatgtggaaccccaaccgtgagctgagcgaggactgcctgtacctcaacgtgtggacaccatacccccggcctacatcccccacccctgtcctcgtctggatctatgggggtggcttctacagtggggcctcctccttggacgtgtacgatggccgcttcttggtacaggccgagaggactgtgctggtgtccatgaactaccgggtgggagcctttggcttcctggccctgccggggagccgagaggccccgggcaatgtgggtctcctggatcagaggctggccctgcagtgggtgcaggagaacgtggcagccttcgggggtgacccgacatcagtgacgctgtttggggagagcgcgggagccgcctcggtgggcatgcacctgctgtccccgcccagccggggcctgttccacagggccgtgctgcagagcggtgcccccaatggaccctgggccacggtgggcatgggagaggcccgtcgcagggccacgcagctggcccaccttgtgggctgtcctccaggcggcactggtgggaatgacacagagctggtagcctgccttcggacacgaccagcgcaggtcctggtgaaccacgaatggcacgtgctgcctcaagaaagcgtcttccggttctccttcgtgcctgtggtagatggagacttcctcagtgacaccccagaggccctcatcaacgcgggagacttccacggcctgcagggatcccaatgagccccgagaccccaaggccccacaatggcccccgtacacggcgggggctcagcagtacgttagtctggacctgcggccgctggaggtgcggcgggggctgcgcgcccaggcctgcgccttctggaaccgcttcctccccaaattgctcagcgccaccgacacgctcgacgaggcggagcgccagtggaaggccgagttccaccgctggagctcctacatggtgcactggaagaaccagttcgaccactacagcaagcaggatcgctgctcagacctgtgaccc

SEQ ID NO: 285 - DNA, 1305 bp, Homo sapiens
  source 1..1305: mol_type = unassigned DNA
catgaggcccccgcagtgtctgctgcacacgccttccctggcttccccactccttctcctcctcctctggctcctgggtggaggagtgggggctgagggccgggaggatgcagagctgctggtgacggtgcgtgggggccggctgcggggcattcgcctgaagacccccgggggccctgtctctgctttcctgggcatcccctttgcggagccacccatgggaccccgtcgctttctgccaccggagcccaagcagccttggtcaggggtggtagacgctacaaccttccagagtgtctgctaccaatatgtggacaccctatacccaggttttgagggcaccgagatgtggaaccccaaccgtgagctgagcgaggactgcctgtacctcaacgtgtggacaccatacccccggcctacatcccccacccctgtcctcgtctggatctatgggggtggcttctacagtggggcctcctccttggacgtgtacgatggccgcttcttggtacaggccgagaggactgtgctggtgtccatgaactaccgggtgggagcctttggcttcctggccctgccggggagccgagaggccccgggcaatgtgggtctcctggatcagaggctggccctgcagtgggtgcaggagaacgtggcagccttcgggggtgacccgacatcagtgacgctgtttggggagagcgcgggagccgcctcggtgggcatgcacctgctgtccccgcccagccggggcctgttccacagggccgtgctgcagagcggtgcccccaatggaccctgggccacggtgggcatgggagaggcccgtcgcagggccacgcagctggcccaccttgtgggctgtcctccaggcggcactggtgggaatgacacagagctggtagcctgccttcggacacgaccagcgcaggtcctggtgaaccacgaatggcacgtgctgcctcaagaaagcgtcttccggttctccttcgtgcctgtggtagatggagacttcctcagtgacaccccagaggccctcatcaacgcgggagacttccacggcctgcaggtgctggtgggtgtggtgaaggatgagggctcgtattttctggtttacggggccccaggcttcagcaaagacaacgagtctctcatcagccgggccgagttcctggccgggacacgctcgacgaggcggagcgccagtggaaggccgagttccaccgctggagctcctacatggtgcactggaagaaccagttcgaccactacagcaagcaggatcgctgctcagacctgtgaccc

SEQ ID NO: 286 - DNA, 1472 bp, Homo sapiens
  source 1..1472: mol_type = unassigned DNA
catgaggcccccgcagtgtctgctgcacacgccttccctggcttccccactccttctcctcctcctctggctcctgggtggaggagtgggggctgagggccgggaggatgcagagctgctggtgacggttttgagggcaccgagatgtggaaccccaaccgtgagctgagcgaggactgcctgtacctcaacgtgtggacaccatacccccggcctacatcccccacccctgtcctcgtctggatctatgggggtggcttctacagtggggcctcctccttggacgtgtacgatggccgcttcttggtacaggccgagaggactgtgctggtgtccatgaactaccgggtgggagcctttggcttcctggccctgccggggagccgagaggccccgggcaatgtgggtctcctggatcagaggctggccctgcagtgggtgcaggagaacgtggcagccttcgggggtgacccgacatcagtgacgctgtttggggagagcgcgggagccgcctcggtgggcatgcacctgctgtccccgcccagccggggcctgttccacagggccgtgctgcagagcggtgcccccaatggaccctgggccacggtgggcatgggagaggcccgtcgcagggccacgcagctggcccaccttgtgggctgtcctccaggcggcactggtgggaatgacacagagctggtagcctgccttcggacacgaccagcgcaggtcctggtgaaccacgaatggcacgtgctgcctcaagaaagcgtcttccggttctccttcgtgcctgtggtagatggagacttcctcagtgacaccccagaggccctcatcaacgcgggagacttccacggcctgcagactggctgcatcccgaggacccggcacgcctgagggaggccctgagcgatgtggtgggcgaccacaatgtcgtgtgccccgtggcccagctggctgggcgactggctgcccagggtgcccgggtctacgcctacgtctttgaacaccgtgcttccacgctctcctggcccctgtggatgggggtgccccacggctacgagatcgagttcatctttgggatccccctggacccctctcgaaactacacggcagaggagaaaatcttcgcccagcgactgatgcgatactgggccaactttgcccgcacaggggatcccaatgagccccgagaccccaaggccccacaatggcccccgtacacggcgggggctcagcagtacgttagtctggacctgcggccgctggaggtgcggcgggggctgcgcgcccaggcctgcgccttctggaaccgcttcctccccaaattgctcagcgccaccgacacgctcgacgaggcggagcgccagtggaaggccgagttccaccgctggagctcctacatggtgcactggaagaaccagttcgaccactacagcaagcaggatcgctgctcagacctgtgaccc

SEQ ID NO: 287 - DNA, 2179 bp, Homo sapiens
  source 1..2179: mol_type = unassigned DNA
gaacatcggccgcctccagctcccggcgcggcccggcccggcccggctcggccgcctcagcagacgccgcctgccctgcagccatgaggcccccgcagtgtctgctgcacacgccttccctggcttccccactccttctcctcctcctctggctcctgggtggaggagtgggggctgagggccgggaggatgcagagctgctggtgacggtgcgtgggggccggctgcggggcattcgcctgaagacccccgggggccctgtctctgctttcctgggcatcccctttgcggagccacccatgggaccccgtcgctttctgccaccggagcccaagcagccttggtcaggggtggtagacgctacaaccttccagagtgtctgctaccaatatgtggacaccctatacccaggttttgagggcaccgagatgtggaaccccaaccgtgagctgagcgaggactgcctgtacctcaacgtgtggacaccatacccccggcctacatcccccacccctgtcctcgtctggatctatgggggtggcttctacagtggggcctcctccttggacgtgtacgatggccgcttcttggtacaggccgagaggactgtgctggtgtccatgaactaccgggtgggagcctttggcttcctggccctgccggggagccgagaggccccgggcaatgtgggtctcctggatcagaggctggccctgcagtgggtgcaggagaacgtggcagccttcgggggtgacccgacatcagtgacgctgtttggggagagcgcgggagccgcctcggtgggcatgcacctgctgtccccgcccagccggggcctgttccacagggccgtgctgcagagcggtgcccccaatggaccctgggccacggtgggcatgggagaggcccgtcgcagggccacgcagctggcccaccttgtgggctgtcctccaggcggcactggtgggaatgacacagagctggtagcctgccttcggacacgaccagcgcaggtcctggtgaaccacgaatggcacgtgctgcctcaagaaagcgtcttccggttctccttcgtgcctgtggtagatggagacttcctcagtgacaccccagaggccctcatcaacgcgggagacttccacggcctgcaggtgctggtgggtgtggtgaaggatgagggctcgtattttctggtttacggggccccaggcttcagcaaagacaacgagtctctcatcagccgggccgagttcctggccggggtgcgggtcggggttccccaggtaagtgacctggcagccgaggctgtggtcctgcattacacagactggctgcatcccgaggacccggcacgcctgagggaggccctgagcgatgtggtgggcgaccacaatgtcgtgtgccccgtggcccagctggctgggcgactggctgcccagggtgcccgggtctacgcctacgtctttgaacaccgtgcttccacgctctcctggcccctgtggatgggggtgccccacggctacgagatcgagttcatctttgggatccccctggacccctctcgaaactacacggcagaggagaaaatcttcgcccagcgactgatgcgatactgggccaactttgcccgcacaggggatcccaatgagccccgagaccccaaggccccacaatggcccccgtacacggcgggggctcagcagtacgttagtctggacctgcggccgctggaggtgcggcgggggctgcgcgcccaggcctgcgccttctggaaccgcttcctccccaaattgctcagcgccaccgcctcggaggctcccagcacctgcccaggcttcacccatggggaggctgctccgaggcccggcctccccctgcccctcctcctcctccaccagcttctcctcctcttcctctcccacctccggcggctgtgaacacggcctcttcccctacggccacaggggcccctcctctaatgagtggtcggaccgtggggaagggccccactcagggatctcagacctagtgctcccttcctcctcaaaccgagagactcacactggacagggcaggaggagggggccgtgcctcccacccttctcagggacccccacgcctttgttgtttgaatggaaatggaaaagccagtattcttttataaaattatcttttggaa

SEQ ID NO: 288 - DNA, 585 bp, Homo sapiens
  source 1..585: mol_type = unassigned DNA
gtccctgcgtttgtctgtgcctgtcactgcatgaggtcgtccgtctgcgcgtgtctgtctccacgggcttctgtccgtctgtctgtcacacgccgcctgccctgcagccatgaggcccccgcagtgtctgctgcacacgccttccctggcttccccactccttctcctcctcctctggctcctgggtggaggagtgggggctgagggccgggaggatgcagagctgctggtgacggtgcgtgggggccggctgcggggcattcgcctgaagacccccgggggccctgtctctgctttcctgggcatcccctttgcggagccacccatgggaccccgtcgctttctgccaccggagcccaagcagccttggtcaggggtggtagacgctacaaccttccagagtgtctgctaccaatatgtggacaccctatacccaggttttgagggcaccgagatgtggaaccccaaccgtgagctgagcgaggactgcctgtacctcaacgtgtggacaccatacccccggcctacatcccccacccctgtcctcgtctggatctatgggggtggcttctacagtggggcctc

SEQ ID NO: 289 - DNA, 153 bp, Homo sapiens
  source 1..153: mol_type = unassigned DNA
cctcgcccagcagccttgcgcgtgctaccacgctgtcctgccttctcagacgccgcctgccctgcagccatgaggcccccgcagtgtctgctgcacacgccttccctggcttccccactccttctcctcctcctctggctcctgggtggagga

SEQ ID NO: 290 - DNA, 480 bp, Homo sapiens
  source 1..480: mol_type = unassigned DNA
tgcgccggccgctctcccacgcggggtctcgggggctcctgagccggccgcctccaggaagcaggcgccgcgcggtattgccgcatgcacctcggtcgtggggaccccgctgcagcagccctgtccacacgggtgaactcctggagggcggggcggggggcaatctgcgcgggtcaggcccctcggagcaggctgggggcgcccgagccaggccgctcccacctgccagccgcgtggccaatgaatgctaggcctggtgatgtcatgccccgaccggaccctggtgacgaaagtccgaagtcacccgtcagggaaccagcacagacccacccgcgggggttccagaagtttccactgccgccgcggagtgcggcctcgcccagcagccttgcgcgtgctaccacgctgtcctgccttctcagcctcgagcgagaccgacagggtgtccaagtgtgtccgtccgtctgtgaaagtcgtccc

SEQ ID NO: 291 - DNA, 2956 bp, Homo sapiens
  source 1..2956: mol_type = unassigned DNA
ggggtgtgtgcggggggccggaggcggcggctgtcagagtcggctcagcctgcgccggggaacatcggccgcctccagctcccggcgcggcccggcccggcccggctcggccgcctcagacgccgcctgccctgcagccatgaggcccccgcagtgtctgctgcacacgccttccctggcttccccactccttctcctcctcctctggctcctgggtggaggagtgggggctgagggccgggaggatgcagagctgctggtgacggtgcgtgggggccggctgcggggcattcgcctgaagacccccgggggccctgtctctgctttcctgggcatcccctttgcggagccacccatgggaccccgtcgctttctgccaccggagcccaagcagccttggtcaggggtggtagacgctacaaccttccagagtgtctgctaccaatatgtggacaccctatacccaggttttgagggcaccgagatgtggaaccccaaccgtgagctgagcgaggactgcctgtacctcaacgtgtggacaccatacccccggcctacatcccccacccctgtcctcgtctggatctatgggggtggcttctacagtggggcctcctccttggacgtgtacgatggccgcttcttggtacaggccgagaggactgtgctggtgtccatgaactaccgggtgggagcctttggcttcctggccctgccggggagccgagaggccccgggcaatgtgggtctcctggatcagaggctggccctgcagtgggtgcaggagaacgtggcagccttcgggggtgacccgacatcagtgacgctgtttggggagagcgcgggagccgcctcggtgggcatgcacctgctgtccccgcccagccggggcctgttccacagggccgtgctgcagagcggtgcccccaatggaccctgggccacggtgggcatgggagaggcccgtcgcagggccacgcagctggcccaccttgtgggctgtcctccaggcggcactggtgggaatgacacagagctggtagcctgccttcggacacgaccagcgcaggtcctggtgaaccacgaatggcacgtgctgcctcaagaaagcgtcttccggttctccttcgtgcctgtggtagatggagacttcctcagtgacaccccagaggccctcatcaacgcgggagacttccacggcctgcaggtgctggtgggtgtggtgaaggatgagggctcgtattttctggtttacggggccccaggcttcagcaaagacaacgagtctctcatcagccgggccgagttcctggccggggtgcgggtcggggttccccaggtaagtgacctggcagccgaggctgtggtcctgcattacacagactggctgcatcccgaggacccggcacgcctgagggaggccctgagcgatgtggtgggcgaccacaatgtcgtgtgccccgtggcccagctggctgggcgactggctgcccagggtgcccgggtctacgcctacgtctttgaacaccgtgcttccacgctctcctggcccctgtggatgggggtgccccacggctacgagatcgagttcatctttgggatccccctggacccctctcgaaactacacggcagaggagaaaatcttcgcccagcgactgatgcgatactgggccaactttgcccgcacaggggatcccaatgagccccgagaccccaaggccccacaatggcccccgtacacggcgggggctcagcagtacgttagtctggacctgcggccgctggaggtgcggcgggggctgcgcgcccaggcctgcgccttctggaaccgcttcctccccaaattgctcagcgccaccgcctcggaggctcccagcacctgcccaggcttcacccatggggaggctgctccgaggcccggcctccccctgcccctcctcctcctccaccagcttctcctcctcttcctctcccacctccggcggctgtgaacacggcctcttcccctacggccacaggggcccctcctctaatgagtggtcggaccgtggggaagggccccactcagggatctcagacctagtgctcccttcctcctcaaaccgagagactcacactggacagggcaggaggagggggccgtgcctcccacccttctcagggacccccacgcctttgttgtttgaatggaaatggaaaagccagtattcttttataaaattatcttttggaacctgagcctgacattggggggaagtgggaggccccggacggggtagcaccccccattggggctataacggtcaaccatttctgtctcttctttttcccccaacctccccctcctgtcccctctgttcccgtcttccggtcattcttttctcctcctctctccttcctgctgtccttctccggccccgcctctgccctcatcctccctctcgtctttcgcacattctcctgatcctcttgccaccgtcccacgtggtcgcctgcatttctccgtgcgtcctccctgcactcatacccccccttcaacccgcccaaatgtccgatccccgaccttcctcgtgccgtcctcccctcccgcctcgctgggcgccctggccgcagacacgctcgacgaggcggagcgccagtggaaggccgagttccaccgctggagctcctacatggtgcactggaagaaccagttcgaccactacagcaagcaggatcgctgctcagacctgtgaccccggcgggacccccatgtcctccgctccgcccggccccctagctgtatatactatttatttcagggctgggctataacacagacgagccccagactctgcccatccccaccccaccccgacgtcccccggggctcccggtcctctgcatgtctcaggctgagctccctcccccgcggtgccttcgcccctctgggctgccaataaactgttacagcc

SEQ ID NO: 292 - DNA, 2741 bp, Homo sapiens
  source 1..2741: mol_type = unassigned DNA
ctcatctttgtcagtgcacaaaatggcgccctacagcctactggtgactcggctgcagaaagctctgggtgtgcggcagtaccatgtggcctcagtcctgtgccaacgggccaaggtggcgatgagccactttgagcccaacgagtacatccattatgacctgctagagaagaacattaacattgttcgcaaacgactgaaccggccgctgacactctcggagaagattgtgtatggacacctggatgaccccgccagccaggaaattgagcgaggcaagtcgtacctgcggctgcggccggaccgtgtggccatgcaggatgcgacggcccagatggccatgctccagttcatcagcagcgggctgtccaaggtggctgtgccatccaccatccactgtgaccatctgattgaagcccaggttgggggcgagaaagacctgcgccgggccaaggacatcaaccaggaagtttataatttcctggcaactgcaggtgccaaatatggcgtgggcttctggaagcctggatctggaatcattcaccagattattctggaaaactatgcgtaccctggtgttcttctgattggcactgactcccacacccccaatggtggcggccttgggggcatctgcattggagttgggggtgccgatgctgtggatgtcatggctgggatcccctgggagctgaagtgccccaaggtgattggcgtgaagctgacgggctctctctccggttggtcctcacccaaagatgtgatcctgaaggtggcaggcatcctcacggtgaaaggtggcacaggtgcaatcgtggaataccacgggcctggtgtagactccatctcctgcactggcatggcgacaatctgcaacatgggtgcagaaattggggccaccacttccgtgttcccttacaaccacaggatgaagaagtacctgagcaagaccggccgggaagacattgccaatctagctgatgaattcaaggatcacttggtgcctgaccctggctgccattatgaccaactaattgaaattaacctcagtgagctgaagccacacatcaatgggcccttcacccctgacctggctcaccctgtggcagaagtgggcaaggtggcagagaaggaaggatggcctctggacatccgagtgggtctaattggtagctgcaccaattcaagctatgaagatatggggcgctcagcagctgtggccaagcaggcactggcccatggcctcaagtgcaagtcccagttcaccatcactccaggttccgagcagatccgcgccaccattgagcgggacggctatgcacagatcttgagggatctgggtggcattgtcctggccaatgcttgtggcccctgcattggccagtgggacaggaaggacatcaagaagggggagaagaacacaatcgtcacctcctacaacaggaacttcacgggccgcaacgacgcaaaccccgagacccatgcctttgtcacgtccccagagattgtcacagccctggccattgcgggaaccctcaagttcaacccagagaccgactacctgacgggcacggatggcaagaagttcaggctggaggctccggatgcagatgagcttcccaaaggggagtttgacccagggcaggacacctaccagcacccacccaaggacagcagcgggcagcatgtggacgtgagccccaccagccagcgcctgcagctcctggagccttttgacaagtgggatggcaaggacctggaggacctgcagatcctcatcaaggtcaaagggaagtgtaccactgaccacatctcagctgctggcccctggctcaagttccgtgggcacttggataacatctccaacaacctgctcattggtgccatcaacattgaaaacggcaaggccaactccgtgcgcaatgccgtcactcaggagtttggccccgtccctgacactgcccgctactacaagaaacatggcatcaggtgggtggtgatcggagacgagaactacggcgagggctcgagccgggagcatgcagctctggagcctcgccaccttgggggccgggccatcatcaccaagagctttgccaggatccacgagaccaacctgaagaaacagggcctgctgcctctgaccttcgctgacccggctgactacaacaagattcaccctgtggacaagctgaccattcagggcctgaaggacttcacccctggcaagcccctgaagtgcatcatcaagcaccccaacgggacccaggagaccatcctcctgaaccacaccttcaacgagacgcagattgagtggttccgcgctggcagtgccctcaacagaatgaaggaactgcaacagtgagggcagtgcctccccgccccgccgctggcgtcaagttcagctccacgtgtgccatcagtggatccgatccgtccagccatggcttcctattccaagatggtgtgaccagacatgcttcctgctccccgcttagcccacggagtgactgtggttgtggtgggggggttcttaaaataactttttagcccccgtcttcctattttgagtttggttcagatcttaagcagctccatgcaactgtatttatttttgatgacaagactcccatctaaagtttttctcctgcctgatcatttcattggtggctgaaggattctagagaaccttttgttcttgcaaggaaaacaagaatccaaaaccagtgactgttctgtga

SEQ ID NO: 293 - DNA, 2811 bp, Homo sapiens
  source 1..2811: mol_type = unassigned DNA
ctttgtcagtgcacaaaatggcgccctacagcctactggtgactcggctgcagaaagctctgggtgtgcggcagtaccatgtggcctcagtcctgtgccaacgggccaaggtggcgatgagccactttgagcccaacgagtacatccattatgacctgctagagaagaacattaacattgttcgcaaacgactgaaccggccgctgacactctcggagaagattgtgtatggacacctggatgaccccgccagccaggaaattgagcgaggcaagtcgtacctgcggctgcggccggaccgtgtggccatgcaggatgcgacggcccagatggccatgctccagttcatcagcagcgggctgtccaaggtggctgtgccatccaccatccactgtgaccatctgattgaagcccaggttgggggcgagaaagacctgcgccgggccaaggacatcaaccaggaagtttataatttcctggcaactgcaggtgccaaatatggcgtgggcttctggaagcctggatctggaatcattcaccagattattctggaaaactatgcgtaccctggtgttcttctgattggcactgactcccacacccccaatggtggcggccttgggggcatctgcattggagttgggggtgccgatgctgtggatgtcatggctgggatcccctgggagctgaagtgccccaaggtgattggcgtgaagctgacgggctctctctccggttggtcctcacccaaagatgtgatcctgaaggtggcaggcatcctcacggtgaaaggtggcacaggtgcaatcgtggaataccacgggcctggtgtagactccatctcctgcactggtgaggaaggcggccaggcgacgtggcccctaccctgtgctgggcctgatgggtctccagttgggagtagaagcggcatggcgacaatctgcaacatgggtgcagaaattggggccaccacttccgtgttcccttacaaccacaggatgaagaagtacctgagcaagaccggccgggaagacattgccaatctagctgatgaattcaaggatcacttggtgcctgaccctggctgccattatgaccaactaattgaaattaacctcagtgagctgaagccacacatcaatgggcccttcacccctgacctggctcaccctgtggcagaagtgggcaaggtggcagagaaggaaggatggcctctggacatccgagtgggtctaattggtagctgcaccaattcaagctatgaagatatggggcgctcagcagctgtggccaagcaggcactggcccatggcctcaagtgcaagtcccagttcaccatcactccaggttccgagcagatccgcgccaccattgagcgggacggctatgcacagatcttgagggatctgggtggcattgtcctggccaatgcttgtggcccctgcattggccagtgggacaggaaggacatcaagaagggggagaagaacacaatcgtcacctcctacaacaggaacttcacgggccgcaacgacgcaaaccccgagacccatgcctttgtcacgtccccagagattgtcacagccctggccattgcgggaaccctcaagttcaacccagagaccgactacctgacgggcacggatggcaagaagttcaggctggaggctccggatgcagatgagcttcccaaaggggagtttgacccagggcaggacacctaccagcacccacccaaggacagcagcgggcagcatgtggacgtgagccccaccagccagcgcctgcagctcctggagccttttgacaagtgggatggcaaggacctggaggacctgcagatcctcatcaaggtcaaagggaagtgtaccactgaccacatctcagctgctggcccctggctcaagttccgtgggcacttggataacatctccaacaacctgctcattggtgccatcaacattgaaaacggcaaggccaactccgtgcgcaatgccgtcactcaggagtttggccccgtccctgacactgcccgctactacaagaaacatggcatcaggtgggtggtgatcggagacgagaactacggcgagggctcgagccgggagcatgcagctctggagcctcgccaccttgggggccgggccatcatcaccaagagctttgccaggatccacgagaccaacctgaagaaacagggcctgctgcctctgaccttcgctgacccggctgactacaacaagattcaccctgtggacaagctgaccattcagggcctgaaggacttcacccctggcaagcccctgaagtgcatcatcaagcaccccaacgggacccaggagaccatcctcctgaaccacaccttcaacgagacgcagattgagtggttccgcgctggcagtgccctcaacagaatgaaggaactgcaacagtgagggcagtgcctccccgccccgccgctggcgtcaagttcagctccacgtgtgccatcagtggatccgatccgtccagccatggcttcctattccaagatggtgtgaccagacatgcttcctgctccccgcttagcccacggagtgactgtggttgtggtgggggggttcttaaaataactttttagcccccgtcttcctattttgagtttggttcagatcttaagcagctccatgcaactgtatttatttttgatgacaagactcccatctaaagtttttctcctgcctgatcatttcattggtggctgaaggattctagagaaccttttgttcttgcaaggaaaacaagaatccaaaaccagtgactgttctgtga

SEQ ID NO: 294 - DNA, 699 bp, Homo sapiens
  source 1..699: mol_type = unassigned DNA
gcctactggtgactcggctgcaggtgagcgagctcagggacctctgggttcacgggggcggggtgcctcctactgtgccggcggctgtgggcgaggcagggcgaggcgggcccaacctggggccaacttctcgtgtacctgtcccggttgtgggcccggcacccgtgcccgcttctctggtgccctaggtcaaggcgtccccggcacagtcagctttcctggccctgtccctgcctcgcaagaagcgtgggcccaagcagcggcggccgggtgaagagcggaggcacctctttcttctttttgaggacagcattgcctgctcccgtggggtgtgtttccattcctcaagactgaaccggccgctgacactctcggagaagattgtgtatggacacctggatgaccccgccagccaggaaattgagcgaggcaagtcgtacctgcggctgcggccggaccgtgtggccatgcaggatgcgacggcccagatggccatgctccagttcatcagcagcgggctgtccaaggtggctgtgccatccaccatccactgtgaccatctgattgaagcccaggttgggggcgagaaagacctgcgccgggccaaggacatcaaccaggaagtttataatttcctggcaactgcaggtgccaaatatggcgtgggcttctggaagcctggatctggaatcattcacc

SEQ ID NO: 295 - DNA, 624 bp, Homo sapiens
  source 1..624: mol_type = unassigned DNA
tggatgaccccgccagccaggaaattgagcgaggcaagtcgtacctgcggctgcggccggaccgtgtggccatgcaggatgcgacggcccagatggccatgctccagttcatcagcagcgggctgtccaaggtggctgtgccatccaccatccactgtgaccatctgattgaagcccaggttgggggcgagaaagacctgcgccgggccaaggacatcaaccaggaagtttataatttcctggcaactgcaggtgccaaatatggcgtgggcttctggaagcctggatctggaatcattcaccaggtaaagctgggctcagtctgccgtcccaagggcccaagccagagaagtatgttccaggcctatggggggagggggtttgaggcccaggggggctgaggggaactggatgacatatccatcagctcttatgctcttcctcctttgttttgaaactgattttcattatgtcattatacgtgctcattttctgggtgagaagttaaaataatacctcctaaccacccaggtaaccagcattttaagtgcgacatgtttctttccacattgtcttctgggtgtgtactcaagcatctctattcccataaactctcatacagaa

SEQ ID NO: 296 - DNA, 644 bp, Homo sapiens
  source 1..644: mol_type = unassigned DNA
aggttgggggcgagaaagacctgcgccgggccaaggacatcaaccaggaagtttataatttcctggcaactgcaggtgccaaatatggcgtgggcttctggaagcctggatctggaatcattcaccagattattctggaaaactatgcgtaccctggtgttcttctgattggcactgactcccacacccccaatggtggcggccttgggggcatctgcattggagttgggggtgccgatgctgtggatgtcatggctgggatcccctgggagctgaagtgccccaaggtgattggcgtgaagctgacgggctctctctccggttggtcctcacccaaagatgtgatcctgaaggtggcaggcatcctcacggtgaaaggtggcacaggtgcaatcgtggaataccacgggcctggtgtagactccatctcctgcactggtgaggaaggcggccaggcgacgtggcccctaccctgtgctgggcctgatgggtctccagttgggagtagaagcggtgaatggccttcacttgagaatctgtctgttccatttggggacttgggatagacagaggtagaaggaaaattggagacagcattagagattgtctagtccacatcctcattaaacagatgaagagattga

SEQ ID NO: 297 - DNA, 330 bp, Homo sapiens
  source 1..330: mol_type = unassigned DNA
cctgggagctgaagtgccccaaggtgattggcgtgaagctgacgggctctctctccggttggtcctcacccaaagatgtgatcctgaaggtggcaggcatcctcacggtgaaaggtggcacaggtgcaatcgtggaataccacgggcctggtgtagactccatctcctgcactgcagccaccctgagctggggccctgagctctgatccccatggcctcccctcaccggcccaggtttttacccagggcctcaagggatgagtcggcccgctgtcaccacatctctctgagtgggaggagaagcaatgcagctccctggtgtgaagatgc

SEQ ID NO: 298 - DNA, 747 bp, Homo sapiens
  source 1..747: mol_type = unassigned DNA
ggtgattggcgtgaagctgacgggctctctctccggttggtcctcacccaaagatgtgatcctgaaggtggcaggcatcctcacggtgaaaggtggcacaggtgcaatcgtggaataccacgggcctggtgtagactccatctcctgcactggcatggcgacaatctgcaacatgggtgcagaaattggggccaccacttccgtgttcccttacaaccacaggatgaagaagtacctgagcaagaccggccgggaagacattgccaatctagctgatgaattcaaggatcacttggtgcctgaccctggctgccattatgaccaactaattgaaattaacctcagtgagctgaagccacacatcaatgggcccttcacccctgacctggctcaccctgtggcagaagtgggcaaggtggcagagaaggaaggatggcctctggacatccgagtggacgccctggcatgccagtcactggcatctgctgctgctgggtacagtgtggctgtgaagagcatggagcctggagccagatggcctgggcttgaatcctggctctgccacctaacagccactaacagctgagtgaccctgagcaaactacttcactgtctatgtgtgggttccccatctgtaaaacaggagtcatgatcgtactgacacctttgaaggtggtgttgggcctactgctgctatcaccaatgagaaaaataaataaaaaataaagttgtctggagaagtgacaa

SEQ ID NO: 299 - DNA, 2875 bp, Homo sapiens
  source 1..2875: mol_type = unassigned DNA
agcgccgccgcctccgcgcctcccttcagcctgcccgcagcttcccgcctctggctgggctcggggacctcggaggcctgtttctgagcccctccccgcggactcgctccccggacgcccccagcgggctcctctggcctcggccctgcacgccgccggggcggagcctcccatcctttggggcttggcctctgtgttctccaaccgcacatcccggaagtcagccttacgtgcggggaacgacagtgccatggcagacggcgagggataccggaaccccacggaggtgcagatgagccagctggtgctgccctgccacaccaaccaacgtggtgagctgagcgtcgggcagctgctcaagtggattgacaccacggcttgcctgtccgtgttggacaagtggtgaatatcaaggccaaggtgaaccgggccttcaactccagcatggaggtgggcatccaggtggcctcggaggacctgtgctctgagaagcagtggaatgtgtgcaaggccttggccaccttcgtggcccgccgagagatcaccaaggtgaagctgaagcagatcacgccgcggacagaagaggagaagatggagcacagtgtggcggctgagcgccggcgcatgcgccttgtctatgcagacaccatcaaggacctcctggccaactgcgccattcagggcgatctggagagcagagactgtagccgcatggtgccggctgagaagacccgtgtggagagtgtggagctggtcctgcctccccacgccaatcaccagggcaacacctttgggggccagatcatggcctggatggagaatgtggccaccattgcagccagccggctctgccgtgcccaccctacgctgaaggccattgaaatgttccacttccgaggcccgtcccaggtcggcgaccgtctggtgctcaaagccatcgtgaacaatgccttcaaacatagcatggaggtgggcgtgtgcgtggaggcctatcgccaggaggctgagacccaccggcgccacatcaacagtgcctttatgacctttgtggtcctggacgcagatgaccagccccagttgctgccctggattcggccccagcccggcgatggtgagcggcggtaccgagaggccagtgccagaaagaagatccgcctggacaggaagtacatcgtgtcctgtaagcagacagaggtgcccctctccgtcccctgggaccctagcaaccaggtgtacctgagctacaataacgtctcctccttgaagatgcttgtggccaaggacaactgggtgctgtcctcggagatcagtcaggtccgcctgtacactctggaggatgacaagttcctctccttccacatggagatggtggtgcatgtggatgcagcccaggccttcctgctgctctcggacctgcgtcagaggccagagtgggacaagcactaccggagcgtggagctagtgcagcaggtagacgaggacgacgccatctaccacgtcaccagccctgccctcggaggtcacacaaagccccaggacttcgtgatcctggcctcgaggcggaagccttgtgacaatggggacccctatgtcatcgcgctgaggtcggtcacgctgcccacacaccgagagacgccagagtacagacgcggagagaccctctgctcaggcttctgcctctggcgcgagggggaccagctgaccaaggtatcctactacaaccaggccaccccaggtgttctcaactatgtgaccaccaacgtggccggcctctcctctgagttctacaccaccttcaaggcttgtgagcagtttctcttggacaaccggaatgatctggcccccagcctccagaccctctagatgccctcagtggccacatcatgcccactcccactccatcctgtccccaaggactcacatacagtgcctggagaaagccaaagacctttatttcttcctgcctccccgtgggaagcctccgccctgaggtccgctggcccaccacccctgggtgctcagtttctaccaacatgagccagcaagtccttgtggtagccctggggtagcctgtagtagactcgggtcctgtccacagccctagctgccagcaatgctgtcctcacagaggcatagtcgcccccagctgggttgtgctccactgtgacggtggcccggggggaggatgccagcagcctgcctatggctccagctgtgctgtggcccagcagcatggcctgcatctggaaggacacaggttgccagagcccctggcacaactctagcatatctgtgagcagctgttccctgtagccactgcccagcacctcctcaggccagcctggtgccacagtcacgtgggggaagacctcagccacagctgtaagcagctctctgccagccacatggccggggaccgaaaaactcccgtgggagattttggccccaacccacacaggccaatgcaagaggccaaggctggagaggcgtgccagcaaggccagggatggccggagggctgcgggctccgctatttgcaaatggatgccccagtgtccgggatgtgtggccagctgctgcaggcaggactccagcgtcaggatgttgccacttggagtatgaacaatgggcacggggttttcagccacagttccctcgaggccagtgttcagcaggatcatgccttctgtgtctggaagaggcggcagaggcaacagtgtttaggatttgggttatcataaggtgttaagagtcccttgttaaaggggcagtgggagttatggggtcatcaaggaccttgcctctctggaatctgtcaacccagttttgggctccaggtggatgggttgctttataaatgtgcctggtgcatgag

SEQ ID NO: 300 - DNA, 2450 bp, Homo sapiens
  source 1..2450: mol_type = unassigned DNA
caggcttcatttggagtcaggcctggctgttgctcaggtgaccagcttgtgtctctgggagggcgctgctttccccggccacccggcgcgatgatccagaatgtcggaaatcacctgcgacggctctctttggaaggagaaatcgcagaacccctgggctggtttattatcagcagcaatctccaaacaagccccaggggctgtcagatcccccacgggctggctgtgtagagtggaatcaccttcagcaagtgtcggcctctggaattctattcgggcttggcctctgtgttctccaaccgcacatcccggaagtcagccttacgtgcggggaacgacagtgccatggcagacggcgagggataccggaaccccacggaggtgcagatgagccagctggtgctgccctgccacaccaaccaacgtggtgagctgagcgtcgggcagctgctcaagtggattgacaccacggcttgcctgtccgcggagaggcacgctggctgcccctgtgtcacagcttccatggatgacatctattttgagcacaccattagtgttggacaagtggtgaatatcaaggccaaggtgaaccgggccttcaactccagcatggaggtgggcatccaggtggcctcggaggacctgtgctctgagaagcagtggaatgtgtgcaaggccttggccaccttcgtggcccgccgagagatcaccaaggtgaagctgaagcagatcacgccgcggacagaagaggagaagatggagcacagtgtggcggctgagcgccggcgcatgcgccttgtctatgcagacaccatcaaggacctcctggccaactgcgccattcagggcgatctggagagcagagactgtagccgcatggtgccggctgagaagacccgtgtggagagtgtggagctggtcctgcctccccacgccaatcaccagggcaacacctttgggggccagatcatggcctggatggagaatgtggccaccattgcagccaggtgagggcagggtgtgctgcctctgcctcccctcctttctcctcctcctccccttggctacctccctctggaggggaaaccccagcttggggttggcattcaaggcttcagaagcttggctgttctgaatcagagaaatgaatttttgtgaactgaccattccttgttctactaaaaaagctagcatcttttacatgggaaacaccaggtctcttggcctggcactagatcctccccttgatctggccctacctgcactccttctagtatctatgttcccttcacatcaagccttctagtatctatgttcgcttcacatcaaaccatttgctgttctctgttcccatcctccactttcccagcccctgcctttgctcctgatgtagcctcctgccgtgcttcccctactcttctttgtctgctaatatcctgcccacttcctccataaagccatctctgactgttcccttcttctaaggggtgaaaattgttttctctcctctaacatctgtttctgtccggggcttgttctaccctaaatatcagggtattttttatagttatggtaactgaccttcactaattgacactctcacacctccaagactttgctcttgctgttccctctaccaggagtgcctttcccaacccatgccctttccagccaggtggattcctccttattctttagagcctggcttaaatggcccctcctccagtttaacctgtgggagacagtgcataagcaatgctgttttgggcaggcctggctatgagtgcagtaagatcctggaggagcctgatggtcagggaaggctgcctgaaggaagagcacttcagctgggacttgaatgccaagtagctttgggtaaggggagggcttctggatagtgggaacagcagctaccaaggtgtaaaagttggaaggaaaatgggaaaggggtttacccaaagccctgctttcttctgtcccctcaaacttggcttctttccagccatgcatagacctcagtattctaaactatgaaatgggactttagttctgtgcctctgggcagaactgccactgggttgggtggcagtgggtgggtcagaatgtgtagttccaggctgcgtctggggatgggaccagggtagaaggctggcccaagctggcctagcatggtggctcacacctgtaatcccagcgctttgggaggctgaggccacttaggccagaagttcaagaccagcctgggaacaaggtaaaacctcatctctactaaaaatacaaaaattagccaggtgtggtggtgcgtgcctgtagtctcagctacttgggaggctgaggcaggagagtcacttgaacccgggaggcggaggttgcagtgagccgagattgcaccactgcattccagcctgggcaacagagtgaaaccctgtctcaaaaaaaaaaaaaaaaaa

SEQ ID NO: 301 - DNA, 3082 bp, Homo sapiens
  source 1..3082: mol_type = unassigned DNA
atttggagtcaggcctggctgttgctcaggtgaccagcttgtgtctctgggagggcgctgctttccccggccacccggcgcgatgatccagaatgtcggaaatcacctgcgacggggcttggcctctgtgttctccaaccgcacatcccggaagtcagccttacgtgcggggaacgacagtgccatggcagacggcgagggataccggaaccccacggaggtgcagatgagccagctggtgctgccctgccacaccaaccaacgtggtgagctgagcgtcgggcagctgctcaagtggattgacaccacggcttgcctgtccgcggagaggcacgctggctgcccctgtgtcacagcttccatggatgacatctattttgagcacaccattagtgttggacaagtggtgaatatcaaggccaaggtgaaccgggccttcaactccagcatggaggtgggcatccaggtggcctcggaggacctgtgctctgagaagcagtggaatgtgtgcaaggccttggccaccttcgtggcccgccgagagatcaccaaggtgaagctgaagcagatcacgccgcggacagaagaggagaagatggagcacagtgtggcggctgagcgccggcgcatgcgccttgtctatgcagacaccatcaaggacctcctggccaactgcgccattcagggcgatctggagagcagagactgtagccgcatggtgccggctgagaagacccgtgtggagagtgtggagctggtcctgcctccccacgccaatcaccagggcaacacctttgggggccagatcatggcctggatggagaatgtggccaccattgcagccagccggctctgccgtgcccaccctacgctgaaggccattgaaatgttccacttccgaggcccgtcccaggtcggcgaccgtctggtgctcaaagccatcgtgaacaatgccttcaaacatagcatggaggtgggcgtgtgcgtggaggcctatcgccaggaggctgagacccaccggcgccacatcaacagtgcctttatgacctttgtggtcctggacgcagatgaccagccccagttgctgccctggattcggccccagcccggcgatggtgagcggcggtaccgagaggccagtgccagaaagaagatccgcctggacaggaagtacatcgtgtcctgtaagcagacagaggtgcccctctccgtcccctgggaccctagcaaccaggtgtacctgagctacaataacgtctcctccttgaagatgcttgtggccaaggacaactgggtgctgtcctcggagatcagtcaggtccgcctgtacactctggaggatgacaagttcctctccttccacatggagatggtggtgcatgtggatgcagcccaggccttcctgctgctctcggacctgcgtcagaggccagagtgggacaagcactaccggagcgtggagctagtgcagcaggtagacgaggacgacgccatctaccacgtcaccagccctgccctcggaggtcacacaaagccccaggacttcgtgatcctggcctcgaggcggaagccttgtgacaatggggacccctatgtcatcgcgctgaggtcggtcacgctgcccacacaccgagagacgccagagtacagacgcggagagaccctctgctcaggcttctgcctctggcgcgagggggaccagctgaccaaggtatcctactacaaccaggccaccccaggtgttctcaactatgtgaccaccaacgtggccggcctctcctctgagttctacaccaccttcaaggcttgtgagcagtttctcttggacaaccggaatgatctggcccccagcctccagaccctctagatgccctcagtggccacatcatgcccactcccactccatcctgtccccaaggactcacatacagtgcctggagaaagccaaagacctttatttcttcctgcctccccgtgggaagcctccgccctgaggtccgctggcccaccacccctgggtgctcagtttctaccaacatgagccagcaagtccttgtggtagccctggggtagcctgtagtagactcgggtcctgtccacagccctagctgccagcaatgctgtcctcacagaggcatagtcgcccccagctgggttgtgctccactgtgacggtggcccggggggaggatgccagcagcctgcctatggctccagctgtgctgtggcccagcagcatggcctgcatctggaaggacacaggttgccagagcccctggcacaactctagcatatctgtgagcagctgttccctgtagccactgcccagcacctcctcaggccagcctggtgccacagtcacgtgggggaagacctcagccacagctgtaagcagctctctgccagccacatggccggggaccgaaaaactcccgtgggagattttggccccaacccacacaggccaatgcaagaggccaaggctggagaggcgtgccagcaaggccagggatggccggagggctgcgggctccgctatttgcaaatggatgccccagtgtccgggatgtgtggccagctgctgcaggcaggactccagcgtcaggatgttgccacttggagtatgaacaatgggcacggggttttcagccacagttccctcgaggccagtgttcagcaggatcatgccttctgtgtctggaagaggcggcagaggcaacagtgtttaggatttgggttatcataaggtgttaagagtcccttgttaaaggggcagtgggagttatggggtcatcaaggaccttgcctctctggaatctgtcaacccagttttgggctccaggtggatgggttgctttataaatgtgcctggtgcatgagaaactcttgtttcagctcttggcctttacccatgactcagcctgggggctggtgccggccttgcctgcagcaatgtagctgaggactggtctgaaggccaggagccctgtgctcttgacatcactgtactccctctccctccccgcaaccctgccccaccttgcatccagggtatggtgtaaataaacctgtgttgccatggc

SEQ ID NO: 302 - DNA, 6369 bp, Homo sapiens
  source 1..6369: mol_type = unassigned DNA
atttggagtcaggcctggctgttgctcaggtgaccagcttgtgtctctgggagggcgctgctttccccggccacccggcgcgatgatccagaatgtcggaaatcacctgcgacggggcttggcctctgtgttctccaaccgcacatcccggaagtcagccttacgtgcggggaacgacagtgccatggcagacggcgagggataccggaaccccacggaggtgcagatgagccagctggtgctgccctgccacaccaaccaacgtggtgagctgagcgtcgggcagctgctcaagtggattgacaccacggcttgcctgtccgcggagaggcacgctggctgcccctgtgtcacagcttccatggatgacatctattttgagcacaccattagtgttggacaagtggtgaatatcaaggccaaggtgaaccgggccttcaactccagcatggaggtgggcatccaggtggcctcggaggacctgtgctctgagaagcagtggaatgtgtgcaaggccttggccaccttcgtggcccgccgagagatcaccaaggtgaagctgaagcagatcacgccgcggacagaagaggagaagatggagcacagtgtggcggctgagcgccggcgcatgcgccttgtctatgcagacaccatcaaggacctcctggccaactgcgccattcagggcgatctggagagcagagactgtagccgcatggtgccggctgagaagacccgtgtggagagtgtggagctggtcctgcctccccacgccaatcaccagggcaacacctttgggggccagatcatggcctggatggagaatgtggccaccattgcagccagccggctctgccgtgcccaccctacgctgaaggccattgaaatgttccacttccgaggcccgtcccaggtcggcgaccgtctggtgctcaaagccatcgtgaacaatgccttcaaacatagcatggaggtgggcgtgtgcgtggaggcctatcgccaggaggctgagacccaccggcgccacatcaacagtgcctttatgacctttgtggtcctggacgcagatgaccagccccagttgctgccctggattcggccccagcccggcgatggtgagcggcggtaccgagaggccagtgccagaaagaagatccgcctggacaggaagtacatcgtgtcctgtaagcagacagaggtgcccctctccgtcccctgggaccctagcaaccaggtgtacctgagctacaataacgtctcctccttgaagatgcttgtggccaaggacaactgggtgctgtcctcggagatcagtcaggtccgcctgtacactctggaggatgacaagttcctctccttccacatggagatggtggtgcatgtggatgcagcccaggccttcctgctgctctcggacctgcgtcagaggccagagtgggacaagcactaccggagcgtggagctagtgcagcaggtagacgaggacgacgccatctaccacgtcaccagccctgccctcggaggtcacacaaagccccaggacttcgtgatcctggcctcgaggcggaagccttgtgacaatggggacccctatgtcatcgcgctgaggtcggtcacgctgcccacacaccgagagacgccagagtacagacgcggagagaccctctgctcaggcttctgcctctggcgcgagggggaccagctgaccaagtgctgctgggttagggtctccctgactgagctggtctcggcaagtggcttctattcctgggggctcgaatccaggtcaaagggtcgcaggagcgacggttggaatggaaaactagctggaggacacctgagtactcttaaagcaatccccgtggccaaaatcaacagccgatttggataccttcaagacacctgaaaccttatcatgagccagatgccaaggaagagactctgggaggatccagaggaccccctggttgcagccacgtagagactgacgctgaggaggactccaactatcatgagcaacacccgtcgaacacagccaccccgctaagaacagatcaagaagctgtcacagatggcggaagaaaacctgaggaaagcgggacaaccagtcacaatgaataatttaatggtagctatgatagcagttatcaccactgccgtgagtattccttcaataagggctggtaataatgcctggatgcaatcattctatgacacagttacacatgctttctgatctcagtatttaccataataaatcggctcctataattgaggcataccaccctcaaaaacctatttgtaaacaggattggacccagttagaaaaaatgaacgtacttatttaggaagattgctttgcagaataggcagagatgctgcacaacgattcctatggaatcattactaattggtcccccaaggggatgtttagcttgaattgcacctctcagtctgcatgccacggtcacactatgttcagatgatctgaacaaaacagtcagatggtagaaatgttaagtacggcaaaagttcctattatctggaaccatggcggtatagtggcacctcaacctcaaataatatggcccgctctaggagctaaacataaggatttgtaaaaactattaaatgctcttaataagatcaaaatttgggaaagaataaaagagtatctagaaggacactctacaaacttgtttttggatatagcaaaattaaaagaacaaatatgtaaagcatcccgggcaacctgaccttaatgccaggaaccagagtgcttaaaggagctgcagaaaaattagcagctagtaacccatttaaatgggtaaaaacacttggaagctctgtgatttcaatgatgactatgctttttaatctgttgtttgcctttgtatagtctgcagatgcggatcccgactcctgcgagagtctctttgcaaatcgaagaagggagacatgttgggagcaagccccccagagtctggccataaactggccccaaaactggccataagcaaaacctctgcagcactaaaacatgtccataatggccctaacgcccaatctggaaggttgtgggtttatgggaatgagagcaaggaacacctggcctgcccagggcggaaaaccgcttaaaggcattcttaagccacaaacaaaagcatgagcgatctgtgtcttacgggtgtgttcctgctgcaattaattcagcccatccctttgtttcccataagggatacttttagttaatttaatatctatagaaacaatgctaatgactggtttgctgttaaatgaaggggtgggttgcccctccacacctgtgggtgtttctcgttaggtggaacgagagacttggaaaagagacacagagacaaagtatagagaaagaaaagtgggcccaggggaccagcattcagcatacagaggatccacactggcaccggcctctgagttcccttagtatttattgatcattatcgagcatggcaggataataggataatagtggagagaaggtcagaaggtaaacacatgaacaaaggtctctgcatcataaacaaggtaaagaattaagtgctgtgctttagatatgtatacacataaacatctcaatgccttaaagagcagtattgctgcccgcatgtcatacctacagccctaaggcggttttcccctatctcagtagatggaagtatattccatgtaaagtaaatcggctttacacccagacattccattgcccagagacgagcaggagacagaagccttcctcttatctcaactgcaaagaggtgttccttcctcttttactaatcctcctcagcacagaccctttatgggtgtcgggctgggggatggtcaggtctttcccttcccacgaggccatatttcagactatcacatggggagaaaccttggacaatacctggctttcctaggcagaggtccctgcggcctttgcagtattttgcgtctctgggtacttgagattagggagtggtttgagattagggagtggtgatgactcttaaggagcatgctgccttcaagcatttgtttaacaaagcacatcttgcacagcccttaatccatttaaccctgagttgacacagcacatgtttcagggagcacagggttgggggtaaggttacagattaacggcatctcaaggcagaagaatttttcttaatacagaacaaaatggagtctcctatgtctacttctttctacacagacacagtaacaatctgatctctcttttccccacagttaataaatatgtgggtaaatctctgttgggggctctcagctctgaaggctgtgagacccctgattttctacttcacacctctatatttttgtgtgtgtgtctttaattcctctagcgctgctgagttagtgaccgagctggtctcggcagaggtgggcgggtcttttgagttcaggagttcaagagcagcctggccaacatggtgaaaccccttctctactaaaaatatgaaaattatccgggcatggtggtgtgcctctgtactttcagctactcaggaagctgaggcacaagaattgctggaacatgggaggtggaggctgcagtgagctgagatcatgccactgcactccagcccaggcaatagagtaagactctgtctcaaaacaaaaagagttttaggccaggtgtggtggctcacgcctgtaatcccagcactttgggaggctgaggtgggcagatcacctgaggtcaggagttcgagaccagtctggccaacatggcgaaaccccatctctctctactaaaaatacaaaatttagccaggtgtggtggtgggtgcctgtaatcacagctgcttgggaggctgaggcaggagaattggttgaacccaggaggcagaggttacagtgagcagagatcgtgccactgcattccagccggggtaagagagcgagactctgcctcaaaaaaagaaggcttagtgtgcaactcatcagagttgcacagggcagagaaagaatgggaaaaaaacaatttctagaaaacttttcgaattttctgatcaacaccaaatattccaaataggaaaaatacaaaaaaatccatacctatatgtggcataatatgattgtagagcaccaaagtaaaagatcttattttttattaaaattaaaaaaaaattaaaatagagggtctcactatgctgcccaggctggtcttgaactcctggcttcaagctatcctcccaccatggcatcctaaagtgctgggattgcaggcatgagctgctgcatctggcccaaagtaaaagatcttagaagcggccagaaaaaatagatttgggctgggcatgaatagattgatcaccaaaaaggtggcagactaacttctcgacagaatccacagaagccagaaggcagtggaacattagctttgatgtactaaaataaaataccacgctaggctcctacatacagtgaaaatgttttgagaatgagaattataattttttggcaaacaaaactaaaggagtttacaactaagaaactcttttgtgagacagccttgctctgttgcccaggctggagtgcagtgacgaaatctcagctcactgcaacctcggcctcccgggttcaggcaattcttgtgtctcagccttccaagtagctgggattacagatgtgcgccaccaggcccagctactttttatatttttagtggagatggggtttcactgtgttggccaggctggtctcaaactcctgacttcaagtgatctgcccgccttggcctgctaaagtgctgggattacaggcatgagcgactgtgcctctccagtccctgtgtttttttttgtttttggaggttttatttgtttgtttttagagacactttcactgtgttgcccaggcctgtctgttggcctcaagtgatcctcctgccttggatctcccaaagtgctgggattacaggtgtgaaccactgtgctcagcccattttttatttgtttcttgaaggaaggtagcagtattaattaattttggactttgctcactaaagtttgaatgttaagaatagatgtatacagtctggatgcagtggtgcatgcttgtaattttagcactttgggaggctgaagcgggaggatcgcttgggctcaagagtttgagaccagcctgggcaacatggtgaaaccttgtctctacaaaaaaattttaaaaaattagccagacatgatggcatgcacctataatcccagctacttgggaggctgaggtgggaggattgcttgagtccagggaggtcgaggctgcagtgagccatgatcacaccactgcactccagcctgggtgacagagtgatactgtctc

SEQ ID NO: 303 - DNA, 515 bp, Homo sapiens
  source 1..515: mol_type = unassigned DNA
gagagcagagactgtagccgcatggtgccggctgagaagacccgtgtggagagtgtggagctggtcctgcctccccacgccaatcaccagggcaacacctttgggggccagatcatggcctggatggagaatgtggccaccattgcagccagccggctctgccgtgcccaccctacgctgaaggccattgaaatgttccacttccgaggcccgtcccaggtcggcgaccgtctggtgctcaaagccatcgtgaacaatgccttcaaacataggtgagggtctgggatgggtgcggccacgtccattcagggctgagggctcttcctgaccctagaaaggaccctacttcaaactgtccaggagccctttgccctgcagacagggtctaaatccctgcctggctgatgggttcctctgaaattcagctctgattttcccttcttgggagccttccctggctcccagtcctgcccacccctggctgggtcagggacccctcctctgggatcccccag

SEQ ID NO: 304 - DNA, 1403 bp, Homo sapiens
  source 1..1403: mol_type = unassigned DNA
gccagacacctgcgcccttctgcagccgcccgccgcatccgccgccgcagcccccagcatgtcgggcccagacgtcgagacgccgtccgccatccagatctgccggatcatgcggccagatgatgccaacgtggccggcaatgtccacggggggaccatcctgaagatgatcgaggaggcaggcgccatcatcagcacccggcattgcaacagccagaacggggagcgctgtgtggccgccctggctcgtgtcgagcgcaccgacttcctgtctcccatgtgcatcggtgaggtggcgcatgtcagcgcggagatcacctacacctccaagcactctgtggaggtgcaggtcaacgtgatgtccgaaaacatcctcacaggtgccaaaaagctgaccaataaggccaccctgtggtatgtgcccctgtcgctgaagaatgtggacaaggtcctcgaggtgcctcctgttgtgtattcccggcaggagcaggaggaggagggccggaagcggtatgaagcccagaagctggagcgcatggagaccaagtggaggaacggggacatcgtccagccagtcctcaacccagagccgaacactgtcagctacagccagtccagcttgatccacctggtggggccttcagactgcaccctgcacggctttgtgcacggaggtgtgaccatgaagctcatggatgaggtcgccgggatcgtggctgcacgccactgcaagaccaacatcgtcacagcttccgtggacgccattaattttcatgacaagatcagaaaaggctgcgtcatcaccatctcgggacgcatgaccttcacgagcaataagtccatggagatcgaggtgttggtggacgccgaccctgttgtggacagctctcagaagcgctaccgggccgccagtgccttcttcacctacgtgtcgctgagccaggaaggcaggtcgctgcctgtgccccagctggtgcccgagaccgaggacgagaagaagcgctttgaggaaggcaaagggcggtacctgcagatgaaggcgaagcgacagggccacgcggagcctcagccctagactccctcctcctgccactggtgcctcgagtagccatggcaacgggcccagtgtccagtcacttagaagttccccccttggccaaaaacccaattcacattgagagctggtgttgtctgaagttttcgtatcacagtgttaacctgtactctctcctgcaaacctacacaccaaagctttatttatatcattccagtatcaatgctacacagtgttgtcccgagcgccgggaggcgttgggcagaaaccctcgggaatgcttccgagcacgctgtagggtatgggaagaacccagcaccactaataaagctgctgcttggctggaccc

SEQ ID NO: 305 - DNA, 1813 bp, Homo sapiens
  source 1..1813: mol_type = unassigned DNA
aggatgcaggcttggacctgctggagtccttgctggcctgtgaccttcctcccctgtctacatttcagggagctctagaaggcggcagtggggccagacctggctttggctgagaccctggagaaagactagggggtcttgtgccctgtcagagaaggcagagcctcatagccgcttccctgaggccgctcagcagcggcccctctgccttcctgatctcctggcatggcagccagaagagctcacagaattacttcttctgtaattatttataaagcaaggtttccatgacgaccggtttctggtagacgctctggattggcgaggcagcctcttcctggccagattgggcagctcaggaagctgggggtggggggtgctccccaccaagcccggtgtggcagggagctgggacagtcctgggtcaggcaaggactctgtgatgcttccctgctccctcgcctttctctgcatctgatcctgggatgtcctagccaccatggctttccagctgagcaggatcatgcggccagatgatgccaacgtggccggcaatgtccacggggggaccatcctgaagatgatcgaggaggcaggcgccatcatcagcacccggcattgcaacagccagaacggggagcgctgtgtggccgccctggctcgtgtcgagcgcaccgacttcctgtctcccatgtgcatcggtgaggtggcgcatgtcagcgcggagatcacctacacctccaagcactctgtggaggtgcaggtcaacgtgatgtccgaaaacatcctcacaggtgccaaaaagctgaccaataaggccaccctgtggtatgtgcccctgtcgctgaagaatgtggacaaggtcctcgaggtgcctcctgttgtgtattcccggcaggagcaggaggaggagggccggaagcggtatgaagcccagaagctggagcgcatggagaccaagtggaggaacggggacatcgtccagccagtcctcaacccagagccgaacactgtcagctacagccagtccagcttgatccacctggtggggccttcagactgcaccctgcacggctttgtgcacggaggtgtgaccatgaagctcatggatgaggtcgccgggatcgtggctgcacgccactgcaagaccaacatcgtcacagcttccgtggacgccattaattttcatgacaagatcagaaaaggctgcgtcatcaccatctcgggacgcatgaccttcacgagcaataagtccatggagatcgaggtgttggtggacgccgaccctgttgtggacagctctcagaagcgctaccgggccgccagtgccttcttcacctacgtgtcgctgagccaggaaggcaggtcgctgcctgtgccccagctggtgcccgagaccgaggacgagaagaagcgctttgaggaaggcaaagggcggtacctgcagatgaaggcgaagcgacagggccacgcggagcctcagccctagactccctcctcctgccactggtgcctcgagtagccatggcaacgggcccagtgtccagtcacttagaagttccccccttggccaaaaacccaattcacattgagagctggtgttgtctgaagttttcgtatcacagtgttaacctgtactctctcctgcaaacctacacaccaaagctttatttatatcattccagtatcaatgctacacagtgttgtcccgagcgccgggaggcgttgggcagaaaccctcgggaatgcttccgagcacgctgtagggtatgggaagaacccagcaccactaataaagctgctgcttggctgg

SEQ ID NO: 306 - DNA, 1432 bp, Homo sapiens
  source 1..1432: mol_type = unassigned DNA
gagttccatttggctgcagcttctggagggagccgacaggagacgtggggagacgatgctcctgcttcggagaagcttgtcactaaacgtcctcagaaaggaagtcgacagggcctgttttggggagaaggccaaacagatcatgcggccagatgatgccaacgtggccggcaatgtccacggggggaccatcctgaagatgatcgaggaggcaggcgccatcatcagcacccggcattgcaacagccagaacggggagcgctgtgtggccgccctggctcgtgtcgagcgcaccgacttcctgtctcccatgtgcatcggtgaggtggcgcatgtcagcgcggagatcacctacacctccaagcactctgtggaggtgcaggtcaacgtgatgtccgaaaacatcctcacaggtgccaaaaagctgaccaataaggccaccctgtggtatgtgcccctgtcgctgaagaatgtggacaaggtcctcgaggtgcctcctgttgtgtattcccggcaggagcaggaggaggagggccggaagcggtatgaagcccagaagctggagcgcatggagaccaagtggaggaacggggacatcgtccagccagtcctcaacccagagccgaacactgtcagctacagccagtccagcttgatccacctggtggggccttcagactgcaccctgcacggctttgtgcacggaggtgtgaccatgaagctcatggatgaggtcgccgggatcgtggctgcacgccactgcaagaccaacatcgtcacagcttccgtggacgccattaattttcatgacaagatcagaaaaggctgcgtcatcaccatctcgggacgcatgaccttcacgagcaataagtccatggagatcgaggtgttggtggacgccgaccctgttgtggacagctctcagaagcgctaccgggccgccagtgccttcttcacctacgtgtcgctgagccaggaaggcaggtcgctgcctgtgccccagctggtgcccgagaccgaggacgagaagaagcgctttgaggaaggcaaagggcggtacctgcagatgaaggcgaagcgacagggccacgcggagcctcagccctagactccctcctcctgccactggtgcctcgagtagccatggcaacgggcccagtgtccagtcacttagaagttccccccttggccaaaaacccaattcacattgagagctggtgttgtctgaagttttcgtatcacagtgttaacctgtactctctcctgcaaacctacacaccaaagctttatttatatcattccagtatcaatgctacacagtgttgtcccgagcgccgggaggcgttgggcagaaaccctcgggaatgcttccgagcacgctgtagggtatgggaagaacccagcaccactaataaagctgctgcttggctgg

SEQ ID NO: 307 - DNA, 1614 bp, Homo sapiens
  source 1..1614: mol_type = unassigned DNA
cggtcctaggaggagcaggagcctggtgctttctatcagggagggatcacaccggctcactgctgagccggccaggcagacacaggcttgggctctgctgggcatcatacttgtcactgggtaaacagtttgcccacttaccgcaggatgaagctgcttgccagggctctccggctctgtgagtttgggaggcaggcatcttccaggaggctggtggctggccagggatgtgtggggccccggcgagggtgctgcgctcccgtccaggtggttgggcccagggctgatctcccaccctgtggagcctgcattactggaaggatcatgcggccagatgatgccaacgtggccggcaatgtccacggggggaccatcctgaagatgatcgaggaggcaggcgccatcatcagcacccggcattgcaacagccagaacggggagcgctgtgtggccgccctggctcgtgtcgagcgcaccgacttcctgtctcccatgtgcatcggtgaggtggcgcatgtcagcgcggagatcacctacacctccaagcactctgtggaggtgcaggtcaacgtgatgtccgaaaacatcctcacaggtgccaaaaagctgaccaataaggccaccctgtggtatgtgcccctgtcgctgaagaatgtggacaaggtcctcgaggtgcctcctgttgtgtattcccggcaggagcaggaggaggagggccggaagcggtatgaagcccagaagctggagcgcatggagaccaagtggaggaacggggacatcgtccagccagtcctcaacccagagccgaacactgtcagctacagccagtccagcttgatccacctggtggggccttcagactgcaccctgcacggctttgtgcacggaggtgtgaccatgaagctcatggatgaggtcgccgggatcgtggctgcacgccactgcaagaccaacatcgtcacagcttccgtggacgccattaattttcatgacaagatcagaaaaggctgcgtcatcaccatctcgggacgcatgaccttcacgagcaataagtccatggagatcgaggtgttggtggacgccgaccctgttgtggacagctctcagaagcgctaccgggccgccagtgccttcttcacctacgtgtcgctgagccaggaaggcaggtcgctgcctgtgccccagctggtgcccgagaccgaggacgagaagaagcgctttgaggaaggcaaagggcggtacctgcagatgaaggcgaagcgacagggccacgcggagcctcagccctagactccctcctcctgccactggtgcctcgagtagccatggcaacgggcccagtgtccagtcacttagaagttccccccttggccaaaaacccaattcacattgagagctggtgttgtctgaagttttcgtatcacagtgttaacctgtactctctcctgcaaacctacacaccaaagctttatttatatcattccagtatcaatgctacacagtgttgtcccgagcgccgggaggcgttgggcagaaaccctcgggaatgcttccgagcacgctgtagggtatgggaagaacccagcaccactaataaagctgctgcttggctgg

SEQ ID NO: 308 - DNA, 1472 bp, Homo sapiens
  source 1..1472: mol_type = unassigned DNA
gccagacacctgcgcccttctgcagccgcccgccgcatccgccgccgcagcccccagcatgtcgggcccagacgtcgagacgccgtccgccatccagatctgccggatcatgcggccagatgatgccaacgtggccggcaatgtccacggggggaccatcctgaagatgatcgaggaggcaggcgccatcatcagcacccggcattgcaacagccagaacggggagcgctgtgtggccgccctggctcgtgtcgagcgcaccgacttcctgtctcccatgtgcatcggtgaggtggcgcatgtcagcgcggagatcacctacacctccaagcactctgtggaggtgcaggtcaacgtgatgtccgaaaacatcctcacaggtgccaaaaagctgaccaataaggccaccctgtggtatgtgcccctgtcgctgaagaatgtggacaaggtcctcgaggtgcctcctgttgtgtattcccggcaggagcaggaggaggagggccggaagcggtatgaagcccagaagctggagcgcatggagaccaagtggaggaacggggacatcgtccagccagtcctcaacccagagccgaacactgtcagctacagccagtccagcttgatccacctggtggggccttcagactgcaccctgcacggctttgtgcacggaggtgtgaccatgaagctcatggatgaggtcgccgggatcgtggctgcacgccactgcaagaccaacatcgtcacagcttccgtggacgccattaattttcatgacaagatcagaaaagctcacgtaatgcctgctggcgctgaccacacagctccttcctcctctcccagcactggcacgaagtgctccctgctgcgtcatcaccatctcgggacgcatgaccttcacgagcaataagtccatggagatcgaggtgttggtggacgccgaccctgttgtggacagctctcagaagcgctaccgggccgccagtgccttcttcacctacgtgtcgctgagccaggaaggcaggtcgctgcctgtgccccagctggtgcccgagaccgaggacgagaagaagcgctttgaggaaggcaaagggcggtacctgcagatgaaggcgaagcgacagggccacgcggagcctcagccctagactccctcctcctgccactggtgcctcgagtagccatggcaacgggcccagtgtccagtcacttagaagttccccccttggccaaaaacccaattcacattgagagctggtgttgtctgaagttttcgtatcacagtgttaacctgtactctctcctgcaaacctacacaccaaagctttatttatatcattccagtatcaatgctacacagtgttgtcccgagcgccgggaggcgttgggcagaaaccctcgggaatgcttccgagcacgctgtagggtatgggaagaacccagcaccactaataaagctgctgcttggctgg

SEQ ID NO: 309 - DNA, 1564 bp, Homo sapiens
  source 1..1564: mol_type = unassigned DNA
gccagacacctgcgcccttctgcagccgcccgccgcatccgccgccgcagcccccagcatgtcgggcccagacgtcgagacgccgtccgccatccagatctgccggatcatgcggccagatgatgccaacgtggccggcaatgtccacggggggaccatcctgaagatgatcgaggaggcaggcgccatcatcagcacccggcattgcaacagccagaacggggagcgctgtgtggccgccctggctcgtgtcgagcgcaccgacttcctgtctcccatgtgcatcggtgaggtggcgcatgtcagcgcggagatcacctacacctccaagcactctgtggaggtgcaggtcaacgtgatgtccgaaaacatcctcacaggtgccaaaaagctgaccaataaggccaccctgtggtatgtgcccctgtcgctgaagaatgtggacaaggtcctcgaggtgcctcctgttgtgtattcccggcaggagcaggaggaggagggccggaagcggtatgaagcccagaagctggagcgcatggagaccaagtggaggaacggggacatcgtccagccagtcctcaacccagagccgaacactgtcagctacagccagtccagcttgatccacctggtggggccttcagactgcaccctgcacggctttgtgcacggaggtgtgaccatgaagctcatggatgaggtcgccgggatcgtggctgcacgccactgcaagaccaacatcgtcacagcttccgtggacgccattaattttcatgacaagatcagaaaagctccttagctggggcctgacccatggcctgccctcctcccggggtgcgtcttgtgactgcgggcgctttgcatgggactctgtaccttacagctcacgtaatgcctgctggcgctgaccacacagctccttcctcctctcccagcactggcacgaagtgctccctgctgcgtcatcaccatctcgggacgcatgaccttcacgagcaataagtccatggagatcgaggtgttggtggacgccgaccctgttgtggacagctctcagaagcgctaccgggccgccagtgccttcttcacctacgtgtcgctgagccaggaaggcaggtcgctgcctgtgccccagctggtgcccgagaccgaggacgagaagaagcgctttgaggaaggcaaagggcggtacctgcagatgaaggcgaagcgacagggccacgcggagcctcagccctagactccctcctcctgccactggtgcctcgagtagccatggcaacgggcccagtgtccagtcacttagaagttccccccttggccaaaaacccaattcacattgagagctggtgttgtctgaagttttcgtatcacagtgttaacctgtactctctcctgcaaacctacacaccaaagctttatttatatcattccagtatcaatgctacacagtgttgtcccgagcgccgggaggcgttgggcagaaaccctcgggaatgcttccgagcacgctgtagggtatgggaagaacccagcaccactaataaagctgctgcttggctgg

SEQ ID NO: 310 - DNA, 2429 bp, Homo sapiens
  source 1..2429: mol_type = unassigned DNA
gccggagttgcgtgggttttaatttaaagatgtaagtacaaatctatgtgcattgtagaaaattcggaaaaggtccaactgcctagcaagtaaaaagctgtcattccagcacgtggggggtgaccgcttctcccttcttgggtgttttttggtggattttttttggtgaccccgactggcctagactccattcaagggcacatcttgtgcagtaaaacacgcatgtttcagggctcctcactgcaacacgtgcacctccaggctggcgctcagcgctcccagtaaaagctgcaggcggcggtgtagatagtcgccggcctttcctcctccccacctcgtgacgctttgtgctgcggaagcaaaggcccgttccattccccgtgtcttcccagcagccgccaccaatgctcctttctaggaaacagccttccattctctcttagggccgatcttagcgagagccgcgatgcgggcgactggtgccggggtgggttgggggcgggggtgggaatcaggccccactgccaggagcccgggccgcgccttccgctctgacctcatccggccgcccaggcactgggcgcggcagcgaatcggcggcgcgggcggccgggaacgcccagcacaaatatttaccgccgcgcggagagtgagggcccaagtccgccctgctccgccacttaggccgccccagacgcttccctcggggctgccaccgggtcgggcgcggctgccgcggctagcgggccttccccgcaccggcgcggcccaaccgccaccgaaccttctggaagcggcggctgcctgggcccccacgccgccagaatcgtacgcccgcgcgagctctctgcagccttggcggcctgggaggcggggctcggggtggggccggcgcgggggcggggtcggcgcggggaggccgcgttcgattgcccccggcgcgcaggccccgcctcaccagccccatcgctccacctctgccctccccctttatggcgcggcccgggctcattcattccgcgccgggcctgccagacacctgcgcccttctgcagccgcccgccgcatccgccgccgcagcccccagcatgtcgggcccagacgtcgagacgccgtccgccatccagatctgccggatcatgcggccagatgatgccaacgtggccggcaatgtccacggggggaccatcctgaagatgatcgaggaggcaggcgccatcatcagcacccggcattgcaacagccagaacggggagcgctgtgtggccgccctggctcgtgtcgagcgcaccgacttcctgtctcccatgtgcatcggtgaggtggcgcatgtcagcgcggagatcacctacacctccaagcactctgtggaggtgcaggtcaacgtgatgtccgaaaacatcctcacaggtgccaaaaagctgaccaataaggccaccctgtggtatgtgcccctgtcgctgaagaatgtggacaaggtcctcgaggtgcctcctgttgtgtattcccggcaggagcaggaggaggagggccggaagcggtatgaagcccagaagctggagcgcatggagaccaagtggaggaacggggacatcgtccagccagtcctcaacccagagccgaacactgtcagctacagccagtccagcttgatccacctggtggggccttcagactgcaccctgcacggctttgtgcacggaggtgtgaccatgaagctcatggatgaggtcgccgggatcgtggctgcacgccactgcaagaccaacatcgtcacagcttccgtggacgccattaattttcatgacaagatcagaaaaggctgcgtcatcaccatctcgggacgcatgaccttcacgagcaataagtccatggagatcgaggtgttggtggacgccgaccctgttgtggacagctctcagaagcgctaccgggccgccagtgccttcttcacctacgtgtcgctgagccaggaaggcaggtcgctgcctgtgccccagctggtgcccgagaccgaggacgagaagaagcgctttgaggaaggcaaagggcggtacctgcagatgaaggcgaagcgacagggccacgcggagcctcagccctagactccctcctcctgccactggtgcctcgagtagccatggcaacgggcccagtgtccagtcacttagaagttccccccttggccaaaaacccaattcacattgagagctggtgttgtctgaagttttcgtatcacagtgttaacctgtactctctcctgcaaacctacacaccaaagctttatttatatcattccagtatcaatgctacacagtgttgtcccgagcgccgggaggcgttgggcagaaaccctcgggaatgcttccgagcacgctgtagggtatgggaagaacccagcaccactaataaagctgctgcttggctgg

SEQ ID NO: 311 - DNA, 868 bp, Homo sapiens
  source 1..868: mol_type = unassigned DNA
tctgatttggggaaagggagaaggggatcatgcggccagatgatgccaacgtggccggcaatgtccacggggggaccatcctgaagatgatcgaggaggcaggcgccatcatcagcacccggcattgcaacagccagaacggggagcgctgtgtggccgccctggctcgtgtcgagcgcaccgacttcctgtctcccatgtgcatcggtgaggtggcgcatgtcagcgcggagatcacctacacctccaagcactctgtggaggtgcaggtcaacgtgatgtccgaaaacatcctcacaggtgccaaaaagctgaccaataaggccaccctgtggtatgtgcccctgtcgctgaagaatgtggacaaggtcctcgaggtgcctcctgttgtgtattcccggcaggagcaggaggaggagggccggaagcggtatgaagcccagaagctggagcgcatggagaccaagtggaggaacggggacatcgtccagccagtcctcaacccagagccgaacactgtcagctacagccagtccagcttgatccacctggtggggccttcagactgcaccctgcacggctttgtgcacggaggtgtgaccatgaagctcatggatgaggtcgccgggatcgtggctgcacgccactgcaagaccaacatcgtcacagcttccgtggacgccattaattttcatgacaagatcagaaaaggctgcgtcatcaccatctcgggacgcatgaccttcacgagcaataagtccatggagatcgaggtgttggtggacgccgaccctgttgtggacagctctcagaagcgctaccgggccgccagtgccttcttcacctacgtgtcgctgagccaggaagg

SEQ ID NO: 312 - DNA, 748 bp, Homo sapiens
  source 1..748: mol_type = unassigned DNA
gctctgtacaagtttctgttgaacatgtatttcttctgggtatctgcctaggagtggaattgctaggttatacggtccctctgtgtttatcctcttgcgaaacttcaaactgtttccaaagtacctgcacctttggctcccactggcagtggaggagggttccagtttcccccacatcctcgccagcacgtgctgttctgtgacttcaggattgcagccatcccagttgatattgtaacaaaacttgcccagcagggtgagatatctgtagaggacaggaaaagggctgttttgttagtggcttggcatatcagccatggtcgtttttttcaaaatctcctgaggaagccccatgtagcgcgtgagccacagcacgtgcggccgagcaccctgcacccctgctggctgcggcccttgctggtggctagtgggaggggagggctcgagttgtaacttgtttccagggtgtgaaataatctcctctgcctccgtgtctcatctgccgcatgtccctttctccgcaggtgtgaccatgaagctcatggatgaggtcgccgggatcgtggctgcacgccactgcaagaccaacatcgtcacagcttccgtggacgccattaattttcatgacaagatcagaaaagctcacgtaatgcctgctggcgctgaccacacagctccttcctcctctcccagcactggcacgaagtgctccctgctgcgtcatcaccatctcgggacgcatgacctt

SEQ ID NO: 313 - DNA, 1804 bp, Homo sapiens
  source 1..1804: mol_type = unassigned DNA
caaatatttaccgccgcgcggagagtgagggcccaagtccgccctgctccgccacttaggccgccccagacgcttccctcggggctgccaccgggtcgggcgcggctgccgcggctagcgggccttccccgcaccggcgcggcccaaccgccaccgaaccttctggaagcggcggctgcctgggcccccacgccgccagaatcgtacgcccgcgcgagctctctgcagccttggcggcctgggaggcggggctcggggtggggccggcgcgggggcggggtcggcgcggggaggccgcgttcgattgcccccggcgcgcaggccccgcctcaccagccccatcgctccacctctgccctccccctttatggcgcggcccgggctcattcattccgcgccgggcctgccagacacctgcgcccttctgcagccgcccgccgcatccgccgccgcagcccccagcatgtcgggcccagacgtcgagacgccgtccgccatccagatctgccggatcatgcggccagatgatgccaacgtggccggcaatgtccacggggggaccatcctgaagatgatcgaggaggcaggcgccatcatcagcacccggcattgcaacagccagaacggggagcgctgtgtggccgccctggctcgtgtcgagcgcaccgacttcctgtctcccatgtgcatcggtgaggtggcgcatgtcagcgcggagatcacctacacctccaagcactctgtggaggtgcaggtcaacgtgatgtccgaaaacatcctcacaggtgccaaaaagctgaccaataaggccaccctgtggtatgtgcccctgtcgctgaagaatgtggacaaggtcctcgaggtgcctcctgttgtgtattcccggcaggagcaggaggaggagggccggaagcggtatgaagcccagaagctggagcgcatggagaccaagtggaggaacggggacatcgtccagccagtcctcaacccagagccgaacactgtcagctacagccagtccagcttgatccacctggtggggccttcagactgcaccctgcacggctttgtgcacggaggtgtgaccatgaagctcatggatgaggtcgccgggatcgtggctgcacgccactgcaagaccaacatcgtcacagcttccgtggacgccattaattttcatgacaagatcagaaaaggctgcgtcatcaccatctcgggacgcatgaccttcacgagcaataagtccatggagatcgaggtgttggtggacgccgaccctgttgtggacagctctcagaagcgctaccgggccgccagtgccttcttcacctacgtgtcgctgagccaggaaggcaggtcgctgcctgtgccccagctggtgcccgagaccgaggacgagaagaagcgctttgaggaaggcaaagggcggtacctgcagatgaaggcgaagcgacagggccacgcggagcctcagccctagactccctcctcctgccactggtgcctcgagtagccatggcaacgggcccagtgtccagtcacttagaagttccccccttggccaaaaacccaattcacattgagagctggtgttgtctgaagttttcgtatcacagtgttaacctgtactctctcctgcaaacctacacaccaaagctttatttatatcattccagtatcaatgctacacagtgttgtcccgagcgccgggaggcgttgggcagaaaccctcgggaatgcttccgagcacgctgtagggtatgggaagaacccagcaccactaataaagctgctgcttggctgg

SEQ ID NO: 314 - DNA, 6357 bp, Homo sapiens
  source 1..6357: mol_type = unassigned DNA
aaaccacaaagaaaaggaaagttttaattctgagaaacttcactgaggagcaattttttttgagcttctaaaaatagagaggaaatgagcctctttgggtcactctagttgccgcctcccctgccccatgcccacccccactgctcactcaaggctagcctctctcagtgggtgactgagctgtcttcagtggaagcccgaggcagatgccacgcaattctggagctggatacggctgcccacacggggaccccagcatgctggacagcagagagaccccacaggagagccggcaggacatgattgtgaggaccacccaagaaaaattgaaaaccagctcactgactgacaggcagccactctccaaagagtccctgaaccatgctctcgagctctcagtgccagagaaggtgaataatgcccagtgggatgctccagaggaggcgctgtggacgactcgggccgatgggcgggtgcgcctgcgcatagaccccagctgcccacagcttccctacactgtgcatcggatgttctacgaggccctggataagtatggggacctcatcgctttgggcttcaagcgccaggacaagtgggaacacatctcctactcccaatactacctgctcgcccgcagagccgccaagggcttcctgaagctcggcctgaagcaggcccacagtgtggccatcctcggcttcaactccccggagtggttcttctcggcagtgggcacagtatttgcaggtggcatcgtcactggcatctacaccaccagctccccagaggcctgccagtacatcgcttatgactgctgcgccaatgtcatcatggtcgacacgcagaagcagctggaaaagatcctgaagatctggaaacagttgccacatctaaaggcagtcgtgatatataaagaacctcctccaaacaagatggccaatgtgtacacgatggaggaattcatggagctggggaatgaagtgcctgaggaagccctggacgccatcattgacacccagcagcccaaccagtgctgtgtgctagtctacacttccggcaccactgggaaccccaagggcgtgatgctgagtcaagacaatatcacgtggacggcacggtacggcagccaggccggtgacatccggccggcagaagtccagcaggaggtggtagtcagctacctgcccctcagccatattgccgcccagatctacgacctgtggacaggcatccagtggggggcccaggtttgctttgccgaacccgacgccctgaaggggagcctggtgaacacgctgcgggaggtggagcccacatcacacatgggggtgccccgggtatgggagaagatcatggagcgcatccaggaggtggcggctcagtctggcttcatccggcgaaagatgctgctgtgggccatgtcggtgaccttggagcagaacctcacctgccccggcagcgacctgaagcccttcacaaccagactggcagattacctggtgctagccaaggttcgccaggcactgggatttgccaagtgtcaaaagaacttctatggagcggcccccatgatggcagagacacagcacttcttcctgggtctcaacatccgcttgtatgcgggctacggcctcagtgagacctcaggcccccacttcatgtccagtccctacaactaccggctgtacagctcaggcaagttggtgcccggctgtcgggtgaagctggtgaaccaggacgcagagggcattggcgagatctgcctgtggggccgcaccatattcatgggctacctgaacatggaggacaagacttgtgaggccatcgacgaggaaggctggctgcacacgggtgatgctggccgcctggacgccgatggcttcctctacatcactgggcgcctcaaagaattaatcatcacagctggtggggagaatgtgccccctgtgcccatcgaggaggccgtgaagatggagctgcccatcatcagcaacgccatgctcattggggaccagaggaagttcctgtccatgctgctcaccttgaagtgcactctggacccagacacctctgaccagactgataatctgactgaacaagctatggagttctgccagagggtgggcagcagagccaccacagtgtccgagatcatagagaagaaggatgaggccgtgtaccaggccatcgaagaggggatccggagggtcaacatgaacgcggcggcccggccctaccacatccagaagtgggccattctcgagagagacttctccatttcgggtggagagttgggtcccacgatgaaactgaaacggctcacagttttggagaagtacaaaggtatcattgactccttttaccaagagcaaaaaatgtaatcagggcctatgcctgcagtttctatagaatagagggcaggcgttccgagcctcttcctgagccccaggtctcttcagtctgggcacaggcatttctgccaagtctgttagatctccaggtcagggcacagcactggctctacatttaccaggtcttacgccaacaatagctgacaattccaagaagcttcacgtgtgggtagttttaattcagtttaagtattgctttttgttcaggtgacaaatgagatcagctctccttccagaacgaaagggctgataatttttggccttagttccaggtagattaaaaagctgctagctcacatacaggacagccagcagtaggctgtggagcgggtaggagagagatggctgatactgctcacgtgcgctgcaggaaaagcaatcagtcacaactcacctagcgacctgacttactctggaatcttggcgggcatcgccgaccctattattccattaccaggcactccgccacccacatgccaactgacttgatgcttaataaaactgctgctgcctgtttgattctatttaatgtataatttgaatattaaaccttttaacagaactgtcaacaaggacctgattttttttgtcaattgagcaggtgggaccagtgcagagagtagtgggcatttaactcacaggactgtgcacagcgggcatgcgagtgaccattagtgccctggaataaacaaaggtgcaggatggggtcaagtggcgcattctcataaaagcagccagctctacgttagcctgtcgccaccagaccaccccacttccattctgaatacgggaagcagccattctcagtagcaagctgagccaaaatgaccgaaggcatctgaacaggaaacaggtagagaaagcaaacatctcagttttggaattctttattactttgaacccaagagccactgataactggcacaatccaatgaaacagaggaagcagcagcttaaacaaaggaaaatacatttaagattataagtctgggggggcggttacaagcttaaaaagtgacccagacagggatatcattgctaaaaaaaaaaaaatccccttgtgacctgggtacattttgcaaagccacaggtttgcaatgttacacaagggccaaaggaggccatgagttgtctttggttgtggggacagagggtaactgttcatgaaaatagtgagtgtctgaagattaagaaaatcatgctgcagcagaggagaagggagaggaagacaggaagggaaaggagatgcctgagggtcaaaagctgagcccaagcctaagcccaagctcaagctcaagccccagcatggcataattttgtgaattaactcaggctgagttgcctccagtctttggaatgtcatcttatactggtactgctgaggcagagggcagtaattggtgctttgggataggagaaggggcagttgctgaaatacaaaattaatagcatcccaagttcctcaattgcagccaaaatacatgtgttcgggcctttcggcagtatcgcccccagaactacctgctgtagtgtggtccattcccagacagcaacatgcaagaataagtttacaatacactcagcccttctggcttcagatcaggggctcagaggctgtgacaactcatgatgctgaaaatgtatccagtgaaaatgaagtactagctctctgcttcattaaaagctcttggaaagaatattaaatctcaagacaacaaaataattgaacacacaatacatttgtgtctttgtatccaatatattacctttgtcttattaacaaaaattatatctctcattatatatttcttggatctgaagtttttattcacactcagtaatttctgtaaaggacaaatctgtctctattttccatatcatttagaaatataccacattcactctttttgatgtgaactttcccaggaaaattctcttgtgcccatttagttttagaagagtgtcattttgtgctattatgtcaatatcctgttttatttccattatgtttttcaaaaaccgaagaaaataaggtttttcttaaaaagttagacattttctcttgttaattctgtatcctgttatttacagctgaagagaaactattttaacttaagtgtaaaatggtttagaatagcaaatgatacagtccactcagagtttacaaaaaaaacatttaccaggtagacacttaataaataaaacaagcacttggaaaaagttctttgaaaacagacctagggacatccacctgcatcttttgcacagattttgttaagaaaaggccagatctaaaaatgtactgtcaagaaacaagcaaaccaatgcatacatacgtaggtattctaaacagaggttcatgtggtgtccatttagagtgactgatgtaaatgccagttgtagaagtgttaatctaaatcttttactcggcgacagatttcctctgtgaagtctgagcattttgcattgcctcccaaatcttttgtcaagctctgagaaaaggaaaaagcaaaaataaaagatgtatccgcaaactaaactaaaccaaggagattttaaagccctcagtgagatgccacctgggcaagttactcggctgctctttcatttagttcctcatttcaaagtgaggaaccactccaccaccatctacccagcccaggaggatcgggatccaatctcatagtgtatacaacagcactctgcaaagaataaggtgctcttgatgcaaagggaggcagggagctttaccaaaattttccctttgttcacacaatagaccctaacccagattagttggtcatggatatttaaataaaagcgaatctaaataagaagtttcataaaaatccttgggaaatatgtctcaggaatagacctgagacatattttgatctatttttgtttttattattattttttttttagatggagtctcactctgttgcccaggctggagtgcagtggcacgatcccagctcaccacaacctctgcctcctgggttcaagcgattctcctgcctcagcgtcctgaatagctggaattacaagtgcatgccaccatacccaactaatttttgtatctgatctatttttggaggctgggacacaaatacgaaagaaatatttaaatcattaactcttttttttttttttaagagacggggtctcactatgtggcccaggctggtcttgaactcagaggctaaggtgatcctcctgcctcagcctatagctgcaactacaggcatgcaccaccacacctgcctaaatcattaactcttaaacctccctctttaggaaagaaagcctcccatacaactgatctgttctaccagcttatcctttctttcctgcatacagaccccaatatatttaattctctttatctttccatcctacacaataaaagggcccactatgtaattcaggcacctctctactgggctgtagattataacttcccaaatataactttaaagaataagaaaatcatatgacctccaatgtgactatcaggctgttaaaaacaagcctgaatttcttgtattttggccacacgatataatttcaaattacagaatttttttaaaagaagggaccaactttgaagatattacgctaagtgaaataagccagactcaaaggacaaatactgtatgattccacttacatgaggtacctagagtagtcaaattcatagagacaggaagcagaatggcaggtgtcagaggatgggagggggaagggaaagttactgtttaacgggtgcagagtctcagtttgagaaaatgaaactggtctggagatgactgatggtgatggttacattacaatgtgaatgtacttaacattattgaactgtatacctaaatacggctaaaatggcaaattttatgttatgcatatttttcacaatttttgttaaaaaggacctcaaattagg

SEQ ID NO: 315 - DNA, 2257 bp, Homo sapiens
  source 1..2257: mol_type = unassigned DNA
gtcttcagtggaagcccgaggcagatgccacgcaattctggagctggatacggctgcccacacggggaccccagcatgctggacagcagagagaccccacaggagagccggcaggacatgattgtgaggaccacccaagaaaaattgaaaaccagatctggaaacagttgccacatctaaaggcagtcgtgatatataaagaacctcctccaaacaagatggccaatgtgtacacgatggaggaattcatggagctggggaatgaagtgcctgaggaagccctggacgccatcattgacacccagcagcccaaccagtgctgtgtgctagtctacacttccggcaccactgggaaccccaagggcgtgatgctgagtcaagacaatatcacgtggacggcacggtacggcagccaggccggtgacatccggccggcagaagtccagcaggaggtggtagtcagctacctgcccctcagccatattgccgcccagatctacgacctgtggacaggcatccagtggggggcccaggtttgctttgccgaacccgacgccctgaaggggagcctggtgaacacgctgcgggaggtggagcccacatcacacatgggggtgccccgggtatgggagaagatcatggagcgcatccaggaggtggcggctcagtctggcttcatccggcgaaagatgctgctgtgggccatgtcggtgaccttggagcagaacctcacctgccccggcagcgacctgaagcccttcacaaccagactggcagattacctggtgctagccaaggttcgccaggcactgggatttgccaagtgtcaaaagaacttctatggagcggcccccatgatggcagagacacagcacttcttcctgggtctcaacatccgcttgtatgcgggctacggcctcagtgagacctcaggcccccacttcatgtccagtccctacaactaccggctgtacagctcaggcaagttggtgcccggctgtcgggtgaagctggtgaaccaggacgcagagggcattggcgagatctgcctgtggggccgcaccatattcatgggctacctgaacatggaggacaagacttgtgaggccatcgacgaggaaggctggctgcacacgggtgatgctggccgcctggacgccgatggcttcctctacatcactgggcgcctcaaagaattaatcatcacagctggtggggagaatgtgccccctgtgcccatcgaggaggccgtgaagatggagctgcccatcatcagcaacgccatgctcattggggaccagaggaagttcctgtccatgctgctcaccttgaagtgcactctggacccagacacctctgaccagactgataatctgactgaacaagctatggagttctgccagagggtgggcagcagagccaccacagtgtccgagatcatagagaagaaggatgaggccgtgtaccaggccatcgaagaggggatccggagggtcaacatgaacgcggcggcccggccctaccacatccagaagtgggccattctcgagagagacttctccatttcgggtggagagttgggtcccacgatgaaactgaaacggctcacagttttggagaagtacaaaggtatcattgactccttttaccaagagcaaaaaatgtaatcagggcctatgcctgcagtttctatagaatagagggcaggcgttccgagcctcttcctgagccccaggtctcttcagtctgggcacaggcatttctgccaagtctgttagatctccaggtcagggcacagcactggctctacatttaccaggtcttacgccaacaatagctgacaattccaagaagcttcacgtgtgggtagttttaattcagtttaagtattgctttttgttcaggtgacaaatgagatcagctctccttccagaacgaaagggctgataatttttggccttagttccaggtagattaaaaagctgctagctcacatacaggacagccagcagtaggctgtggagcgggtaggagagagatggctgatactgctcacgtgcgctgcaggaaaagcaatcagtcacaactcacctagcgacctgacttactctggaatcttggcgggcatcgccgaccctattattccattaccaggcactccgccacccacatgccaactgacttgatgcttaataaaactgctgctgcctgtttgattctatttaatgtataatttgaatattaaaccttttaacag

SEQ ID NO: 316 - DNA, 2462 bp, Homo sapiens
  source 1..2462: mol_type = unassigned DNA
ggcaacccgctccggtcaccttccacgctgtgaaagctttattcttttgctctttgcaataaatcttgctactgctcagtctttgggtccacgctgcttttatgagctgtaacactcactggaaagtctgcagcttcattcctgaagccagcaagaccgcgagccccccgggggaggaatgaacaactccagagacgccactttaagagctgtaacactcaccgtgaaggtctgcagcttcactcctgagccagcgagaccacgaacccaccagaaggaagaaactccgaacacatccgaacgtcagaaggaacaaactccagacgcgcccccttaagagctgtaacactcaccgcgagggtctgcggcgtcagtcttgaagtcagtgagaccaagaacccaccaattcgggacacatagatctggaaacagttgccacatctaaaggcagtcgtgatatataaagaacctcctccaaacaagatggccaatgtgtacacgatggaggaattcatggagctggggaatgaagtgcctgaggaagccctggacgccatcattgacacccagcagcccaaccagtgctgtgtgctagtctacacttccggcaccactgggaaccccaagggcgtgatgctgagtcaagacaatatcacgtggacggcacggtacggcagccaggccggtgacatccggccggcagaagtccagcaggaggtggtagtcagctacctgcccctcagccatattgccgcccagatctacgacctgtggacaggcatccagtggggggcccaggtttgctttgccgaacccgacgccctgaaggggagcctggtgaacacgctgcgggaggtggagcccacatcacacatgggggtgccccgggtatgggagaagatcatggagcgcatccaggaggtggcggctcagtctggcttcatccggcgaaagatgctgctgtgggccatgtcggtgaccttggagcagaacctcacctgccccggcagcgacctgaagcccttcacaaccagactggcagattacctggtgctagccaaggttcgccaggcactgggatttgccaagtgtcaaaagaacttctatggagcggcccccatgatggcagagacacagcacttcttcctgggtctcaacatccgcttgtatgcgggctacggcctcagtgagacctcaggcccccacttcatgtccagtccctacaactaccggctgtacagctcaggcaagttggtgcccggctgtcgggtgaagctggtgaaccaggacgcagagggcattggcgagatctgcctgtggggccgcaccatattcatgggctacctgaacatggaggacaagacttgtgaggccatcgacgaggaaggctggctgcacacgggtgatgctggccgcctggacgccgatggcttcctctacatcactgggcgcctcaaagaattaatcatcacagctggtggggagaatgtgccccctgtgcccatcgaggaggccgtgaagatggagctgcccatcatcagcaacgccatgctcattggggaccagaggaagttcctgtccatgctgctcaccttgaagtgcactctggacccagacacctctgaccagactgataatctgactgaacaagctatggagttctgccagagggtgggcagcagagccaccacagtgtccgagatcatagagaagaaggatgaggccgtgtaccaggccatcgaagaggggatccggagggtcaacatgaacgcggcggcccggccctaccacatccagaagtgggccattctcgagagagacttctccatttcgggtggagagttgggtcccacgatgaaactgaaacggctcacagttttggagaagtacaaaggtatcattgactccttttaccaagagcaaaaaatgtaatcagggcctatgcctgcagtttctatagaatagagggcaggcgttccgagcctcttcctgagccccaggtctcttcagtctgggcacaggcatttctgccaagtctgttagatctccaggtcagggcacagcactggctctacatttaccaggtcttacgccaacaatagctgacaattccaagaagcttcacgtgtgggtagttttaattcagtttaagtattgctttttgttcaggtgacaaatgagatcagctctccttccagaacgaaagggctgataatttttggccttagttccaggtagattaaaaagctgctagctcacatacaggacagccagcagtaggctgtggagcgggtaggagagagatggctgatactgctcacgtgcgctgcaggaaaagcaatcagtcacaactcacctagcgacctgacttactctggaatcttggcgggcatcgccgaccctattattccattaccaggcactccgccacccacatgccaactgacttgatgcttaataaa

SEQ ID NO: 317 - DNA, 675 bp, Homo sapiens
  source 1..675: mol_type = unassigned DNA
ctgggactggcagaagggggccatggatgagatgtctgagcaggctgagtcgtggatgacaagccgaggagagggaaacttgggtgagcatttgtcgtcggggtgctgccaccagcccccaagcaggtgtgagttgctttggagggcctgccactgcttcttggctcccagaaagggggcatctccagctgtgctgaggcttccgggttgtggttgaggcttgggttgtggttcagctggggcacctggactacattctgtgccgggggcctggccttgcctccccagaattaatcatcacagctggtggggagaatgtgccccctgtgcccatcgaggaggccgtgaagatggagctgcccatcatcagcaacgccatgctcattggggaccagaggaagttcctgtccatgctgctcaccttgaagtgcactctggacccagacacctctgaccagactgataatctgactgaacaagctatggagttctgccagagggtgggcagcagagccaccacagtgtccgagatcatagagaagaaggatgaggccgtgtaccaggccatcgaagaggggatccggagggtcaacatgaacgcggcggcccggccctaccacatccagaagtgggccattctcgagagagacttctccatttcgggtggagagttgg

SEQ ID NO: 318 - DNA, 584 bp, Homo sapiens
  source 1..584: mol_type = unassigned DNA
aaacagtatgtgccacccttgcgtgcaggtgtgtgtgggtgcccgttggagcatgtgtgtgccaccggcatgcctggctggtaagaggggacccctgggccccagatgcccctgacccaacaggcctgcctcttctggtgtgaacaggggagcctggtgaacacgctgcgggaggtggagcccacatcacacatgggggtgccccgggtatgggagaagatcatggagcgcatccaggaggtggcggctcagtctggcttcatccggcgaaagatgctgctgtgggccatgtcggtgaccttggagcagaacctcacctgccccggcagcgacctgaagcccttcacaaccagactggcagattacctggtgctagccaaggttcgccaggcactgggatttgccaagtgtcaaaagaacttctatggagcggcccccatgatggcagagacacagcacttcttcctgggtctcaacatccgcttgtatgcgggctacggcctcagtgagacctcaggcccccacttcatgtccagtccctacaactaccggctgtacagctcaggcaagttggtgcccggctg

SEQ ID NO: 319 - DNA, 1474 bp, Homo sapiens
  source 1..1474: mol_type = unassigned DNA
acccccactgctcactcaaggctagcctctctcagtgggtgactgagctgtcttcagtggaagcccgaggcagatgccacgcaattctggagctggatacggctgcccacacggggaccccagcatgctggacagcagagagaccccacaggagagccggcaggacatgattgtgaggaccacccaagaaaaattgaaaaccagaggaggcgctgtggacgactcgggccgatgggcgggtgcgcctgcgcatagaccccagctgcccacagcttccctacactgtgcatcggatgttctacgaggccctggataagtatggggacctcatcgctttgggcttcaagcgccaggacaagtgggaacacatctcctactcccaatactacctgctcgcccgcagagccgccaagggcttcctgaagctcggcctgaagcaggcccacagtgtggccatcctcggcttcaactccccggagtggttcttctcggcagtgggcacagtatttgcaggtggcatcgtcactggcatctacaccaccagctccccagaggcctgccagtacatcgcttatgactgctgcgccaatgtcatcatggtcgacacgcagaagcagctggaaaagatcctgaagatctggaaacagttgccacatctaaaggcagtcgtgatatataaagaacctcctccaaacaagatggccaatgtgtacacgatggaggaattcatggagctggggaatgaagtgcctgaggaagccctggacgccatcattgacacccagcagcccaaccagtgctgtgtgctagtctacacttccggcaccactgggaaccccaagggcgtgatgctgagtcaagacaatatcacgtggacggcacggtacggcagccaggccggtgacatccggccggcagaagtccagcaggaggtggtagtcagctacctgcccctcagccatattgccgcccagatctacgacctgtggacaggcatccagtggggggcccaggtttgctttgccgaacccgacgccctgaaggggagcctggtgaacacgctgcgggaggtggagcccacatcacacatgggggtgccccgggtatgggagaagatcatggagcgcatccaggaggtggcggctcagtctggcttcatccggcgaaagatgctgctgtgggccatgtcggtgaccttggagcagaacctcacctgccccggcagcgacctgaagcccttcacaaccagactggcagattacctggtgctagccaaggttcgccaggcactgggatttgccaagtgtcaaaagaacttctatggagcggcccccatgatggcagagacacagcacttcttcctgggtctcaacatccgcttgtatgcgggctacggcctcagtgagacctcaggcccccacttcatgtccagtccctacaactaccggctgtacagctgtaagtcccctgtaaa

SEQ ID NO: 320 - DNA, 734 bp, Homo sapiens
  source 1..734: mol_type = unassigned DNA
cagagacctttactaagccgactcacacagggagatggggtactttttagaaggtgacatttctcttactgaaacctgatctatttttcctgtcaatgcagatctggaaacagttgccacatctaaaggcagtcgtgatatataaagaacctcctccaaacaagatggccaatgtgtacacgatggaggaattcatggagctggggaatgaagtgcctgaggaagccctggacgccatcattgacacccagcagcccaaccagtgctgtgtgctagtctacacttccggcaccactgggaaccccaagggcgtgatgctgagtcaagacaatatcacgtggacggcacggtacggcagccaggccggtgacatccggccggcagaagtccagcaggaggtggtagtcagctacctgcccctcagccatattgccgcccagatctacgacctgtggacaggcatccagtggggggcccaggtttgctttgccgaacccgacgccctgaaggggagcctggtgaacacgctgcgggaggtggagcccacatcacacatgggggtgccccgggtatgggagaagatcatggagcgcatccaggaggtggcggctcagtctggcttcatccggcgaaagatgctgctgtgggccatgtcggtgaccttggagcagaacctcacctgccccggcagcgacctgaagcccttcacaaccagactggcagattacctggtg

SEQ ID NO: 321 - DNA, 895 bp, Homo sapiens
  source 1..895: mol_type = unassigned DNA
tagttgccgcctcccctgccccatgcccacccccactgctcactcaaggctagcctctctcagtgggtgactgagctgtcttcagtggaagcccgaggcagatgccacgcaattctggagctggatacggctgcccacacggggaccccagcatgctggacagcagagagaccccacaggagagccggcaggacatgattgtgaggaccacccaagaaaaattgaaaaccagagatggagtcttgctacattgcccaggctggccttgaactcctggcctgaagcgatcttcccaccttggccttccaaagtgctgggatgaacaggctggagccactacacctggcccactactacagccttatactaaatcttgaaatcagaggaggcgctgtggacgactcgggccgatgggcgggtgcgcctgcgcatagaccccagctgcccacagcttccctacactgtgcatcggatgttctacgaggccctggataagtatggggacctcatcgctttgggcttcaagcgccaggacaagtgggaacacatctcctactcccaatactacctgctcgcccgcagagccgccaagggcttcctgaagctcggcctgaagcaggcccacagtgtggccatcctcggcttcaactccccggagtggttcttctcggcagtgggcacagtatttgcaggtggcatcgtcactggcatctacaccaccagctccccagaggcctgccagtacatcgcttatgactgctgcgccaatgtcatcatggtcgacacgcagaagcagctggaaaagatcctgaagatctggaaacagttgccacatctaaaggcagtcgtgatatataaagaacctcctccaaacaagatggccaatgtgtacacg

SEQ ID NO: 322 - DNA, 559 bp, Homo sapiens
  source 1..559: mol_type = unassigned DNA
agatttcttcttcaagaaagctgggaagaagagaggccagagatagagagacagaggaggcgctgtggacgactcgggccgatgggcgggtgcgcctgcgcatagaccccagctgcccacagcttccctacactgtgcatcggatgttctacgaggccctggataagtatggggacctcatcgctttgggcttcaagcgccaggacaagtgggaacacatctcctactcccaatactacctgctcgcccgcagagccgccaagggcttcctgaagctcggcctgaagcaggcccacagtgtggccatcctcggcttcaactccccggagtggttcttctcggcagtgggcacagtatttgcaggtggcatcgtcactggcatctacaccaccagctccccagaggcctgccagtacatcgcttatgactgctgcgccaatgtcatcatggtcgacacgcagaagcagctggaaaagatcctgaagatctggaaacagttgccacatctaaaggcagtcgtgatatataaagaacctcctccaaacaagatggccaatgt

SEQ ID NO: 323 - DNA, 925 bp, Homo sapiens
  source 1..925: mol_type = unassigned DNA
atgccttagctgagggagcagaggggttgctgagccctgtgcctgccaggtgcaagaaggaggaagggcggtccggtggagccgggcctctctggggctgctgtggctctcccggggggactccgtgacatgttctctgaggttctggctctctcctgggcaagctcacagattgcagccaccccccaggcaccatgccagaggtgctcctgctcaggtctgccagctccatcctgaggactgcgttcttaagcagatggctgccaggtgggcctaggtgtgttcacaaacttagttttgttcggaacctgcagtgccgacaaggagtgaggctgaatgtgagaagcagctcactgactgacaggcagccactctccaaagagtccctgaaccatgctctcgagctctcagtgccagagaaggtgaataatgcccagtgggatgctccagaggaggcgctgtggacgactcgggccgatgggcgggtgcgcctgcgcatagaccccagctgcccacagcttccctacactgtgcatcggatgttctacgaggccctggataagtatggggacctcatcgctttgggcttcaagcgccaggacaagtgggaacacatctcctactcccaatactacctgctcgcccgcagagccgccaagggcttcctgaagctcggcctgaagcaggcccacagtgtggccatcctcggcttcaactccccggagtggttcttctcggcagtgggcacagtatttgcaggtggcatcgtcactggcatctacaccaccagctccccagaggcctgccagtacatcgcttatgactgctgcgccaatgtcatcatggtcgacacgcagaagcagctggaaaagatcctgaagatctggaaacagttgccacatctaaaggcagtcgtgatatataa

SEQ ID NO: 324 - DNA, 569 bp, Homo sapiens
  source 1..569: mol_type = unassigned DNA
gtcttcagtggaagcccgaggcagatgccacgcaattctggagctggatacggctgcccacacggggaccccagcatgctggacagcagagagaccccacaggagagccggcaggacatgattgtgaggaccacccaagaaaaattgaaaaccagctcactgactgacaggcagccactctccaaagagtccctgaaccatgctctcgagctctcagtgccagagaaggtgaataatgcccagtgggatgctccagaggaggcgctgtggacgactcgggccgatgggcgggtgcgcctgcgcatagaccccagctgcccacagcttccctacactgtgcatcggatgttctacgaggccctggataagtatggggacctcatcgctttgggcttcaagcgccaggacaagtgggaacacatctcctactcccaatactacctgctcgcccgcagagccgccaagggcttcctgaagcaggcccacagtgtggccatcctcggcttcaactccccggagtggttcttctcggcagtgggcacagtatttgcaggtggcatcgtcactgg

SEQ ID NO: 325 - DNA, 600 bp, Homo sapiens
  source 1..600: mol_type = unassigned DNA
ggcaacccgctccggtcaccttccacgctgtgaaagctttattcttttgctctttgcaataaatcttgctactgctcagtctttgggtccacgctgcttttatgagctgtaacactcactggaaagtctgcagcttcattcctgaagccagcaagaccgcgagccccccgggggaggaatgaacaactccagagacgccactttaagagctgtaacactcaccgtgaaggtctgcagcttcactcctgagccagcgagaccacgaacccaccagaaggaagaaactccgaacacatccgaacgtcagaaggaacaaactccagacgcgcccccttaagagctgtaacactcaccgcgagggtctgcggcgtcagtcttgaagtcagtgagaccaagaacccaccaattcgggacacatagctcactgactgacaggcagccactctccaaagagtccctgaaccatgctctcgagctctcagtgccagagaaggtgaataatgcccagtgggatgctccagaggaggcgctgtggacgactcgggccgatgggcgggtgcgcctgcgcatagaccccagctgcccacagcttccctacac

SEQ ID NO: 326 - DNA, 573 bp, Homo sapiens
  source 1..573: mol_type = unassigned DNA
ggcaacccgctccggtcaccttccacgctgtgaaagctttattcttttgctctttgcaataaatcttgctactgctcagtctttgggtccacgctgcttttatgagctgtaacactcactggaaagtctgcagcttcattcctgaagccagcaagaccgcgagccccccgggggaggaatgaacaactccagagacgccactttaagagctgtaacactcaccgtgaaggtctgcagcttcactcctgagccagcgagaccacgaacccaccagaaggaagaaactccgaacacatccgaacgtcagaaggaacaaactccagacgcgcccccttaagagctgtaacactcaccgcgagggtctgcggcgtcagtcttgaagtcagtgagaccaagaacccaccaattcgggacacataggttcttaagcagatggctgccaggtgggcctaggtgtgttcacaaacttagttttgttcggaacctgcagtgccgacaaggagtgaggctgaatgtgagaagcagctcactgactgacaggcagccactctccaaagagtccctgaaccatgc

SEQ ID NO: 327 - DNA, 600 bp, Homo sapiens
  source 1..600: mol_type = unassigned DNA
aaatgagcctctttgggtcactctagttgccgcctcccctgccccatgcccacccccactgctcactcaaggctagcctctctcagtgggtgactgagctgtcttcagtggaagcccgaggcagatgccacgcaattctggagctggatacggctgcccacacggggaccccagcatgctggacagcagagagaccccacaggagagccggcaggacatgattgtgaggaccacccaagaaaaattgaaaaccagggccgtggagagaatgggagaagccaacacaaggcactcggcatagtacatgtgcttagtaaggaaccaaaccaaacaaaaagacgagcttctcgcccagccctgggggacccagtggcaggaactgtctcccaaggctctgccaaggatgacggccaaaaaactgcctctcctgccgcccacccttcttatgtaagagccacacaggtgggcaactgggtcccgtgccatataggtcagaggtatctggggctacacctcaacagcagccctagggcaggctggggcgggtccccactcatgcccaaccccactgcctcatcacccggaacctggggcatccac

SEQ ID NO: 328 - DNA, 1130 bp, Homo sapiens
  source 1..1130: mol_type = unassigned DNA
gcatttggggctgaagttccctgtgggaggctgttttctgagggagctgagtgtttacagccactcagccctgctctgctcagctgaagcagaaaacagagaccttttgcattactttggttcaagagcaagacaggaggcgactgcatgagaccatggctgagacacctagtcctccaggcactgaggaactccagggcattctgtgggtctcatgggaagccagcacctctacctgttcctcagaagatcgtggccacctgggaagccatcagcctgggaaggcagctggtgcctgagtacttcaacttcgcccatgatgtgctggatgtgtggagtcggctggaagaggctggacaccgccccccaaatcctgccttctggtgggtcaatggcacaggagcagagatcaagtggagctttgaggagctggggaagcagtccaggaaggcagccaatgtgctggggggtgcatgcggcctgcagcctggggacagaatgatgctggtactcccacggctcccggagtggtggctggtcagtgtggcttgcatgcggacagggactgtgatgattccgggtgtgactcagctgacagagaaggacctcaagtaccggctgcaggcgtccagggccaagtccattatcaccagtgactccctagctccaagggtggatgccatcagtgccgaatgcccctccctccagaccaagctgctggtgtcagacagcagtcggccaggctggttgaacttcagggaactcctccggtgaattggggctctccagaacagcagaaaaatgaagtcatttcccctttaagcaacaaaagatgaaatgcattgctgattccacacatagagagcgaatcagagaggagcactcccattggcagccaggctgacctgagcataatcctggtccctaccttaatgttcaaggtccctcattcagtcagtgctggatttgtcagcagcttttctgtgcttcatttgcttctataatgcggtggtagttattagagctaccattcagagtacatgaaataaccaatatggtgcatttagcacatagcaggtggtcagttaataataaactagtggccatgtattgggtacttagtgtatcgc

SEQ ID NO: 329 - DNA, 2796 bp, Homo sapiens
  source 1..2796: mol_type = unassigned DNA
gcatttggggctgaagttccctgtgggaggctgttttctgagggagctgagtgtttacagccactcagccctgctctgctcagctgaagcagaaaacagagaccttttgcattactttggttcaagagcaagacaggaggcgactgcatgagaccatggctgagacacctagtcctccaggcactgaggaactccagggcattctgtgggtctcatgggaagccagcacctctacctgttcctcagaagatcgtggccacctgggaagccatcagcctgggaaggcagctggtgcctgagtacttcaacttcgcccatgatgtgctggatgtgtggagtcggctggaagaggctggacaccgccccccaaatcctgccttctggtgggtcaatggcacaggagcagagatcaagtggagctttgaggagctggggaagcagtccaggaaggcagccaatgtgctggggggtgcatgcggcctgcagcctggggacagaatgatgctggtactcccacggctcccggagtggtggctggtcagtgtggcttgcatgcggacagggactgtgatgattccgggtgtgactcagctgacagagaaggacctcaagtaccggctgcaggcgtccagggccaagtccattatcaccagtgactccctagctccaagggtggatgccatcagtgccgaatgcccctccctccagaccaagctgctggtgtcagacagcagtcggccaggctggttgaacttcagggaactcctccgggaggcttctacagagcacaactgcatgaggacaaagagtcgagacccgctggccatctactttaccagcggaaccaccggggcccccaagatggtcgagcactcccagagcagctacggactgggttttgtggccagcggaagacggtgggtggccttgaccgaatctgacatcttctggaacacgactgacactggctgggtgaaggcagcctggactctcttctctgcctggcctaatggatcttgcatttttgtgcatgagctgccccgagttgatgccaaagttatcctgaatactctctccaaattcccgataaccaccctctgctgtgtcccaaccatctttcggctgcttgtgcaggaggatctgaccaggtaccagtttcagagcctgaggcactgtctgaccggaggagaggccctcaaccctgacgtgagggagaagtggaaacaccagactggtgtggagctgtacgaaggctatggccagtctgaaacggttgtcatctgtgccaatccaaaaggcatgaaaatcaagtctggatccatggggaaggcgtccccaccctacgatgtgcagattgtggatgatgagggcaacgtcctgcctcctggagaagaggggaatgttgccgtccgtatcagacccactcggcccttctgtttcttcaattgctatttggacaatcctgagaagacagctgcatcagaacaaggggacttttacatcacaggggaccgagctcgcatggacaaggatggctacttttggttcatgggaagaaacgacgatgtgatcaattcttcaagctaccggatcgggcctgttgaagtggaaagtgccctggcagagcatcctgctgtcctggagtcggctgtggtcagcagcccagaccccatcaggggagaggtggtaaaggcatttatagtccttactccagcctactcctctcatgacccagaggcactaacgcgggaactccaggagcatgtgaaaagggtgactgctccatacaaataccccaggaaggtggcctttgtttcagaactgccaaagacggtttctggaaagatccaaaggagtaaattgcgaagtcaggagtgggggaaatgaggtgcaccccaggaaggccccgtagacctccgaagactccacaagaaactaatggatcactggtcagtccccatggggagcatcatctcttcgaccctaaagatgtcaaaggtgtgcagcttccaaacggcatccccaggatcactgggcaatgctggaaagagcaaaagaatatcattggccctgatcacatagatgctgcgccgcctagcaaatgcttggtggttcgacttctccctctgtctgggggcaggctcagcatctgcccactggtctcactaagagctttcagatttccctccataggacaggttaccatagacttggggcacttgtgggtactcattttctgccagtgggaatgtaaaggcttcatcctttgtatgtaaccatttggcaaaagtatgcaggaacataaaataaaatatcctttagctcagaaattctatcttcgggagtcaccacaaaagaaaaaaatcaaaatgcagaaaatgtgtggtgcactaagatgatcacacagcattaaaactaaaaaaaaaaaagaaaaaattaacaattaacatccaaacaacaaggaaatgattaacaaaattgtagtagattaactcaattacatatgatgtagccactaaaatatttgagagcagtttagtatgtcttgggaaaagtgtaagctatattaattttaaaaatcagagcaaaaatattcatactggagaatcccaactctgaaaaataaagggaaaactgtggttaattgtaatcctcctggagattgaggagggagggagagaaaataatggatggtagtttttcttcttcctttttccattacatttctgtattttccaagtttttgtacgaagcacatacaactattttaatgaaaaagttatgttaaagaaagca

SEQ ID NO: 330 - DNA, 856 bp, Homo sapiens
  source 1..856: mol_type = unassigned DNA
gaagttccctgtgggaggctgttttctgagggagctgagtgtttacagccactcagccctgctctgctcagctgaagcagaaaacagagaccttttgcattactttggttcaagagcaagacaggaggcgactgcatgagaccatggctgagacacctagtcctccaggcactgaggaactccagggcattctgtgggtctcatgggaagccagcacctctacctgttcctcagaagatcgtggccacctgggaagccatcagcctgggaaggcagctggtgcctgagtacttcaacttcgcccatgatgtgctggatgtgtggagtcggctggaagaggtgaagcctgttctgtcctagagtccatctggggcatctgaggctgccctcatgtaccacaatgagactcaaggctccaagcatgttgatgaggaaatttggacctgggaattttgctagttctaaaatgtaaactgttggcatttgagacttaggaaaaaattctgagtcagtgttgtgagccttagacatgcttgttccttctctgaagtgtcctgcattcttgagcccaaatcacacagtgagacagttatgtcccttccgattcccttccagttgttcatcaactgaaggaggaagttttgttttgctgctactctgtctttgatgtttttctctcactgtcacgcccttctcttctaaataaggaaagaaggccgggcgcggtggctcatgaccataatcccagcactttgggacaccgagaagggcagatcacctgaggtcaggagttcgagaccaccctcaccaacatggtgaaactccgtctctactaaaaataaaataaaaaaaaatt

SEQ ID NO: 331 - DNA, 771 bp, Homo sapiens
  source 1..771: mol_type = unassigned DNA
tcagtttcctggtctgcaaaagggttataatgatagtacctaccccatgaggtggttgcagattacccaagccagagctttcagcacagcacctcacatgtggtatttatgaaacggtagtcatattgttgttacacatattattggtgctactaactgtttttaccgtggtagtgccacctagtgtatttacgttttacagggaggcttctacagagcacaactgcatgaggacaaagagtcgagacccgctggccatctactttaccagcggaaccaccggggcccccaagatggtcgagcactcccagagcagctacggactgggttttgtggccagcggaagacggtgggtggccttgaccgaatctgacatcttctggaacacgactgacactggctgggtgaaggcagcctggactctcttctctgcctggcctaatggatcttgcatttttgtgcatgagctgccccgagttgatgccaaagttatcctgaatactctctccaaattcccgataaccaccctctgctgtgtcccaaccatctttcggctgcttgtgcaggaggatctgaccaggtaccagtttcagagcctgaggcactgtctgaccggaggagaggccctcaaccctgacgtgagggagaagtggaaacaccagactggtgtggagctgtacgaaggctatggccagtctgaaacggttgtcatctgtgccaatccaaaaggcatgaaaatcaagtctggatccatggggaaggcgtccccac

SEQ ID NO: 332 - DNA, 480 bp, Homo sapiens
  source 1..480: mol_type = unassigned DNA
catattgttgttacacatattattggtgctactaactgtttttaccgtggtagtgccacctagtgtatttacgttttacagggaggcttctacagagcacaactgcatgaggacaaagagtcgagacccgctggccatctactttaccagcggaaccaccggggcccccaagatggtcgagcactcccagagcagctacggactgggttttgtggccagcggaagactctctccaaattcccgataaccaccctctgctgtgtcccaaccatctttcggctgcttgtgcaggaggatctgaccaggtaccagtttcagagcctgaggcactgtctgaccggaggagaggccctcaaccctgacgtgagggagaagtggaaacaccagactggtgtggagctgtacgaaggctatggccagtctgaaacggttgtcatctgtgccaatccaaaaggcatgaaaatcaagtctggatccatg

SEQ ID NO: 333 - DNA, 457 bp, Homo sapiens
  source 1..457: mol_type = unassigned DNA
cacaactgcatgaggacaaagagtcgagacccgctggccatctactttaccagcggaaccaccggggcccccaagatggtcgagcactcccagagcagctacggactgggttttgtggccagcggaagacggtgggtggccttgaccgaatctgacatcttctggaacacgactgacactggctgggtgaaggcagcctggactctcttctctgcctggcctaatggatcttgcatttttgtgcatgagctgccccgagttgatgccaaagttatcctgaatgtaccagtttcagagcctgaggcactgtctgaccggaggagaggccctcaaccctgacgtgagggagaagtggaaacaccagactggtgtggagctgtacgaaggctatggccagtctgaaacggttgtcatctgtgccaatccaaaaggcatgaaaatcaagtctggatccatg

SEQ ID NO: 334 - DNA, 569 bp, Homo sapiens
  source 1..569: mol_type = unassigned DNA
ggggaaggcgtccccaccctacgatgtgcagattgtggatgatgagggcaacgtcctgcctcctggagaagaggggaatgttgccgtccgtatcagacccactcggcccttctgtttcttcaattgctatttggacaatcctgagaagacagctgcatcagaacaaggggacttttacatcacaggggaccgagctcgcatggacaaggatggctacttttggttcatgggaagaaacgacgatgtgatcaattcttcaaggtcaagctgtctgcactttcctccttcctttgaaatttcatgggggttgagggaagcccacttggaagagtttgtttttcccttccagctaccggatcgggcctgttgaagtggaaagtgccctggcagagcatcctgctgtcctggagtcggctgtggtcagcagcccagaccccatcaggggagaggtggtaaaggcatttatagtccttactccagcctactcctctcatgacccagaggcactaacgcgggaactccaggagcatgtgaaaagggtgactgctccatacaaataccccaggaag

SEQ ID NO: 335 - DNA, 4767 bp, Homo sapiens
  source 1..4767: mol_type = unassigned DNA
tttccccttctgtccatggtgtatctggtggggacaccgtccagccccattacagagagtttatgagaaaatgtccagcctcatgtatcctcacgggcttggtcatagcactcaagccagctctgcagccgccacgcgtgtgtgccagagtgtgctctggagtgtgcaggctgtgtgctgcgctgggactctttggacgaatctgacctgtggttcccactgcacagcgacatgctgggggaatgcagaatgagggactagaatggcctttaccaaggccacgctttgtttcgagtctgccagcttcttggtggctgggtctgggaaggggcgggagcacctaggtgttgcaatgccaggtccatccaggcacactgcctggcctggcgtgacctggacacacactgaccccatgccagggcactgctgggcagactggcttctcctgccctgcccagtggcttggggtcaggcttgccctcccgctgggaggccaccctgtgtcacagtgtgtcccagatgtcaccttcctccctgcacttctatgtgccgttattccattatttacttaaatgctctctttaaattgacgcattgcaagattgagaatttgtttcagtgctttacaaacagcattttcagttgccatggaaaggctatgctggtaaggctgggatgtgggagagagctggtagggacccctgcccggtgacatgtccagatgtgatcaggagggtcagagaggacggagacgaggacagtttctcaggtgtgactagggtaacttagtgcccccctgaggttacctcgctctggcaggagcctgggcccctcctctgaggactcctgcatttcacatctctgggctgggggtccacagggcactgacgtgtcctgggatttgaaagccccatctatgtctgagtccagtggctgagccagtactccctggggccactgagaggggtccgggcatggtccactgtgtctggggattcagcagcccctggattgaactccataaagcaagtgcaagatcaaggaaaggacaatggaagtgacctttagacaaacgtttgggcatcacaatcactgtctttcatagggtggcctagccttaggtctgttggggtggtgttggggcatggtctgctgtggacgctgctgcccagggcacgttctgcgtgtgtggagctattgcaagtctggtgttgccaggcttcttaatgtctgccagatgtgtggggataatttgtctatcatgtgtatgatgatgtgcattttcctgatttctaatgaatttgagtatccattctataattatgaagagctgatgaacagctcttggttggctctaaagctgcctgtgaatatcgtatatttgtccccactctctctgttttgcagcagctctgaaaaagggcagcccctggaccttgtctaggacctagacccagcaagcctctggtgctgctggccaggctcttgtctctcttgtctccagtgtcctgagccttgcctgcctcgtcctggctcttaactggctcctccacccatgtggaaggtttcctccctccagctccatcctcagaactcaacagtccaggcccacttctgatcccatatcaacgaccaagatgagaaaaacggtgttctttccctcaaagatctaacagcctagtggggtggcagcagggggactgacagctgttcccacatagcatgtgccataaactagattcatgggtggagtcaggaaaggcttcacagagcaggaggtggctgaactgagtcttgagggatgaataggagttcgccacatggatataggaaggcctttcaggcaaaggctgtaggtctttacagatcatagcttgttcagaaaaccaatcatccattcatgcacttaacaaccatgtgttgagcacctcctgtgttccaggcatggttctagatgctggggacacagcagtgagtgagaaggtctctgaccccatagaggggtcaagagtagaggagagagacagacaaagagcaagaaagatgatcaccaaggaaacgacacagtcagttaggtgctacatgccagggaagaatgggtgaaggtggcatggggctggggcagatgagcagtaggagagccacacatatatagaagcttcgagggagagacagagcacctcacaggccagtggggacgggcaggctatcagggatggcaccgggatgagcaactccttatatggacaacaatcaaattagatccctcttcacagtgtgaactcttcctggaacatgccagggtactgaaaaacgaaagctagtatttatgctataatgtgggctggcccgtgctgcccagcagaactctcagctgcctctcagctgtctgtgttgtccagggtggcagcctctggctgctcatggtgctgaatggcacttgaagtgtggctcatgcagccagggagctgctgatttaattgaactgaaatagctaccctggcccatggcaccatgttgcacacacacccccaaaggctggtggtgcccatttgctgtgcatctgtgcaccttctcatggaagtctcattccatcaaaccacattatgggttatttcacagatgtgtacacagagaggggaggtcccatgtcccaggtcacacgcagccagtcagcattagagctgagatgccaagctctcagccacacatgtgcactcacctggaacatctgtggagctgttagaatcgctgccacttttcatgaaactgaagtgcatctttgggtttgcaactaaagaaaccagctgctacaatgtcactaacataggattcaaaagcccttcggatttctggcagtctgtgcatagcaccctgcctcgggagttggctccttgtctagtatttaatacatccccaaacttggctttattttcagctgcctttgccttcattgtggtgaaagatagtgcgggtgactcagatgtggtggtgcaggagctcaagtccatggtggccaccaagatcgccaaatatgctgtgcctgatgagatcctggtggtgaaacgtcttccaaaaaccaggtctgggaaggtcatgcggcggctcctgaggaagatcatcactagtgaggcccaggagctgggagacactaccaccttggaggaccccagcatcatcgcagagatcctgagtgtctaccagaagtgcaaggacaagcaggctgctgctaagtgagctggcaccttgtggggctcttgggatgggcgggcacccaagccctggcttgtccttcccagaaggtacccctgaggttggcgtcttcctacgtcccagaagcagcccccaccccacacatgacccacaccgccctcacgtgaagctgggctgagagccctttctcccatccattggaggtcccaggagtgtcacccatggagaggctatgcgacatggctagggctggttctgccatctgagtttggtttcctggaatgaaaaggcattgccatctccattcctctgccctcttgagccagcacaggaaggtgaggccctgggatagcgcgcctgctcagataacacagagctagttagctagtagcaaccgtgttttctccagatctgtctagatacaaaggtcagaaatcttatttttatacttttatattgtggaagaacagcatgcaacactcacatgtagtgtgtggatttacttgaacatgttctttttaacatgtagttatgaaaatctccttttttgcctctactggtgaggaaacatgaggatcagaggccacatttttaattattgttagtgtatttggaagtctgaattggagatgtttgtacctctgtctaaacagttcccttgagaacttccaagcctccggcatcttttcctggtgagtgtttctcctgtgcttggttgtgtataatggagctaactcctaagcggtggggtgaatgtggccgccttagttctgaagctactccagttatgttctgtttcttcaagctgtgatccagaaagatttttgtgcccccagatgcctcttgataggagaggcaacatactccaaatagttgggttcttcagggaagctattagaaactcaggtgacttgttagagcactaacttggtcagagccaaatcctggcaaacgctgcctgaccttcactctgtggttggggcggtgagaaccactgaggtccaatgatgagacttggaggtctggatccagtctctctttgttttaatgtgacttaggtgctgtcaacattagcaagataatggaaatcacgacgccagtgggtgcttacctccctgctaggcatgcaggggctggcggttggcaggggaaggaggcccagtgagccgggtcccttaggggagggagagtttgtcctctttgccccacagtctacccttcagggccttgtggcagtgccagtgttcggggggtgtctgggccactgagtacccactcggtcgtggttgtgctggcctcttgggtgagtgaacctgtgaagcccaggaggtggtgttggctgcagggtacacaaatactgagtggtggtcttttgttacaggcttagcaacaaagctgtgccctgggcatggggggctgtagtgtagctacagttgtgcgtttgtgaaatggcttagctttccatgttgctgagaggaacctggacatggtcccgggcatctgaatgatctgtaggggagggagttcaaataaagctttattttgttcattttc

SEQ ID NO: 336 - DNA, 3680 bp, Homo sapiens
  source 1..3680: mol_type = unassigned DNA
ggcccgcggagactccacggggcgccccgggcgtgaggcacccactctgggagcacagagagctcaggtagcctgcctagatggcggcgcgcaccctgggccgcggcgtcgggaggctgctgggcagcctgcgagggctctcggggcagcccgcgcggccgccgtgcggggtgagcgcgccgcgcagggcggcctcgggaccctcgggcagcgctcccgcagttgcagcagcagcagcacagccaggctcgtatcccgcgctgagtgcacaggcagcccgggagccggccgccttctgggggcctctggcgcgggacactctcgtgtgggacaccccctaccacaccgtctgggactgcgacttcagcactggcaagatcggctggttcctgggaggccagttaaatgtctctgtcaactgcttggaccagcatgttcggaagtcccccgagagcgttgctttgatctgggagcgcgatgagcctggaacggaagtgaggatcacctacagggaactactggagaccacgtgccgcctggccaacacgctgaagaggcatggagtccaccgtggggaccgtgttgccatctacatgcccgtgtccccattggctgtggcagcaatgctggcctgtgccaggatcggagctgtccacacagtcatctttgctggcttcagtgcagagtccttggctgggaggatcaatgatgccaagtgcaaggtggttatcaccttcaaccaaggactccggggtgggcgcgtggtggagctgaagaaaatagtggatgaggctgtgaagcactgccccaccgtgcagcatgtcctggtggctcacaggacagacaacaaggtccacatgggggatctggacgtcccgctggagcaggaaatggccaaggaggaccctgtttgcgccccagagagcatgggcagtgaggacatgctcttcatgctgtacacctcagggagcaccggaatgcccaagggcatcgtccatacccaggcaggctacctgctctatgccgccctgactcacaagcttgtgtttgaccaccagccaggtgacatctttggctgtgtggccgacatcggttggattacaggacacagctacgtggtgtatgggcctctctgcaatggtgccaccagcgtcctttttgagagcaccccagtttatcccaatgctggtcggtactgggagacagtagagaggttgaagatcaatcagttctatggcgccccaacggctgtccggctgttgctgaaatacggtgatgcctgggtgaagaagtatgatcgctcctccctgcggaccctggggtcagtgggagagcccatcaactgtgaggcctgggagtggcttcacagggtggtgggggacagcaggtgcacgctggtggacacctggtggcagacagaaacaggtggcatctgcatcgcaccacggccctcggaagaaggggcggaaatcctccctgccatggcgatgaggcccttctttggcatcgtccccgtcctcatggatgagaagggcagcgtcgtggagggcagcaacgtctccggggccctgtgcatctcccaggcctggccgggcatggccaggaccatctatggcgaccaccagcgatttgtggacgcctacttcaaggcctacccaggctattacttcactggagacggggcttaccgaactgagggcggctattaccagatcacagggcggatggatgatgtcatcaacatcagtggccaccggctggggaccgcagagattgaggacgccatcgccgaccaccctgcagtaccagaaagtgctgtcattggctacccccacgacatcaaaggagaagctgcctttgccttcattgtggtgaaagatagtgcgggtgactcagatgtggtggtgcaggagctcaagtccatggtggccaccaagatcgccaaatatgctgtgcctgatgagatcctggtggtgaaacgtcttccaaaaaccaggtctgggaaggtcatgcggcggctcctgaggaagatcatcactagtgaggcccaggagctgggagacactaccaccttggaggaccccagcatcatcgcagagatcctgagtgtctaccagaagtgcaaggacaagcaggctgctgctaagtgagctggcaccttgtggggctcttgggatgggcgggcacccaagccctggcttgtccttcccagaaggtacccctgaggttggcgtcttcctacgtcccagaagcagcccccaccccacacatgacccacaccgccctcacgtgaagctgggctgagagccctttctcccatccattggaggtcccaggagtgtcacccatggagaggctatgcgacatggctagggctggttctgccatctgagtttggtttcctggaatgaaaaggcattgccatctccattcctctgccctcttgagccagcacaggaaggtgaggccctgggatagcgcgcctgctcagataacacagagctagttagctagtagcaaccgtgttttctccagatctgtctagatacaaaggtcagaaatcttatttttatacttttatattgtggaagaacagcatgcaacactcacatgtagtgtgtggatttacttgaacatgttctttttaacatgtagttatgaaaatctccttttttgcctctactggtgaggaaacatgaggatcagaggccacatttttaattattgttagtgtatttggaagtctgaattggagatgtttgtacctctgtctaaacagttcccttgagaacttccaagcctccggcatcttttcctggtgagtgtttctcctgtgcttggttgtgtataatggagctaactcctaagcggtggggtgaatgtggccgccttagttctgaagctactccagttatgttctgtttcttcaagctgtgatccagaaagatttttgtgcccccagatgcctcttgataggagaggcaacatactccaaatagttgggttcttcagggaagctattagaaactcaggtgacttgttagagcactaacttggtcagagccaaatcctggcaaacgctgcctgaccttcactctgtggttggggcggtgagaaccactgaggtccaatgatgagacttggaggtctggatccagtctctctttgttttaatgtgacttaggtgctgtcaacattagcaagataatggaaatcacgacgccagtgggtgcttacctccctgctaggcatgcaggggctggcggttggcaggggaaggaggcccagtgagccgggtcccttaggggagggagagtttgtcctctttgccccacagtctacccttcagggccttgtggcagtgccagtgttcggggggtgtctgggccactgagtacccactcggtcgtggttgtgctggcctcttgggtgagtgaacctgtgaagcccaggaggtggtgttggctgcagggtacacaaatactgagtggtggtcttttgttacaggcttagcaacaaagctgtgccctgggcatggggggctgtagtgtagctacagttgtgcgtttgtgaaatggcttagctttccatgttgctgagaggaacctggacatggtcccgggcatctgaatgatctgtaggggagggagttcaaataaagctttattttgttcattttc

SEQ ID NO: 337 - DNA, 2244 bp, Homo sapiens
  source 1..2244: mol_type = unassigned DNA
aaaaggaaaacgaggcaccgagaagttaaggaacttgctcaaggtcacagagtttgaactcaggctacagatgctgcagcaactggagaaagtcctcatcgccccatatcacccaccaccgacccccagcaggacgtgacccccgccaggacggaggccggcagctggggggctggagcatgggacccagaacacggactcaggcttgcgcagcctcctggcttctaggcgggagcctagaaaggcgccagcccctttcgcgtgctgctgagactccaggggtggggttcactctcaggggcgcacaaaggcatgaaaaccttggcttcagcctctgagatgcggaactgaccgacctattgtcttgggacccaccagtgcgcttgggtgcaccagcccccttaacgttggtgccggctccctcccggctcctccccatcccagagggtcccctcgccccaggccctgagcctgcgtcctggggtcctgggccgcacgtgcctctggcagctcgaagaagctgtcggggcttgcaggagagcgtgcaaactgaaaccaaaacaggccgactcgaggaacatccgggtgggaccgcagactcaccggagcgcagcgcctgggccagggcctgggaccctgctccgccccgcgctcccctgcaccccttccccacgctgctcccctcttcctaagcggccccccctctcccgggcagcagaagaaggggtgggacccgggcgggctccgggagggggccctggaggaatggatggtggcggaagggcggagcaggggcggggcccgcggagactccacggggcgccccgggcgtgaggcacccactctgggagcacagagagctcaggtagcctgcctagatggcggcgcgcaccctgggccgcggcgtcgggaggctgctgggcagcctgcgagggctctcggggcagcccgcgcggccgccgtgcggggtgagcgcgccgcgcagggcggcctcgggaccctcgggcagcgctcccgcagttgcagcagcagcagcacagccaggctcgtatcccgcgctgagtgcacaggcagcccgggagccggccgccttctgggggcctctggcgcgggacactctcgtgtgggacaccccctaccacaccgtctgggactgcgacttcagcactggcaagatcggctggttcctgggaggccagttaaatgtctctgtcaactgcttggaccagcatgttcggaagtcccccgagagcgttgctttgatctgggagcgcgatgagcctggaacggaagtgaggatcacctacagtccctggttgcagatgccgtgtggcccataggccagcagcattcttctgccctggatcctcgggccccactggacaactgagcggccccccaggtggcccctgcacactggagtgtgcttggctctgaagacccaagctgctgcagctgcccctcgccacggtgggcccagctccatctgcctgcgaacaaagccccttctgagaaggaacttgaggctgctgcccctggagtagttcttcagtaaaagatgaaaaccctctgttgggggtcgggggctaaggagctaactggacacctggaggtccggcagggagggcccagccatggcactccccgaagggccagtttctctccatcagtctctcaggtgtgcctggaccctggggcaggcaggttgtgtgccacgccccctcggctggacgctgcccgtgggagcactgagtgtgtgctaagtagcggttcggtctgtgagcggggctggagccctgtggagacgtgtggttaaacataaaccatgtgagaattctcaggaccacagccagcctgtggaagctaaggacagcttcaggtccatgacactgaaatggccctggcaaagtacttattactctgtctctaaaaataaacaggggccggtcgcagtggctcatgccggtaatcccagcactttgggatggtgaggatcacttgaggacggtgggtggatcgcttgaggtcaggagtttgagaccaacctggccaacatggtgaaaccccgtctctactaaaaatacaaaaattagttgggtgtggtgatgtgcgcctgtagtcccagctacttgggaggctgaagcaggagaactgcttgaaactgggaggtggatgttgcagtgagccaagattgtgccactgcactccatcctgggtgacagagtcagactccatctcaaaaat

SEQ ID NO: 338 - DNA, 2438 bp, Homo sapiens
  source 1..2438: mol_type = unassigned DNA
ggcccgcggagactccacggggcgccccgggcgtgaggcacccactctgggagcacagagagctcaggtagcctgcctagatggcggcgcgcaccctgggccgcggcgtcgggaggctgctgggcagcctgcgagggctctcggggcagcccgcgcggccgccgtgcggggtgagcgcgccgcgcagggcggcctcgggaccctcgggcagcgctcccgcagttgcagcagcagcagcacagccaggctcgtatcccgcgctgagtgcacaggcagcccgggagccggccgccttctgggggcctctggcgcgggacactctcgtgtgggacaccccctaccacaccgtctgggactgcgacttcagcactggcaagatcggctggttcctgggaggccagttaaatgtctctgtcaactgcttggaccagcatgttcggaagtcccccgagagcgttgctttgatctgggagcgcgatgagcctggaacggaagtgaggatcacctacagggaactactggagaccacgtgccgcctggccaacacgctgaagaggcatggagtccaccgtggggaccgtgttgccatctacatgcccgtgtccccattggctgtggcagcaatgctggcctgtgccaggatcggagctgtccacacagtcatctttgctggcttcagtgcagagtccttggctgggaggatcaatgatgccaagtgcaaggtggttatcaccttcaaccaaggactccggggtgggcgcgtggtggagctgaagaaaatagtggatgaggctgtgaagcactgccccaccgtgcagcatgtcctggtggctcacaggacagacaacaaggtccacatgggggatctggacgtcccgctggagcaggaaatggccaaggaggaccctgtttgcgccccagagagcatgggcagtgaggacatgctcttcatgctgtacacctcagggagcaccggaatgcccaagggcatcgtccatacccaggcaggctacctgctctatgccgccctgactcacaagcttgtgtttgaccaccagccaggtgacatctttggctgtgtggccgacatcggttggattacaggacacagctacgtggtgtatgggcctctctgcaatggtgccaccagcgtcctttttgagagcaccccagtttatcccaatgctggtcggtactgggagacagtagagaggttgaagatcaatcagttctatggcgccccaacggctgtccggctgttgctgaaatacggtgatgcctgggtgaagaagtatgatcgctcctccctgcggaccctggggtcagtgggagagcccatcaactgtgaggcctgggagtggcttcacagggtggtgggggacagcaggtgcacgctggtggacacctggtggcagacagaaacaggtggcatctgcatcgcaccacggccctcggaagaaggggcggaaatcctccctgccatggcgatgaggcccttctttggcatcgtccccgtcctcatggatgagaagggcagcgtcgtggagggcagcaacgtctccggggccctgtgcatctcccaggcctggccgggcatggccaggaccatctatggcgaccaccagcgatttgtggacgcctacttcaaggcctacccaggctattacttcactggagacggggcttaccgaactgagggcggctattaccagatcacagggcggatggatgatgtcatcaacatactccaaatagttgggttcttcagggaagctattagaaactcaggtgacttgttagagcactaacttggtcagagccaaatcctggcaaacgctgcctgaccttcactctgtggttggggcggtgagaaccactgaggtccaatgatgagacttggaggtctggatccagtctctctttgttttaatgtgacttaggtgctgtcaacattagcaagataatggaaatcacgacgccagtgggtgcttacctccctgctaggcatgcaggggctggcggttggcaggggaaggaggcccagtgagccgggtcccttaggggagggagagtttgtcctctttgccccacagtctacccttcagggccttgtggcagtgccagtgttcggggggtgtctgggccactgagtacccactcggtcgtggttgtgctggcctcttgggtgagtgaacctgtgaagcccaggaggtggtgttggctgcagggtacacaaatactgagtggtggtcttttgttacaggcttagcaacaaagctgtgccctgggcatggggggctgtagtgtagctacagttgtgcgtttgtgaaatggcttagctttccatgttgctgagaggaacctggacatggtcccgggcatctgaatgatctgtaggggagggagttcaaataaagctttattttgttcattttctc

SEQ ID NO: 339 - DNA, 3509 bp, Homo sapiens
  source 1..3509: mol_type = unassigned DNA
agccctttccttgactaccctttgaacagaggagagctatgcaaacacgctgcgagcggccttgagagcccgaggagggtctgctttctgggcccctgcagagggcaggggtcgcgggctggtggtctgccccgcccagagagaaagggccttggcttcccctcattcttcgttctgtgttagctctttttattgcaaataattaattaaagtcagtacagcaagagtgggaaagtggttaatgcaattgccaggtccagattcagagggatgaggcgccgaaaggaaagacaaccttgggatcgcttccacttcctccacttcgcaccgcatggccgggaactactggagaccacgtgccgcctggccaacacgctgaagaggcatggagtccaccgtggggaccgtgttgccatctacatgcccgtgtccccattggctgtggcagcaatgctggcctgtgccaggatcggagctgtccacacagtcatctttgctggcttcagtgcagagtccttggctgggaggatcaatgatgccaagtgcaaggtggttatcaccttcaaccaaggactccggggtgggcgcgtggtggagctgaagaaaatagtggatgaggctgtgaagcactgccccaccgtgcagcatgtcctggtggctcacaggacagacaacaaggtccacatgggggatctggacgtcccgctggagcaggaaatggccaaggaggaccctgtttgcgccccagagagcatgggcagtgaggacatgctcttcatgctgtacacctcagggagcaccggaatgcccaagggcatcgtccatacccaggcaggctacctgctctatgccgccctgactcacaagcttgtgtttgaccaccagccaggtgacatctttggctgtgtggccgacatcggttggattacaggacacagctacgtggtgtatgggcctctctgcaatggtgccaccagcgtcctttttgagagcaccccagtttatcccaatgctggtcggtactgggagacagtagagaggttgaagatcaatcagttctatggcgccccaacggctgtccggctgttgctgaaatacggtgatgcctgggtgaagaagtatgatcgctcctccctgcggaccctggggtcagtgggagagcccatcaactgtgaggcctgggagtggcttcacagggtggtgggggacagcaggtgcacgctggtggacacctggtggcagacagaaacaggtggcatctgcatcgcaccacggccctcggaagaaggggcggaaatcctccctgccatggcgatgaggcccttctttggcatcgtccccgtcctcatggatgagaagggcagcgtcgtggagggcagcaacgtctccggggccctgtgcatctcccaggcctggccgggcatggccaggaccatctatggcgaccaccagcgatttgtggacgcctacttcaaggcctacccaggctattacttcactggagacggggcttaccgaactgagggcggctattaccagatcacagggcggatggatgatgtcatcaacatcagtggccaccggctggggaccgcagagattgaggacgccatcgccgaccaccctgcagtaccagaaagtgctgtcattggctacccccacgacatcaaaggagaagctgcctttgccttcattgtggtgaaagatagtgcgggtgactcagatgtggtggtgcaggagctcaagtccatggtggccaccaagatcgccaaatatgctgtgcctgatgagatcctggtggtgaaacgtcttccaaaaaccaggtctgggaaggtcatgcggcggctcctgaggaagatcatcactagtgaggcccaggagctgggagacactaccaccttggaggaccccagcatcatcgcagagatcctgagtgtctaccagaagtgcaaggacaagcaggctgctgctaagtgagctggcaccttgtggggctcttgggatgggcgggcacccaagccctggcttgtccttcccagaaggtacccctgaggttggcgtcttcctacgtcccagaagcagcccccaccccacacatgacccacaccgccctcacgtgaagctgggctgagagccctttctcccatccattggaggtcccaggagtgtcacccatggagaggctatgcgacatggctagggctggttctgccatctgagtttggtttcctggaatgaaaaggcattgccatctccattcctctgccctcttgagccagcacaggaaggtgaggccctgggatagcgcgcctgctcagataacacagagctagttagctagtagcaaccgtgttttctccagatctgtctagatacaaaggtcagaaatcttatttttatacttttatattgtggaagaacagcatgcaacactcacatgtagtgtgtggatttacttgaacatgttctttttaacatgtagttatgaaaatctccttttttgcctctactggtgaggaaacatgaggatcagaggccacatttttaattattgttagtgtatttggaagtctgaattggagatgtttgtacctctgtctaaacagttcccttgagaacttccaagcctccggcatcttttcctggtgagtgtttctcctgtgcttggttgtgtataatggagctaactcctaagcggtggggtgaatgtggccgccttagttctgaagctactccagttatgttctgtttcttcaagctgtgatccagaaagatttttgtgcccccagatgcctcttgataggagaggcaacatactccaaatagttgggttcttcagggaagctattagaaactcaggtgacttgttagagcactaacttggtcagagccaaatcctggcaaacgctgcctgaccttcactctgtggttggggcggtgagaaccactgaggtccaatgatgagacttggaggtctggatccagtctctctttgttttaatgtgacttaggtgctgtcaacattagcaagataatggaaatcacgacgccagtgggtgcttacctccctgctaggcatgcaggggctggcggttggcaggggaaggaggcccagtgagccgggtcccttaggggagggagagtttgtcctctttgccccacagtctacccttcagggccttgtggcagtgccagtgttcggggggtgtctgggccactgagtacccactcggtcgtggttgtgctggcctcttgggtgagtgaacctgtgaagcccaggaggtggtgttggctgcagggtacacaaatactgagtggtggtcttttgttacaggcttagcaacaaagctgtgccctgggcatggggggctgtagtgtagctacagttgtgcgtttgtgaaatggcttagctttccatgttgctgagaggaacctggacatggtcccgggcatctgaatgatctgtaggggagggagttcaaataaagctttattttgttcattttctc

SEQ ID NO: 340 - DNA, 3833 bp, Homo sapiens
  source 1..3833: mol_type = unassigned DNA
gttactgtactctcagcaggatgttcttttgccttgcccatcgttcagtttaatcctctagaaagaaaatttttagaggtacatcggactaaatcattttcttctgagtacaccatttccaaatggccgcccagggtcctaaatccggcggctgcggagagggactagagggtgtcctcctctgcagagccgtaggactcgagcgccttcatcactggacgctggagccaggaaggaaacccacacactcagggacaggtataaccccacaggggtgcaccagtgaggccccgatcgcagcggaggactccatccctgagcttgtgagggcgtcctggggaggaagcgaacactttccccgttcaagtcagagagcaggactcactgggtggcaggtcagaagttgaattttaacccgacctgcgctttgtccccgcgccttccgcagcctgggcgccgcggtggcaccgagctgggagaggacacgagaggctggcgcgggagaagccgagagttgctatcgaccgggagctgccggcggcgggagcagacgcgaccctcgccgctttcgatctcgaagccgcggagagccgatctcggctgctggggctcggctccccgcgctctgccttgccctttcggcagagggcagctccctgcctgctgcagccccgccactgtgcgcccggcagcccaggggtgcgcccagcccgccccccgagtggccgccgggactccagcagttggaccgaccctcgccctccggcgcctggacaaacttccttcctcccgggcccctgcgccaagcaagctgacaggcggctccctcgccggtctcctctgggctctggccgggcgagcttgctctctgcccctctccaaccccgagcccctggcgcctatagccgtccccgcgcagcggctccaacaaagccagaggaccggagacgacccggcgaggggctgggagtggcagcggggaccccagagccagaaggaggcgtcccctcggcggggcgagtacagtgggaaggggcagcgggaacgtagcggggagagaaaggggaagaaagtgttctgttctcggcgcgaacgccttcctggctcgtcctcgttccccttctcctcctgcctgagcgcgtcccatgtcccgttgggaattggcaggcggggaagggaggaggggagaggggacgcggtggcctggcgagcgagccgctcccttacctctgtccagggtgagcggctggaccactgtcaatgtcgccatgtctgccgtgggagccgaagtgacgctcggcttcagcatcagcaaccgctcgtagtgagaaaaaaaggaggagattgggggcgggggtggagagggaagacggaaaggagggggaggagggggaaggaaggaaggtggtggtggtggagaagaaagcttgggtgggttggtagccagatggagacgcaactgttccgcggcggcagatcttcagttgcggtgcggagctgagcaggtatccgagagcgactgcatcgccgggctctgggagggaaggctctgccctagaactttgctattccacccccaggagcgctgggtgggtgtagctggcgggttgcttcctttcaactttccactctaataaaatggtcagaatatacgtgtgtgcatgcgggtgcgtgtgtgtataaggggaagagagaggatggaaaggggatatggggaagggagtgggagatgagttttctcagattaagagaaattgccaatccaataatcccatcccctttagagagaaaatgcttccattatcagaaatgtttgggatgtaattacatttgcagttaatttctgttgaagtttttcggaatgttgacctataacggcatataaagataactgactaaaggccagcgttccatcagtagatgttcatttaggacctgagtatattgcctggagaaaaaaaaaaaaaaaggcaaacctcttaaaagtgcttcaaaataaaaaacgtgtaggtaagtttctatcgctaagtttttctttttcaagccactgttaatacattaccaattcagtaaatgtagcttagaaacaagtacagtgttcagattttctccgaattttttacataccacatcctgtaaacatgccccactccccctcacccacccagcaacaaaaactttgctcttaatgtccaaactgattttggttgtctatgactacgtttgaaaaatatgtacctagcacttttcatgttgatttctaaccagtggttcagagatgccacttatcgattgattaacatatatgccaggaattgagatagaagagttacattgccttgtgccacgccttgatttaggagttcaatttagtctccgacttcctgtagcctgtaatctagtgggagatggtgttattaaaaacctgactttagagtcagttgatcaggattaaattacgagagccttcaaatactggctgtgacctcttcgccccaataaaaaggctactttcactatcttgtcatagtagggattcatttcctgactacgaaatcaagaaacataaagaaaccttctataagctgaataggggtgactgtgggtgcaggattggaaatgacaaagctgcctccatcttgtttcctgtgacagagctgaattgtttgggctaacaataaactctaaaaggcagatactgttttatagcaaaatatttgcatataattgatgccattttcttctgattacagataggatttctgaaggtctttttcattttatagtctacaattgaattttaaaaaacaacatttcaccaatgtgggaaagccaaagatgattggccatatatagacttaacagaccctaagaacaaacctaaaatagtagttcgatatgtttatttttatttagtatttaagaaagaatgctgatcttgacatttgagtcttagtcatgtactcttcggaagtcacacaatctctcactgatcctgtttcctcctctgtcatacaatggaaataatatcattcaatgtcacagagatctgtcatatgaggaaactaattctaccttgcaatctcacagagttttatgagggtctaatggagtcatacatgtgactgtgctttgaaaacagtaaagaatatacaaatttatttatacaagcatacatcccctggaaccgtgtggtaagctctgtgctaggtgctaaccatgcaaagattaatgagatggccccctttctgcccagtcttgcttgggagacagtgagcaaaccataagcttctgtgcagtactctaagcactattaaaaggaagtgccctcggtggccagaggttgcaaaaacaactttggttttttaccgttattcacatgccctgaattaagcaacagaaagaagttgagatgagcgcaatgataccagagtgtgttacaagcttttgcacaaagttattaaacctcactcggtaactgaggataaaagaacatacaaatcccttgacttctaatgtagttattttacaacatcctttattagggaatatgtatttaagcagcttgattcatcagcccaaaagtcataaattgtacccattccaacacaaatccctgattgtggtgtcagtgaaggtagagttttctttgtctttttgtttcctaatgcatcctcaggactaaacatttcatagcatatttctggacttctgccttgagcttcctatttgaaatttgctctgtcattctttctctgtgttgactctgtagggttgttgttgtttttaaatcaagattaaaagagaaattaaaaggaagcataaatcaccat

SEQ ID NO: 341 - DNA, 534 bp, Homo sapiens
  source 1..534: mol_type = unassigned DNA
aaggtggtggtggtggagaagaaagcttgggtgggttggtagccagatggagacgcaactgttccgcggcggcagatcttcagttgcggtgcggagctgagcagagacagagactgactgtgatgcccaggcttatctctaactcgtggcctcaagcaatcctcttgcctcaggctcccaaagcacttggattaccggataagctgtagacatgtttttaaaggtggatatgtgcctgtaggtttgtggaaggaatgcttaacatttgttacaatgccgttgatcgtcatattgaaaatggtaaaggggataagattgctatcatctatgacagtcctgttacaaacactaaagcaacctttacctataaagaagttctggagcaggtctccaagctggctggtgtcttggtcaagcatggcatcaagaaaggtgacactgtggttatctacatgcctatgatcccacaggcgatgtataccatgttggcatgtgcaaggataggtgccatccacagtctcatatttggaggat

SEQ ID NO: 342 - DNA, 9254 bp, Homo sapiens
  source 1..9254: mol_type = unassigned DNA
ctttctttttacattttcccagtttcctcttttgattcatctttacttacttcctatttttgttttttgtttatttgtttgttttgttttctcattagaaaagccacagaaactccaagcaggcaaattagaagggaggcaatgcaacaagtcctatctgttctctgtctagatcacatgcggagtctggtcagcaggtgaatccgcatcccagtggggtcaccttccctgtgacctgtcaatcaccccaagaagcacttcccaatttgtctggcacaacctccttccactcctcctaccctctcagtggtcaggaaatcccggagcagtccttgccctggagctgcttgtgtttttagtaaccagggactgagctgattttgaaaaatcaatcaatcaataaataacaatcaaagagccttgcctcaacgcaccgagttgctggtttcctgcaggtcagaggcgatgccacctccaccaacgaccttccaaagattaaaccagccgtgtacaaactgctggattgaaaattgagagatgggccgttggcctcctcctaggagtacttgtgtgttgaaatcggaaggacgttctggagtttgagcgcgatttttcccggaaggctgcggggttggaagtgcatgttggggtttggatctcgtgcagcagcgcaactaacctgctgcaacggcgctgtgacacccctgtcccggggcccccactttagcctgttgcttctctggtcgctccaggtcggtttttcccggcgactctagtgtggcttccaaacttctgggctctgggctcacttcggaatttgcccccgccccctactcccttccctcaggccccaggaagttgcaagagtaccatttgtcgcacactcggggaccgcgggtggccggaggagatgaaaccgtcttggctgcagtgtcgtaaagtcaccagcgccggggggctcggagggcccttgcctgggtcctctccggcccggggagccggtgcggccctcagggctttagtggtcccgggcccgcggggcggtctcgggggccggggatgcagggcactgtcctccggcagtggcagcgagtacaagacccacttcgcagcctcggtgaccgaccccgagaggttctggggcaaagctgccgagcagatcagctggtacaagccctggaccaaaacgctggagaacaaacactcgccctctaccaggtggtttgtggaaggaatgcttaacatttgttacaatgccgttgatcgtcatattgaaaatggtaaaggggataagattgctatcatctatgacagtcctgttacaaacactaaagcaacctttacctataaagaagttctggagcaggtctccaagctggctggtgtcttggtcaagcatggcatcaagaaaggtgacactgtggttatctacatgcctatgatcccacaggcgatgtataccatgttggcatgtgcaaggataggtgccatccacagtctcatatttggaggatttgcttccaaagaactaagtagtcgcattgatcatgtaaagcccaaggtggttgttacagcatcatttggcattgaacctggaaggagggtagagtacgtaccacttgtagaagaagcgctaaaaataggacaacacaaaccagacaaaattctcatttataatcgtccaaatatggaggcggttcctttggctcccggtcgtgaccttgattgggatgaagagatggcaaaagcccagtcacatgactgtgttcctgttctttcagaacacccactgtatattctttacacatctggcacaacggggttacctaagggtgtgattaggcccactgggggatacgctgtcatgctacactggtcaatgtcttccatatacggacttcaacccggagaggtgtggtgggcagcttctgacttaggctgggttgttggacattcctatatctgctatggacctcttcttcatgggaacacaacagttttatatgaggggaagcctgtgggaacaccagatgctggcgcttatttccgtgtgcttgcagagcatggagtagctgccttgtttacagcaccaactgcaattagagcaatccgtcaacaggaccctggggcagctttggggaagcagtactctctgacaaggttcaaaacattatttgtggctggagaacgatgtgatgtagagaccctggaatggtccaaaaatgtcttcagagtacctgtcttagaccattggtggcaaactgagactggatctccaattactgcgtcatgtgttggattaggcaattctaaaacacctccaccagggcaagcaggaaaaagcgtcccaggatacaatgttatgattttggatgacaacatgcaaaaactgaaggctcggtgtttaggaaatattgtggtaaagttaccattgccacctggggctttttcaggactctggaagaatcaggaagcattcaagcatttatactttgaaaaatttcctggatattatgataccatggatgctggttacatggatgaagaaggctatttgtatgttatgtctcgagtggatgatgtaataaatgttgcaggtcacagaatttctgcaggcgccattgaagagtcaatcctttcccatggtaccgtggcagactgtgctgttgttggcaaggaagatcccttaaaaggtcatgtccccttagcactctgtgtattgagaaaagatataaatgcaacagaggagcaagttttggaagaaattgtgaaacacgttagacagaacattggccctgtggctgcttttcgaaatgcagtgtttgtcaaacagctacccaaaaccagatctggcaagatcccccgatcagctttatctgccattgtcaatggcaagccatacaagataacttctacaattgaagaccccagcatttttggccacgtagaagaaatgctgaagcaagcataatgagtttgtcttattcctattttgagttgatttaatttcttaattgaaattaaattatttgagttgtttctcagaaataaatatttcagtagaaattacttgcaaaatgaaatgtgaattgtaaaacttggcctaaacaaatctaatgaaaacatgtgaaagacctgtgccttttttttggtttgaccctgttagcattgttattagttatctataacatggcttattgaatgtcatctactgctttaggaaaaacgtatctagtgtattatttttaaaattgtacctcccaagaagaacactttaattgaaagcaacactaatatagagccacttcctgaaaccaagaatctgtagttttgatccaaaatctaaaacttaaagtcagaaaataattaaaatttttcttgtagaaattttagatattttctagtattctttagatgctcacattgttttaaataaaatagatgaaatgggaagtttaggtaatcatctagacagatgaaattattatctaggtaggagggcttttctatacattttctgagggaaagcagaacaccggggttatagctataccttcaggtcttttgttacttaggcaaggaaaaccacatgtctgacctggttcagcatgtaatccgagcactttgggaggctgaggcaggcggatcacttgaggtcagcagtttgagacgagcctggccaacatggtgaaaccctgtagctactgaaaatacaaaaataagccaggcgtggtggcgggaggctgaggcaaggagaatcacttgaatacaagaggcagaggttgcagtgagccaagttcccccactgtactccagcctgggtgacagagtaagactccatctcaaaacaacaaaaacaacaaaaaaaccacatgcctggcggagaacaaagagatcatttagtccaatctcttcatggagatgagggctcctgggagcccctcttcatgtctcaggttcttagttgactatgtttatccaaatgattccagattcctgtggaaacaaggaatcgatgtacaaatggggtagggtggcaaggaaaactcttaagagagaaacatcaaggttttcacattaggttaaagacaagaaggtttctaggcaggtagtgtaatgtctaggtgattttgaagtgaacttaagccactaggtttgagggacaaaggacagtagaaaatggtgaagactgcagatcacctgctatacctcaaggagcagcggacccagcagaatatggcccaaaaaggaggcaggtctcctgttgcaagagcctctgtttttttaaagagaaaacaaagaatcctggtttttatgtgaaatctctaattttaaaataataactcattaaaaatattgtaatgtccaaaagtatctttccatttaacttctaaaaatctcttaaatgttttttttaaataattgtaaagtgagtttttgttaagcttataggaatgggccagttaactaaggtagacagatgtaggaaattaaatatttgatttacttagggatctatatgacatcagttatcaaagaatacattttaacccaaaagtataccatgctcattgtatctttgatcgttcttcaagtatttctcaatcttttaatctatcaggaacattactatcaagagcagattgttgtaacataatactcaggatacatgaaatgtatgtgagagataaatagataatagaaagtttattgttataaaaatgacctacaacttatataaaaaaattctgaaaatgttgactttttttggactgaagactgcaaaataaatggcttctcaaagtaaattcctatttacttaaattgccttcttgattgttacacctggaaaaatatattcatctactttttccttttaattatgttagtagactgaattaaaccagctacatagacactctctcatttgaagctgttgggatccttgagttgcctctttcattggtacgttttatccattgtcacaactgtggtcttcattaataactcattttaatgtcttaggagtagaatgtgtttccttattttttttcaaataagagtcagttaatttgaaatggcaaattatttacctgaatgtgtatcattgttcatttgcaaggtttaagctcaggcagatccaataattaggtaaaggttgcatctttggtcctcttgcacattttttctggtaatcaaatctgaagcgacatctcagcaagcagacttgggttattttccactaggatgggaatggaaaacagtgctggagactggggaagtggctatttcctgtgtctcactggggaattgcaagatcaaagaatgttgttacttttatgtgatgaaaaaatagggcaagaaagatatacctgaatcatcagactgcttaaaatttgggaggaaaaaattctattttactactaaccataaatcacttttgctagatagtactttaaagattctgaattaaatgtatctttaaaaacaacaatataatattactaaaaaatgcagacatacttaaacttgctagaataaattctgtgaggtcttcgtttggtattttcataggatttcttactgttaagttattggaaaatgaaaatataaagtgctttcagaagttatagtattttccaattcattgaattactttgcttgtgaaaatatattaaacatatttaaatgagacctatcctacatttaaaaaccagttttgtttatataaaattgtatttgaaaggtcctgaacattaaaaatgtgaaaatttataatgttgatgatcaaaagtaacgtgttgagactctgagcttaatccattaaatggattttagaatctagtagaagttatctttcttataaattaaaacatattttatgcttcttttttgagggaaatacctggatcttttgcatcactatatgttagtgtctattatagatgattaatctttctaacttgatctttaaaagaaagaaattgattttagtgattgagtgttatataatagtagatacaaatctagttatggcattataatgtcgtagttcctatattctatttcatttctatgaatcaagatgcccatgtttagatgagcttagaaagctacttctcattgttcctactcaggccacatttttagaaaaaaattttaagatcactcccataagcaagtttagatctccctcttgtggcagactcaattttgaagctaaatatttgggtcacccaaagaacacatttcctgatagtttaagtaaattgtcgagccttatgtgactagaaaacaaagcttaaacagagaactggaattattattttttttattgacaatggaaagggtttctgttatcattaccttttgactgaatctgttaaataaaaatagacatcaaaacaaatgtaatgtacgtgcaaacatagcaaattaaaatacagaaaagaaattactaatgacaggtcttgcgcttaataagatcaagcagcagaaaatcagcagttagataaatggtattattaaataggctttactttgaatctcccatataaacaaagaataaacaacagtaacaccaccaaataaagccacagggaagagattactcttctatacttttatacactatatatgttaatcattctgtctttcatttatttcctctgataaaactgacttcagggaagtcgcaacaaggccatctcggctaaaagcttataacattagacatgagtctggctaatgccctgttacattgacaaaagggaaaggtatcttgggtttcgttttctctagtggaaatgagcctcagactctgcggtggttgacattcactgtccagtactggctggcatttcaagatatttgaatgaacatgtggttcttagtaaagaagtttttttatctttttttttttcttggtccacaggtaacaagagaagattatggttttttaatataaatttttaaataattgcttttgacccttgtaaacagcttggctttgttttgtattgaaaaggagatcaagccatcacagtgctatttctaaagatataggacatccctgattgcctttaaagctctatttttggctccggttccaggttaaatcattcttttttacatgatcagaggcaggttgttcagctttaagtattgacagacttgaaggagaaacacgttgaagcatgaaacatgcttcaaggaaacatattgatttgactattaacaatccaaaaactgtaaaaatggtggaatggtaaaatacaaacagtacttggaattgtcaaatgtttgcactcgagactccatgaaccatatattttattttttaaaaaatcatatttatatccatttacataagacttacacatttaaaaagaaatgcacggtaatacataaatgcctagtatattacaataaaacatgaaaaacaactggcttcatttcataaaagcatctgttgtacagagtttatgatgtagatgatgtttattattcaaatgacttaagcattttattacaatttgtagtaaactaatcaaatgtaatatctgactccccccaaaaatcacatttttcagcttttaataagtcatgacgtcattatttccttagaattcagttttcacaaaggttttcactgctcgtcttcttagatggtagtgcactttaggtagagtagactgaaaagacgccatctaaaatatacaatggatagcattagttcactgaaaagtcccagactgggaaatctcattctactcctctgtggtgtacctccacgcagcctgcttactcctgtcctagaagatcatgagaaggaaatcatctaggatgtagccaacagccgtatgtaattaacatttgcttttctccaatttggtgcaggggagcttaacaaataatagaatttgctcaactttgtggaaagtatggcagtaatgtaaacaaaggtagttatgcaaaatgttagcatgccttctgaaaaatttacaacttgctaattaataaattgggttgaattgacctatttcataatgtagatttatattctagttcatatattttagagttcttaaaaaatacctttatttgttacaaaaacataacgataataagtcacctattgtaaacgtttgtgtcagtagtatggcattgctgattgttttcagccataatgtacttagaaaaagctcacaattgctattactgacacaaaagaaacagcaagtagtatgctctggattattttaatatcaaaagtgttgttgtttcacccaaacaaaaaatggttgtcctagattgaattattgtaaatgaatactgttatcccaattaatggtaaaaactaggaaatatgaactagaatgtcatgcacaaaaaacagattgcaaatagagtaactctacccatcacttaagagctaagaagcaagcactattgaacatattaaatagtcatttgtaaattagtgaagtgttcatttcctgaagaaattataatgctatgtgtagaatctaatataaacagtattttgggagacctcttatttagccaaattattatatactttaaatcatgtctaattaggtgccaaattatataccataattaaaattttaatgtaagggttgtacattctgaaattaaatctcttatcgggatgcttttcattttatcagcttcaaatagtgatccaaataaggcagcatatctgctcccatcctaagcccaaaagaccaacaataaattgtgtggcacttttagttcaaggcaatgaaaacagcacaaggtgagttgttcctctgtctataactgttttctcttaaccctgtgcacacattttgttctaaatatcgctcttaaaaagtatttttctaaaatattgattcatcgaaagtggttaaatattttggtaaagcatagttttaggttgaaaaaaaattatgaacatttgacatttataaatctaagaaaccacagttttactattaagactgtttttcaataaaacctcatttttatatggattttaaagtagctttcattaattggtatttccttaaaatcaaatgcttggtatttatggttacataggaaggttttgtgctggtcctattctccattcttaaagtaattttattttgttcctatatgtcttaaatacttaaaatttatatttgtttttagcaagtgtaaatcagattgataagaaacaatgtaataaaggtttgaatttttca

SEQ ID NO: 343 - DNA, 2666 bp, Homo sapiens
  source 1..2666: mol_type = unassigned DNA
ggccccaggaagttgcaagagtaccatttgtcgcacactcggggaccgcgggtggccggaggagatgaaaccgtcttggctgcagtgtcgtaaagtcaccagcgccggggggctcggagggcccttgcctgggtcctctccggcccggggagccggtgcggccctcagggctttagtggtcccgggcccgcggggcggtctcgggggccggggatgcagggcactgtcctccggcagtggcagcgagtacaagacccacttcgcagcctcggtgaccgaccccgagaggttctggggcaaagctgccgagcagatcagctggtacaagccctggaccaaaacgctggagaacaaacactcgccctctaccaggtttgtggaaggaatgcttaacatttgttacaatgccgttgatcgtcatattgaaaatggtaaaggggataagattgctatcatctatgacagtcctgttacaaacactaaagcaacctttacctataaagaagttctggagcaggtctccaagctggctggtgtcttggtcaagcatggcatcaagaaaggtgacactgtggttatctacatgcctatgatcccacaggcgatgtataccatgttggcatgtgcaaggataggtgccatccacagtctcatatttggaggatttgcttccaaagaactaagtagtcgcattgatcatgtaaagcccaaggtggttgttacagcatcatttggcattgaacctggaaggagggtagagtacgtaccacttgtagaagaagcgctaaaaataggacaacacaaaccagacaaaattctcatttataatcgtccaaatatggaggcggttcctttggctcccggtcgtgaccttgattgggatgaagagatggcaaaagcccagtcacatgactgtgttcctgttctttcagaacacccactgtatattctttacacatctggcacaacggggttacctaagggtgtgattaggcccactgggggatacgctgtcatgctacactggtcaatgtcttccatatacggacttcaacccggagaggtgtggtgggcagcttctgacttaggctgggttgttggacattcctatatctgctatggacctcttcttcatgggaacacaacagttttatatgaggggaagcctgtgggaacaccagatgctggcgcttatttccgtgtgcttgcagagcatggagtagctgccttgtttacagcaccaactgcaattagagcaatccgtcaacaggaccctggggcagctttggggaagcagtactctctgacaaggttcaaaacattatttgtggctggagaacgatgtgatgtagagaccctggaatggtccaaaaatgtcttcagagtacctgtcttagaccattggtggcaaactgagactggatctccaattactgcgtcatgtgttggattaggcaattctaaaacacctccaccagggcaagcaggaaaaagcgtcccaggatacaatgttatgattttggatgacaacatgcaaaaactgaaggctcggtgtttaggaaatattgtggtaaagttaccattgccacctggggctttttcaggactctggaagaatcaggaagcattcaagcatttatactttgaaaaatttcctggatattatgataccatggatgctggttacatggatgaagaaggctatttgtatgttatgtctcgagtggatgatgtaataaatgttgcaggtcacagaatttctgcaggcgccattgaagagtcaatcctttcccatggtaccgtggcagactgtgctgttgttggcaaggaagatcccttaaaaggtcatgtccccttagcactctgtgtattgagaaaagatataaatgcaacagaggagcaagttttggaagaaattgtgaaacacgttagacagaacattggccctgtggctgcttttcgaaatgcagtgtttgtcaaacagctacccaaaaccagatctggcaagatcccccgatcagctttatctgccattgtcaatggcaagccatacaagataacttctacaattgaagaccccagcatttttggccacgtagaagaaatgctgaagcaagcataatgagtttgtcttattcctattttgagttgatttaatttcttaattgaaattaaattatttgagttgtttctcagaaataaatatttcagtagaaattacttgcaaaatgaaatgtgaattgtaaaacttggcctaaacaaatctaatgaaaacatgtgaaagacctgtgccttttttttggtttgaccctgttagcattgttattagttatctataacatggcttattgaatgtcatctactgctttaggaaaaacgtatctagtgtattatttttaaaattgtacctcccaagaagaacactttaattgaaagcaacactaatatagagccacttcctgaaaccaagaatctgtagttttgatccaaaatctaaaacttaaagtcagaaaataattaaaatttttcttgtagaaattttagatattttctagtattctttagatgctcacattgttttaaataaaatagatgaaatgggaagtttaggtaatcatctagacagatgaaattattatctaggtaggagggcttttctatacatt

SEQ ID NO: 344 - DNA, 741 bp, Homo sapiens
  source 1..741: mol_type = unassigned DNA
gatttaatggtcttggcataggtctccaagctggctggtgtcttggtcaagcatggcatcaagaaaggtgacactgtggttatctacatgcctatgatcccacaggcgatgtataccatgttggcatgtgcaaggataggtgccatccacagtctcatatttggaggatttgcttccaaagaactaagtagtcgcattgatcatgtaaagcccaaggtggttgttacagcatcatttggcattgaacctggaaggagggtagagtacgtaccacttgtagaagaagcgctaaaaataggacaacacaaaccagacaaaattctcatttataatcgtccaaatatggaggcggttcctttggctcccggtcgtgaccttgattgggatgaagagatggcaaaagcccagtcacatgactgtgttcctgttctttcagaacacccactgtatattctttacacatctggcacaacggggttacctaaggtactcactctcttagagataactatctatagcagtagatttactttgcaccaagaatgtttgatcactgactggaaatgtttgcagactttactttgaagtttagagagttacttcatttgcttttatttttttttcctgtgcccagtctggagtgcagtggcgtgatctcacctgacacagttactccatatcttaaagagattttgtgtttagtgctaaatataaaaacatttattatttaacatcaaatat

SEQ ID NO: 345 - DNA, 2214 bp, Homo sapiens
  source 1..2214: mol_type = unassigned DNA
caaattattttgtgttgactattgaaggacccaaagaaataatgattcaaagataattttataaaagccaaagtaacttgtagctaatatataaaatacttttgaccaggaacttttaaagtggatgctatgaagatagagagtgtttttacacattgtttattgattttaatttcactttttctctccttagggtgtgattaggcccactgggggatacgctgtcatgctacactggtcaatgtcttccatatacggacttcaacccggagaggtgtggtgggcagcttctgacttaggctgggttgttggacattcctatatctgctatggacctcttcttcatgggaacacaacagttttatatgaggggaagcctgtgggaacaccagatgctggcgcttatttccgtgtgcttgcagagcatggagtagctgccttgtttacagcaccaactgcaattagagcaatccgtcaacaggaccctggggcagctttggggaagcagtactctctgacaaggttcaaaacattatttgtggctggagaacgatgtgatgtagagaccctggaatggtccaaaaatgtcttcagagtacctgtcttagaccattggtggcaaactgagactggatctccaattactgcgtcatgtgttggattaggcaattctaaaacacctccaccagggcaagcaggaaaaagcgtcccaggatacaatgttatgattttggatgacaacatgcaaaaactgaaggctcggtgtttaggaaatattgtggtaaagttaccattgccacctggggctttttcaggactctggaagaatcaggaagcattcaagcatttatactttgaaaaatttcctggatattatgataccatggatgctggttacatggatgaagaaggctatttgtatgttatgtctcgagtggatgatgtaataaatgttgcaggtcacagaatttctgcaggcgccattgaagagtcaatcctttcccatggtaccgtggcagactgtgctgttgttggcaaggaagatcccttaaaaggtcatgtccccttagcactctgtgtattgagaaaagatataaatgcaacagaggagcaagttttggaagaaattgtgaaacacgttagacagaacattggccctgtggctgcttttcgaaatgcagtgtttgtcaaacagctacccaaaaccagatctggcaagatcccccgatcagctttatctgccattgtcaatggcaagccatacaagataacttctacaattgaagaccccagcatttttggccacgtagaagaaatgctgaagcaagcataatgagtttgtcttattcctattttgagttgatttaatttcttaattgaaattaaattatttgagttgtttctcagaaataaatatttcagtagaaattacttgcaaaatgaaatgtgaattgtaaaacttggcctaaacaaatctaatgaaaacatgtgaaagacctgtgccttttttttggtttgaccctgttagcattgttattagttatctataacatggcttattgaatgtcatctactgctttaggaaaaacgtatctagtgtattatttttaaaattgtacctcccaagaagaacactttaattgaaagcaacactaatatagagccacttcctgaaaccaagaatctgtagttttgatccaaaatctaaaacttaaagtcagaaaataattaaaatttttcttgtagaaattttagatattttctagtattctttagatgctcacattgttttaaataaaatagatgaaatgggaagtttaggtaatcatctagacagatgaaattattatctaggtaggagggcttttctatacattttctgagggaaagcagaacaccggggttatagctataccttcaggtcttttgttacttaggcaaggaaaaccacatgtctgacctggttcagcatgtaatccgagcactttgggaggctgaggcaggcggatcacttgaggtcagcagtttgagacgagcctggccaacatggtgaaaccctgtagctactgaaaatacaaaaataagccaggcgtggtggcgggaggctgaggcaaggagaatcacttgaatacaagaggcagaggttgcagtgagccaagttcccccactgtactccagcctgggtgacagagtaagactccatctcaaaacaac

SEQ ID NO: 346 - DNA, 864 bp, Homo sapiens
  source 1..864: mol_type = unassigned DNA
aaaaattgtaatttgaaaggttttaggatactaaaatggagcaaacagtctctgttatgcctgggtatttggtttgctttatttgtgatagaacatggaaatattttaaaactaagatttgttgaaaaccccttattattaatattgttgtgttaaatgtataactattgaactgtcagtgaaatatgacacattttatccagtgacattttaaatgaatctcattgtaggggaagcctgtgggaacaccagatgctggcgcttatttccgtgtgcttgcagagcatggagtagctgccttgtttacagcaccaactgcaattagagcaatccgtcaacaggaccctggggcagctttggggaagcagtactctctgacaaggttcaaaacattatttgtggctggagaacgatgtgatgtagagaccctggaatggtccaaaaatgtcttcagagtacctgtcttagaccattggtggcaaactggtaagcattttcctagcatgtacataaatagtaaagaaatgttccaaaaagctgcaaggattggaggaaacttttgagctacgaccagcagatcagacacaaactcgggattcgagtggttcaggtttcagtaaaaataagcaatttttttattgttgtgttattaataatgtcttcataagtgacattgatgccaccattctcttggtccctaggtataaagcactaaagacctctttatcttctcttctttgtttcttatatctggtaagttactaagtctcagattttcctttgaagtgtctgttgggttcattccaccttcagtattccccttgcctttgagctctggcagctgcattatcctctgtcctgatt

SEQ ID NO: 347 - DNA, 379 bp, Homo sapiens
  source 1..379: mol_type = unassigned DNA
gcttgcagagcatggagtagctgccttgtttacagcaccaactgcaattagagcaatccgtcaacaggaccctggggcagctttggggaagcagtactctctgacaaggttcaaaacattatttgtggctggagaacgatgtgatgtagagaccctggaatggtccaaaaatgtcttcagagtacctgtcttagaccattggtggcaaactggtataaagcactaaagacctctttatcttctcttctttgtttcttatatctgagactggatctccaattactgcgtcatgtgttggattaggcaattctaaaacacctccaccagggcaagcaggaaaaagcgtcccaggatacaatgttatgattttggatgacaa

SEQ ID NO: 348 - DNA, 715 bp, Homo sapiens
  source 1..715: mol_type = unassigned DNA
cagtgctgtctggcggcaccaccatgtaccctggcattgccgacaggatgcagaaggagatcactgccctggcacccagcacaatgaagatcaagatcattgctcctcctgagcgcaagtactccgtgtggatcggcggctccatcctggcctcgctgtccaccttccagcagatgtggatcagcaagcaggagtatgacgagtccggcccctccatcgtccaccgcaaatgcttctaggcggactatgacttagatttaaaaactggaacggtgaaggtgacagcagtcggttggagcgagcatcccccaaagttcacaatgtggccgaggactttgattgcacattgttgtttttttaatagtcattccaaatatgagatgcgttgttacaggaagtcccttgccatcctaaaagccaccccacttctctctaaggagaatggcccagtcctctcccaagtccacacaggggaggtgatagcattgctttcgtgtaaattatgtaatgcaaaatttttttaatcttcgccttaatacttttttattttgttttattttgaatgatgagccttcgtgcccccccttcccccttttttgtcccccaacttgagatgtatgaaggcttttggtctccctgggagtgggtggaggcagccagggcttacctgtacactgacttgagaccagttgaataaaagtgcacaccttaaaaa

SEQ ID NO: 349 - DNA, 1917 bp, Homo sapiens
  source 1..1917: mol_type = unassigned DNA
gagtgagcggcgcggggccaatcagcgtgcgccgttccgaaagttgccttttatggctcgagcggccgcggcggcgccctataaaacccagcggcgcgacgcgccaccaccgccgagaccgcgtccgccccgcgagcacagagcctcgcctttgccgatccgccgcccgtccacacccgccgccagctcaccatggatgatgatatcgccgcgctcgtcgtcgacaacggctccggcatgtgcaaggccggcttcgcgggcgacgatgccccccgggccgtcttcccctccatcgtggggcgccccaggcaccagggcgtgatggtgggcatgggtcagaaggattcctatgtgggcgacgaggcccagagcaagagaggcatcctcaccctgaagtaccccatcgagcacggcatcgtcaccaactgggacgacatggagaaaatctggcaccacaccttctacaatgagctgcgtgtggctcccgaggagcaccccgtgctgctgaccgaggcccccctgaaccccaaggccaaccgcgagaagatgacccagatcatgtttgagaccttcaacaccccagccatgtacgttgctatccaggctgtgctatccctgtacgcctctggccgtaccactggcatcgtgatggactccggtgacggggtcacccacactgtgcccatctacgaggggtatgccctcccccatgccatcctgcgtctggacctggctggccgggacctgactgactacctcatgaagatcctcaccgagcgcggctacagcttcaccaccacggccgagcgggaaatcgtgcgtgacattaaggagaagctgtgctacgtcgccctggacttcgagcaagagatggccacggctgcttccagctcctccctggagaagagctacgagctgcctgacggccaggtcatcaccattggcaatgagcggttccgctgccctgaggcactcttccagccttccttcctgggcatggagtcctgtggcatccacgaaactaccttcaactccatcatgaagtgtgacgtggacatccgcaaagacctgtacgccaacacagtgctgtctggcggcaccaccatgtaccctggcattgccgacaggatgcagaaggagatcactgccctggcacccagcacaatgaagatcaagatcattgctcctcctgagcgcaagtactccgtgtggatcggcggctccatcctggcctcgctgtccaccttccagcagatgtggatcagcaagcaggagtatgacgagtccggcccctccatcgtccaccgcaaatgcttctaggcggactatgacttagttgcgttacaccctttcttgacaaaacctaacttgcgcagaaaacaagatgagattggcatggctttatttgttttttttgttttgttttggttttttttttttttttggcttgactcaggatttaaaaactggaacggtgaaggtgacagcagtcggttggagcgagcatcccccaaagttcacaatgtggccgaggactttgattgcacattgttgtttttttaatagtcattccaaatatgagatgcgttgttacaggaagtcccttgccatcctaaaagccaccccacttctctctaaggagaatggcccagtcctctcccaagtccacacaggggaggtgatagcattgctttcgtgtaaattatgtaatgcaaaatttttttaatcttcgccttaatacttttttattttgttttattttgaatgatgagccttcgtgcccccccttcccccttttttgtcccccaacttgagatgtatgaaggcttttggtctccctgggagtgggtggaggcagccagggcttacctgtacactgacttgagaccagttgaataaaagtgcacaccttaaaaa

SEQ ID NO: 350 - DNA, 1845 bp, Homo sapiens
  source 1..1845: mol_type = unassigned DNA
accgccgagaccgcgtccgccccgcgagcacagagcctcgcctttgccgatccgccgcccgtccacacccgccgccagctcaccatggatgatgatatcgccgcgctcgtcgtcgacaacggctccggcatgtgcaaggccggcttcgcgggcgacgatgccccccgggccgtcttcccctccatcgtggggcgccccaggcaccagggcgtgatggtgggcatgggtcagaaggattcctatgtgggcgacgaggcccagagcaagagaggcatcctcaccctgaagtaccccatcgagcacggcatcgtcaccaactgggacgacatggagaaaatctggcaccacaccttctacaatgagctgcgtgtggctcccgaggagcaccccgtgctgctgaccgaggcccccctgaaccccaaggccaaccgcgagaagatgacccaggactctcttctctgacctgagtctcctttggaactctgcagatcatgtttgagaccttcaacaccccagccatgtacgttgctatccaggctgtgctatccctgtacgcctctggccgtaccactggcatcgtgatggactccggtgacggggtcacccacactgtgcccatctacgaggggtatgccctcccccatgccatcctgcgtctggacctggctggccgggacctgactgactacctcatgaagatcctcaccgagcgcggctacagcttcaccaccacggccgagcgggaaatcgtgcgtgacattaaggagaagctgtgctacgtcgccctggacttcgagcaagagatggccacggctgcttccagctcctccctggagaagagctacgagctgcctgacggccaggtcatcaccattggcaatgagcggttccgctgccctgaggcactcttccagccttccttcctgggcatggagtcctgtggcatccacgaaactaccttcaactccatcatgaagtgtgacgtggacatccgcaaagacctgtacgccaacacagtgctgtctggcggcaccaccatgtaccctggcattgccgacaggatgcagaaggagatcactgccctggcacccagcacaatgaagatcaagatcattgctcctcctgagcgcaagtactccgtgtggatcggcggctccatcctggcctcgctgtccaccttccagcagatgtggatcagcaagcaggagtatgacgagtccggcccctccatcgtccaccgcaaatgcttctaggcggactatgacttagttgcgttacaccctttcttgacaaaacctaacttgcgcagaaaacaagatgagattggcatggctttatttgttttttttgttttgttttggttttttttttttttttggcttgactcaggatttaaaaactggaacggtgaaggtgacagcagtcggttggagcgagcatcccccaaagttcacaatgtggccgaggactttgattgcacattgttgtttttttaatagtcattccaaatatgagatgcgttgttacaggaagtcccttgccatcctaaaagccaccccacttctctctaaggagaatggcccagtcctctcccaagtccacacaggggaggtgatagcattgctttcgtgtaaattatgtaatgcaaaatttttttaatcttcgccttaatacttttttattttgttttattttgaatgatgagccttcgtgcccccccttcccccttttttgtcccccaacttgagatgtatgaaggcttttggtctccctgggagtgggtggaggcagccagggcttacctgtacactgacttgagaccagttgaataaaagtgcacacctt

SEQ ID NO: 351 - DNA, 2245 bp, Homo sapiens
  source 1..2245: mol_type = unassigned DNA
accgccgagaccgcgtccgccccgcgagcacagagcctcgcctttgccgatccgccgcccgtccacacccgccgccagctcaccatggatgatgatatcgccgcgctcgtcgtcgacaacggctccggcatgtgcaaggccggcttcgcgggcgacgatgccccccgggccgtcttcccctccatcgtggggcgccccaggcaccagggcgtgatggtgggcatgggtcagaaggattcctatgtgggcgacgaggcccagagcaagagaggcatcctcaccctgaagtaccccatcgagcacggcatcgtcaccaactgggacgacatggagaaaatctggcaccacaccttctacaatgagctgcgtgtggctcccgaggagcaccccgtgctgctgaccgaggcccccctgaaccccaaggccaaccgcgagaagatgacccaggtgagtggcccgctacctcttctggtggccgcctccctccttcctggcctcccggagctgcgccctttctcactggttctctcttctgccgttttccgtaggactctcttctctgacctgagtctcctttggaactctgcaggttctatttgctttttcccagatgagctctttttctggtgtttgtctctctgactaggtgtctaagacagtgttgtgggtgtaggtactaacactggctcgtgtgacaaggccatgaggctggtgtaaagcggccttggagtgtgtattaagtaggtgcacagtaggtctgaacagactccccatcccaagaccccagcacacttagccgtgttctttgcactttctgcatgtcccccgtctggcctggctgtccccagtggcttccccagtgtgacatggtgtatctctgccttacagatcatgtttgagaccttcaacaccccagccatgtacgttgctatccaggctgtgctatccctgtacgcctctggccgtaccactggcatcgtgatggactccggtgacggggtcacccacactgtgcccatctacgaggggtatgccctcccccatgccatcctgcgtctggacctggctggccgggacctgactgactacctcatgaagatcctcaccgagcgcggctacagcttcaccaccacggccgagcgggaaatcgtgcgtgacattaaggagaagctgtgctacgtcgccctggacttcgagcaagagatggccacggctgcttccagctcctccctggagaagagctacgagctgcctgacggccaggtcatcaccattggcaatgagcggttccgctgccctgaggcactcttccagccttccttcctgggcatggagtcctgtggcatccacgaaactaccttcaactccatcatgaagtgtgacgtggacatccgcaaagacctgtacgccaacacagtgctgtctggcggcaccaccatgtaccctggcattgccgacaggatgcagaaggagatcactgccctggcacccagcacaatgaagatcaagatcattgctcctcctgagcgcaagtactccgtgtggatcggcggctccatcctggcctcgctgtccaccttccagcagatgtggatcagcaagcaggagtatgacgagtccggcccctccatcgtccaccgcaaatgcttctaggcggactatgacttagttgcgttacaccctttcttgacaaaacctaacttgcgcagaaaacaagatgagattggcatggctttatttgttttttttgttttgttttggttttttttttttttttggcttgactcaggatttaaaaactggaacggtgaaggtgacagcagtcggttggagcgagcatcccccaaagttcacaatgtggccgaggactttgattgcacattgttgtttttttaatagtcattccaaatatgagatgcgttgttacaggaagtcccttgccatcctaaaagccaccccacttctctctaaggagaatggcccagtcctctcccaagtccacacaggggaggtgatagcattgctttcgtgtaaattatgtaatgcaaaatttttttaatcttcgccttaatacttttttattttgttttattttgaatgatgagccttcgtgcccccccttcccccttttttgtcccccaacttgagatgtatgaaggcttttggtctccctgggagtgggtggaggcagccagggcttacctgtacactgacttgagaccagttgaataaaagtgcacacctt

SEQ ID NO: 352 - DNA, 1236 bp, Homo sapiens
  source 1..1236: mol_type = unassigned DNA
ctcaccatggatgatgatatcgccgcgctcgtcgtcgacaacggctccggcatgtgcaaggccggcttcgcgggcgacgatgccccccgggccgtcttcccctccatcgtggggcgccccaggcaccagggcgtgatggtgggcatgggtcagaaggattcctatgtgggcgacgaggcccagagcaagagaggcatcctcaccctgaagtaccccatcgagcacggcatcgtcaccaactgggacgacatggagaaaatctggcaccacaccttctacaatgagctgcgtgtggctcccgaggagcaccccgtgctgctgaccgaggcccccctgaaccccaaggccaaccgcgagaagatgacccagatcatgtttgagaccttcaacaccccagccatgtacgttgctatccaggctgtgctatccctgtacgcctctggccgtaccactggcatcgtgatggactccggtgacggggtcacccacactgtgcccatctacgaggggtatgccctcccccatgccatcctgcgtctggacctggctggccgggacctgactgactacctcatgaagatcctcaccgagcgcggctacagcttcaccaccacggccgagcgggaaatcgtgcgtgacattaaggagaagctgtgctacgtcgccctggacttcgagcaagagatggccacggctgcttccagctcctccctggagaagagctacgagctgcctgacggccaggtcatcaccattggcaatgagcggttccgctgccctgaggcactcttccagccttccttcctgggtgagtggagactgtctcccggctctgcctgacatgagggttacccctcggggctgtgctgtggaagctaagtcctgccctcatttccctctcaggcatggagtcctgtggcatccacgaaactaccttcaactccatcatgaagtgtgacgtggacatccgcaaagacctgtacgccaacacagtgctgtctggcggcaccaccatgtaccctggcattgccgacaggatgcagaaggagatcactgccctggcacccagcacaatgaagatcaagatcattgctcctcctgagcgcaagtactccgtgtggatcggcggctccatcctggcctcgctgtccaccttccagcagatgtggatcagcaagcaggagtatgacgagtccggcccctccatcgtccaccgcaaatgcttctaggcggact

SEQ ID NO: 353 - DNA, 1032 bp, Homo sapiens
  source 1..1032: mol_type = unassigned DNA
caccgccgagaccgcgtccgccccgcgagcacagagcctcgcctttgccgatccgccgcccgtccacacccgccgccaggactcggcgcgccggaagtggccagggcgggggcgacctcggctcacagcgcgcccggctattctcgcagctcaccatggatgatgatatcgccgcgctcgtcgtcgacaacggctccggcatgtgcaaggccggcttcgcgggcgacgatgccccccgggccgtcttcccctccatcgtggggcgccccaggcaccagggcgtgatggtgggcatgggtcagaaggattcctatgtgggcgacgaggcccagagcaagagaggcatcctcaccctgaagtaccccatcgagcacggcatcgtcaccaactgggacgacatggagaaaatctggcaccacaccttctacaatgagctgcgtgtggctcccgaggagcaccccgtgctgctgaccgaggcccccctgaaccccaaggccaaccgcgagaagatgacccagatcatgtttgagaccttcaacaccccagccatgtacgttgctatccaggctgtgctatccctgtacgcctctggccgtaccactggcatcgtgatggactccggtgacggggtcacccacactgtgcccatctacgaggggtatgccctcccccatgccatcctgcgtctggacctggctggccgggacctgactgactacctcatgaagatcctcaccgagcgcggctacagcttcaccaccacggccgagcgggaaatcgtgcgtgacattaaggagaagctgtgctacgtcgccctggacttcgagcaagagatggccacggctgcttccagctcctccctggagaagagctacgagctgcctgacggccaggtcatcaccattggcaatgagcggttccgctgccctgaggcactcttccagccttccttcctgggcatggagtcctgtggcatccacgaaactaccttcaactccatcatgaagtgtgacgtggacatccgcaaagacc

SEQ ID NO: 354 - DNA, 556 bp, Homo sapiens
  source 1..556: mol_type = unassigned DNA
accaccgccgagaccgcgtccgccccgcgagcacagagcctcgcctttgccgatccgccgcccgtccacacccgccgccagatcatgtttgagaccttcaacaccccagccatgtacgttgctatccaggctgtgctatccctgtacgcctctggccgtaccactggcatcgtgatggactccggtgacggggtcacccacactgtgcccatctacgaggggtatgccctcccccatgccatcctgcgtctggacctggctggccgggacctgactgactacctcatgaagatcctcaccgagcgcggctacagcttcaccaccacggccgagcgggaaatcgtgcgtgacattaaggagaagctgtgctacgtcgccctggacttcgagcaagagatggccacggctgcttccagctcctccctggagaagagctacgagctgcctgacggccaggtcatcaccattggcaatgagcggttccgctgccctgaggcactcttccagccttccttcctgggcatggagtcctgtggcatccacgaaactaccttca

SEQ ID NO: 355 - DNA, 820 bp, Homo sapiens
  source 1..820: mol_type = unassigned DNA
cgcgtccgccccgcgagcacagagcctcgcctttgccgatccgccgcccgtccacacccgccgccagctcaccatggatgatgatatcgccgcgctcgtcgtcgacaacggctccggcatgtgcaaggccggcttcgcgggcgacgatgccccccgggccgtcttcccctccatcgtggggcgccccaggcaccaggtaggggagctggctgggtggggcagccccgggagcgggcgggaggcaagggcgctttctctgcacaggagcctcccggtttccggggtgggggctgcgcccgtgctcagggcttcttgtcctttccttcccagggcgtgatggtgggcatgggtcagaaggattcctatgtgggcgacgaggcccagagcaagagaggcatcctcaccctgaagtaccccatcgagcacggcatcgtcaccaactgggacgacatggagaaaatctggcaccacaccttctacaatgagctgcgtgtggctcccgaggagcaccccgtgctgctgaccgaggcccccctgaaccccaaggccaaccgcgagaagatgacccagatcatgtttgagaccttcaacaccccagccatgtacgttgctatccaggctgtgctatccctgtacgcctctggccgtaccactggcatcgtgatggactccggtgacggggtcacccacactgtgcccatctacgaggggtatgccctcccccatgccatcctgcgtctggacctggctggccgggacctgactgactacctcatgaagatcctcaccgagcgcggctacagcttcaccaccacggccg

SEQ ID NO: 356 - DNA, 568 bp, Homo sapiens
  source 1..568: mol_type = unassigned DNA
agcttggcgcggcaggcgcgtcggttgcgccacctggcggtcgcctggaaccccacaacccaaccaaccagctcaccatggatgatgatatcgccgcgctcgtcgtcgacaacggctccggcatgtgcaaggccggcttcgcgggcgacgatgccccccgggccgtcttcccctccatcgtggggcgccccaggcaccagggcgtgatggtgggcatgggtcagaaggattcctatgtgggcgacgaggcccagagcaagagaggcatcctcaccctgaagtaccccatcgagcacggcatcgtcaccaactgggacgacatggagaaaatctggcaccacaccttctacaatgagctgcgtgtggctcccgaggagcaccccgtgctgctgaccgaggcccccctgaaccccaaggccaaccgcgagaagatgacccagatcatgtttgagaccttcaacaccccagccatgtacgttgctatccaggctgtgctatccctgtacgcctctggccgtaccactggcatcgtgatggactccggtgacggggtcacccacactgtgcc

SEQ ID NO: 357 - DNA, 657 bp, Homo sapiens
  source 1..657: mol_type = unassigned DNA
gccccgcgagcacagagcctcgcctttgccgatccgccgcccgtccacacccgccgccagctcaccatggatgatgatatcgccgcgctcgtcgtcgacaacggctccggcatgtgcaaggccggcttcgcgggcgacgatgccccccgggccgtcttcccctccatcgtggggcgccccaggcaccaggtaggggagctggctgggtggggcagccccgggagcgggcgggaggcaagggcgctttctctgcacaggagcctcccggtttccggggtgggggctgcgcccgtgctcagggcttcttgtcctttccttcccagggcgtgatggtgggcatgggtcagaaggattcctatgtgggcgacgaggcccagagcaagagaggcatcctcaccctgaagtaccccatcgagcacggcatcgtcaccaactgggacgacatggagaaaatctggcaccacaccttctacaatgagctgcgtgtggctcccgaggagcaccccgtgctgctgaccgaggcccccctgaaccccaaggccaaccgcgagaagatgacccaggtgagtggcccgctacctcttctggtggccgcctccctccttcctggcctcccggagctgcgccctttctcactggttctctcttctgccgttt

SEQ ID NO: 358 - DNA, 569 bp, Homo sapiens
  source 1..569: mol_type = unassigned DNA
gtctggagtaagcctcgcccccaccccaactcccaggaattctgctgagtcacttcggaggccacagctgcaaccttgggaacaatacgagtcattcaattcactaggcagcgtcccagcgctcacctgggggacttggccacggtctcttgttagaagcctcttcatggacaacgtggccaaccccacctcacccctatcgtctcccccggccacaccctgggccaatcgggctcccacgtcagggtctttgcactcaccatggatgatgatatcgccgcgctcgtcgtcgacaacggctccggcatgtgcaaggccggcttcgcgggcgacgatgccccccgggccgtcttcccctccatcgtggggcgccccaggcaccagggcgtgatggtgggcatgggtcagaaggattcctatgtgggcgacgaggcccagagcaagagaggcatcctcaccctgaagtaccccatcgagcacggcatcgtcaccaactgggacgacatggagaaaatctggcaccacaccttctacaatgagctgcgtgtggctcccgaggagcaccccgt

SEQ ID NO: 359 - DNA, 472 bp, Homo sapiens
  source 1..472: mol_type = unassigned DNA
gcacttcctgcccgagccgctggccgcccgagggtgtggccgctgcgtgcgcgcgcgccgacccggcgctgtttgaaccgggcggaggcggggctggcgcccggttgggagggggttggggcctggcttcctgccgcgcgccgcggggacgcctccgaccagtgtttgccttttatgctcaccatggatgatgatatcgccgcgctcgtcgtcgacaacggctccggcatgtgcaaggccggcttcgcgggcgacgatgccccccgggccgtcttcccctccatcgtggggcgccccaggcaccagggcgtgatggtgggcatgggtcagaaggattcctatgtgggcgacgaggcccagagcaagagaggcatcctcaccctgaagtaccccatcgagcacggcatcgtcaccaactgggacgacatggagaaaatctggcaccacaccttctacaatgagctgcgtgtgg

SEQ ID NO: 360 - DNA, 561 bp, Homo sapiens
  source 1..561: mol_type = unassigned DNA
attctgctgagtcacttcggaggccacagctgcaaccttgggaacaatacgagtcattcaattcactaggcagcgtcccagcgctcacctgggggacttggccacggtctcttgttagaagcctcttcatggacaacgtggccaaccccacctcacccctatcgtctcccccggccacaccctgggccaatcgggctcccacgtcagggtctttgcatagagatggagtttcaacatgttgtccaggctggtcttgaactcgtgaccacaagtgatccacccaccatggcctcccaaagtgctgggattacagctcaccatggatgatgatatcgccgcgctcgtcgtcgacaacggctccggcatgtgcaaggccggcttcgcgggcgacgatgccccccgggccgtcttcccctccatcgtggggcgccccaggcaccagggcgtgatggtgggcatgggtcagaaggattcctatgtgggcgacgaggcccagagcaagagaggcatcctcaccctgaagtaccccatcgagcacggcatcgtcaccaactgggacga

SEQ ID NO: 361 - DNA, 2794 bp, Homo sapiens
  source 1..2794: mol_type = unassigned DNA
gtctgaaagcatttctggagtgttttaggcctgttcactttctcttactcactgtctattcacttgtcctgttcactcgtctggaagatctcagccagcaccatgactgacaatgagctgtctgccttggtagtggataatgggtcagggatgtgcaaggcaggctttggtggtgacgatgccccccgggctgtgttcccctccatgatagggcgtcctcgacaccagggcgttatggtaggcatgggccagaaggactgctacgtgggagatgaggctcagagcaagagaggcgtcctgaccctgaagtatcctatcgagcatggagtggtcaccaactgggacgatatggaaaagatctggtaccacacattctacaatgagctccgtgtggcaccagatgagcatcccatcctcctcaccgaggcacccctgaaccccaagatcaaccgggaaaagatgactcagatcatgttcgaggctttcaacacaccagccatgtatgtcgccatccaggctgtgctgtccctctatgcctcaggacggaccacaggcatcgtgatggattctggggatggggtcactcacatcgtgcccatctatgaaggttatgccctgcctcatgccattctacgcctggatctggcagggagagacctgactgattacctcatgaagatcctgacagagcgaggctataacttcaccaccactgctgagcgggagattgtgcgagatgtcaaagagaagctgtgctacgtagccctggactttgagcaggagatggtcagggcagccgcatcctcctcaccggaacggagctatgaacttcctgatgggcaggtgatcaccattgggaatgaacgcttccgatgccctgaagccattttccagccttcctttctgggcattgagtccagtgggatccatgagacaaccttcaactctatcatgaagtgcgatgtggatattcgcaaggatctctatgccaacaccgtgttatctggagggagcaccatgtacccaggcattgctgacaggatgcagaaagaaatcataaccctggcacccagcaccatgaaaatcaagatcatagctcccccagagcggaagtattctgtttggattgggggctccatccttgccagcctgtccacattccagcagatgtggatcagtaagcaggaatatgatgaggctggtcctcctatcgttcacagaaaatgtttctgaatgggcttccatattagtgggcttacattttcccttttcctaggtcacagtgatggtactgcttttatccgctttcagtagaatcgaggtaaatacgtcactcttcctagtgtaaaccagcaaacccatctctccatccaagtaacctgggctcttacccagataaccacatccggttctccatcaagtgaaggtgaattctaataccatattcctttttctttgcctatactgttcaaagataggtaggccagcttaaatacatataagtgacaaggagtaaaatcacgagaaatgtcatttcagaatggataactataattatcaagctttaaaacttagttctcgctaaaatatttaacaagaacaggctgtataaacttgtttaaaaaaaaaaggtgcgtatgcatttagcagccgtgtcttactagttaagtatctttgttttgtttacttctttgtatggagataatgaattataaagttcaataatatccatatatacataagcaccagggaaataaaatatattgtgaaatatgctgatgtatctagctatctgaacagctaatgtgaatttctttactcccaaaagtcatcgttgtactaggtacatattttaattgtttcccttactaaataagcataatgagacagccaccattccattaatgtttataaatcatctaaattttcagctcatagtggagttctgctggtcaaattatattttaatatctttcttactgaaccttctcataccaaaactacagacaatgtctaattcttaagagagatagatattataatatcaaattaatgtcattatggtacaatttgacagaggtaattttatttctatttcttagtgtaatagcacatcttaaataatttctgtagaccaggattacagatacttctcttgtgcaaggatttcactgtgggaaaatatagctgcagcatctttattaattatacattttactaccagtatactaacacagttttatccttggaaagcttttagaataattctactttattatgtccagtaactagcaatacttatttatgcaaagtgtctctgagatactaacatctttgaaaatatcaatgtatgttcctataatgtctaaaatattttagttactccagtgatgatttattaaccaattttaagtaccagtatgtttattccaatctatgcagtgatttctgaatatttggatatcagcattatttgtatttttcagggtaatttctgaaaatttaaaatatttatttggattgcttattcaggcattataaggtactctggaggaaggaatcacttctctttttttcttagttgggaaacttgtacttatgttataaatctttaaaatggaatcagtaagaattttttgtttaaggtaatacttttcaaataatttgattattccttattggctttatctgacaacataatctttaaaatgcatgtaaccaaaattaatctccaaaaacactttattttatataacttgctttcagtacattaaaattgcttcatacttgtata

SEQ ID NO: 362 - DNA, 4106 bp, Homo sapiens
  source 1..4106: mol_type = unassigned DNA
attcaggctggcggggactagaccagaagggtgccctgtcctgggtgccccttttgcagccactcagatgtgctgctgcggtgtcctttgtgctggtggcagccctggaagatgagaagccgctgttgctcccctgctgccctggcccagctgtcaggacccctcagcagagggcagggcgccaagccttcccactgcatgtggcttattgtccccaaggctggcagggctgcggaggaccgaatccacagaccatccagggagcacccacaccccagaaagggggaggggtgggctggcgtcacttagtcttcccctgccccctacccttcagcgcctgcccctccccagctccctatttggccatccccctgactgccccctccccttccttacatggtctgggggctccctggctgatcctctcccctgcccttggctccatgaatggcctcggcagtcctagcgggtgcgaaggggaccaaataaggcaaggtggcagaccgggccccccacccctgcccccggctgctccaactgaccctgtccatcagcgttctataaagcggccctcctggagccagccacccagagcccgctgccgccggagccgagccgacccgccccgccgacgaaccccctgaagctgtgccaagatgtgtgacgacgaggagaccaccgccctggtgtgcgacaacggctctgggctggtgaaggccggctttgcgggcgatgacgcgccccgcgctgtcttcccgtccatcgtgggccgcccgcggcaccagggagttatggtgggtatgggtcagaaggactcctacgtaggtgatgaagcccagagcaagagaggcatcctgaccctgaagtatcccatcgagcatggtatcatcaccaactgggacgacatggagaagatctggcaccacaccttctacaatgagctccgtgtggctcccgaggagcaccccaccctgctcacagaggccccgctgaaccccaaggccaaccgggagaagatgactcagatcatgtttgagaccttcaatgtccctgccatgtacgtggccatccaggcagtgctatccctgtatgcttctggccgtaccacaggcattgttctggactctggggatggtgtaactcacaatgtccccatctatgagggctacgctttgccccatgccatcatgcgtctggatctggctggtcgggacctcactgactacctcatgaagatcctcactgagcgtggctactcctttgtcaccactgctgaacgtgaaattgtccgtgacattaaagagaagctgtgctatgtcgccctggattttgagaatgagatggccacagctgcctcttcctcctccctggagaagagctatgaactgcctgatggccaagtcatcactattggcaatgagcgcttccgctgtcctgagacactcttccagccctccttcattggtatggaatctgctggcatccatgaaacaacttacaatagcatcatgaagtgtgacattgatatccgcaaggacctgtatgccaacaatgtcttatctggaggcaccactatgtaccctggtattgctgatcgtatgcagaaggaaatcactgctctggctcctagcaccatgaagattaagattattgctccccctgagcgtaaatactctgtctggattgggggctccatcctggcctctctgtccaccttccagcaaatgtggattagcaagcaagagtacgatgaggcaggcccatccattgtccaccgcaaatgcttctaagatgccttctctctccatctaccttccagtcaggatgacggtattatgcttcttggagtcttccaaaccaccttccctcatctttcatcaatcattgtacagtttgtttacacacgtgcaatttgtttgtgcttctaatatttattgctttataaataaaccagaccaggacttgcaacctataaaagcctctcgtttgtttttggggtaggcgtggggtggggcaggtgtttgctttgacaccctgagcattgtcaaagttcagtaccacaaggttcatccagatgaattaatatgacagttagctgggagttataatgctaacttttgatttcatattttgagacagaatcatgaatatatttcatacctgaaaagcagattaaggtttagttccatataagtaagaaatgaaattgaataagatagttctctagaattagttgctgcagatgacactgaagattattttaacatatgttccagttgtttttgtaaccttgcagaaaatacacatatattgataatgagaaagtcaaagattattttaaatgaattggcttaacttttcaattctttgaactcttcaattttcttcctgggggctatgaaagaaacatgaaggttagctgacagttgggccagccacatcccattgcaaataccctctaaacatatcaagaccattgtgtgtgtgcaaaacaaatgtgaggaagcaggagccaaacacttctgcctgatcagtgactaacttgcgagacagaagccttcaatctcttcgtttctttgaaatcttgagatcttgggttgagtgaactgaaggctgcgaggtcctgagggagcaaggggaggcgagagccacagtgtttgctttgctctgtgcagagctctctgcaaagtatggtgggaaggctgctaggggcagcgttgaaaagaattgaatgtgttccatcctcgaggagttcacacacctacacataatcccccagtgcgtgtggcctggaggctttaaggagatgtatgtgggtctgggtcttagagaatggtcaggaattagggaggtgagaagagcagagaggacatctcagcagaaggaagtgtggcagaagccaggatacaagacatggggcaggctggtaggtgctgatgaattttagaaaatccactgggaaaggtagatttcaactagattgcagaagccttacagatttttgttttcaaattaattgccagtgaactgttagcattcacagaagtgtttgaatagacttaattgaattttattgatgaggattcaagacacagagattaagcaactggtgcaatgttataaactttatttgtggaatgtgctagacaggaactcagattttctgacacctactctgatggtgtctctaaaataatctttctaactttatagtttatcaagggtaaccccattctatcacatgccttttgagaatttgggttcaatatttggagtactctggactcatcagacatctttaataaattgtaatacattgccactgtcattcaaggtcctatgtgtgtctttttgcctattcataccaaaaatatcttttgatccctgactctgggtcgggcatagtattaagggcaggggacacaaagatgtatgagagcacattttctgtgaataaaaagctcagagtttagagttctgtatgtagcatattcaaatggaaggccttctatgcaataaaggctaaataatacatcaacttggtggcattttatttagataaggtgcaaacattattgtacatatgccccccgcccccaccaccccattgtatcctatagcacagttgaactggtttaaaagccatgcatggggaggtatgatttcactagtttttgtgtctctttcttttcctctgtacaattgagtgcataaatattatgaattgtatcctctgaacacagtattaatgctttaactgtagatgattggctggggtatcacctctggttctttccatctgtgattagaaatggagaggacatttttatttctatgtaaaagtagaagctttaagaatcagcttctgatatttatatcagaagaggtaagcacccagattcttgttgaattctgaggtcttctcatctttgcttgattatagggtataaagtattagaacaattgaatcttaaaaattgtgcttaaggaaggtactaagacaaaaatgtttgcttaaggtaatcttcatatgtatacaataactgagacatggatagtgcctacgtctttggttaaagtgcaataaacaaagaactatataaatt

SEQ ID NO: 363 - DNA, 636 bp, Homo sapiens
  source 1..636: mol_type = unassigned DNA
gcttacataatgtgctcgtggctgacaagaaagatggtcatttgaaagtgtcctcgggaattttttctactataatagttaaaaagatgagctgcagtttgcttcagatttagtattcctgatgcgcatttttattctttgtgtgcattgttctggactctggggatggtgtaactcacaatgtccccatctatgagggctacgctttgccccatgccatcatgcgtctggatctggctggtcgggacctcactgactacctcatgaagatcctcactgagcgtggctactcctttgtcaccactgctgaacgtgaaattgtccgtgacattaaagagaagctgtgctatgtcgccctggattttgagaatgagatggccacagctgcctcttcctcctccctggagaagagctatgaactgcctgatggccaagtcatcactattggcaatgagcgcttccgctgtcctgagacactcttccagccctccttcattggtatggaatctgctggcatccatgaaacaacttacaatagcatcatgaagtgtgacattgatatccgcaaggacctgtatgccaacaatgtcttatctggaggcaccactatgtaccctggtattgctgatcgtatgc

SEQ ID NO: 364 - DNA, 696 bp, Homo sapiens
  source 1..696: mol_type = unassigned DNA
tatgagggctacgctttgccccatgccatcatgcgtctggatctggctggtcgggacctcactgactacctcatgaagatcctcactgagcgtggctactcctttgtcaccactgctgaacgtgaaattgtccgtgacattaaagagaagctgtgctatgtcgccctggattttgagaatgagatggccacagctgcctcttcctcctccctggagaagagctatgaactgcctgatggccaagtcatcactattggcaatgagcgcttccgctgtcctgagacactcttccagccctccttcattggtgagttgtagggtctggtgcagaggcacgattttccctggaaatcttagggtctcccagagtaaaatctagaaggctcaagaagcccttgagttaaaagaagtcatagtttggattcccacacagctcaacctcaagtcctgatggctcattaaaggggaagtctatgttctgctctagtgatataataaaggatgacacactgagttcatctcaaaataaaggatgacacagagtagtaactgaatagcacgtatctgcaggaaaagggctagttcacaagagctgacttattcccgtaagtttcactaccaagtagctggactttccaagttcctcatcattaaatgcaataacattcctactcatattaataactgggcacttat

SEQ ID NO: 365 - DNA, 1537 bp, Homo sapiens
  source 1..1537: mol_type = unassigned DNA
aattggccgctgagagtcccgccccgccagggatcccgggagctgtccggccgcctcggtgctgatcccgccaccgcccacgggccgctagcagcgcagcgggcactatgagcgggggcgtctacggcggagatgaggtgggggcgctggtctttgacattggctccttctcagtccgcgctgggtacgctggggaggactgtcccaaggctgacttccccaccacagtggggctgctggccgcggaggaggggggcgggctggagctggagggggacaaagagaagaaagggaagatcttccacatcgacaccaatgccctgcacgtgcctcgggatggagcggaggtcatgtcgcccctcaagaatggcatgatcgaggactgggagtgcttccgagccatcctggatcacacctacagcaaacacgtcaagtctgagccaaacctgcacccagtgctcatgtccgaggctccgtggaacacacgggccaagcgggagaagctgacagagctgatgttcgagcagtacaacattcctgccttcttcttatgcaagacggctgtgctcaccgcctttgcaaacgggcggtccactggcctcgtgctggacagtggagccacccacaccacggccattccagtacatgacggctacgttctgcagcaaggcatcgtcaagtcccctctggcaggggacttcatctccatgcagtgccgggagctgttccaggagatggccattgacatcatcccaccttacatgatcgcagccaaggagcctgtccgggagggtgcccccccaaactggaagaagaaggagaagctaccccaggtctccaagtcctggcataactacatgtgtaatgaggtgatccaggacttccaggcctccgtgctgcaggtctcagactccccctacgatgaacaggtggctgcacaaatgcccacagtgcactacgagatgcccaatggctacaatacagactacggcgccgagcgactccgcatccctgagggcctgtttgatccctcgaacgtcaagggcctgtcggggaacaccatgttgggtgtgggccacgtggtgaccaccagcatcggcatgtgtgacattgatattcgcccgggcctgtacgggagtgtcattgtcaccggcgggaacacactgctgcagggcttcactgacaggctcaatcgagagctttcccagaagaccccaccgagcatgcgactgaaactcattgccagcaacagcaccatggagcgcaagttcagcccctggatcgggggttccatcctggcctcactgggcactttccagcagatgtggatctccaagcaggaatatgaggagggcgggaagcagtgcgtggagcgaaagtgcccctgatggcactcctccccacacacctgctcccaagctcagatggaagtcccttaacccccatgccacattgcccccctcctcctttccctcttgtcctcattaatggtgatgtttctgggttgaaagaagtaaaaatgttttaagaaaaaaaa

SEQ ID NO: 366 - DNA, 947 bp, Homo sapiens
  source 1..947: mol_type = unassigned DNA
cccaccgcatgaaaggcacacatggagagagaggcatgccccattctctctcctctccatcagggaagggtgagaaacccctcttgcaggcagcacagcagagcctgcagcgccaggtagctgcagagctgggaacagtgccaggaaggtgggggtgggggtcaggtgggctaggaaagggtgttcctacactgtgcccccacaggagcctgtccgggagggtgcccccccaaactggaagaagaaggagaagctaccccaggtctccaagtcctggcataactacatgtgtaatgaggtgatccaggacttccaggcctccgtgctgcaggtctcagactccccctacgatgaacagcagagtcctgctcccttctgggtagggtggctgcacaaatgcccacagtgcactacgagatgcccaatggctacaatacagactacggcgccgagcgactccgcatccctgagggcctgtttgatccctcgaacgtcaagggcctgtcggggaacaccatgttgggtgtgggccacgtggtgaccaccagcatcggcatgtgtgacattgatattcgcccgggcctgtacgggagtgtcattgtcaccggcgggaacacactgctgcagggcttcactgacaggctcaatcgagagctttcccagaagaccccaccgagcatgcgactgaaactcattgccagcaacagcaccatggagcgcaagttcagcccctggatcgggggttccatcctggcctcactgggcactttccagcagatgtggatctccaagcaggaatatgaggagggcgggaagcagtgcgtggagcgaaagtgcccctgatggcactcctccccacacacctgctcccaagctcagatggaagtcccttaacccccatgccacattgcccccctcctcctttccctcttgtcctcattaatggt

SEQ ID NO: 367 - DNA, 1078 bp, Homo sapiens
  source 1..1078: mol_type = unassigned DNA
ccagggatcccgggagctgtccggccgcctcggtgctgatcccgccaccgcccacgggccgctagcagcgcagcgggcactatgagcgggggcgtctacggcggagatgaggtgggggcgctggtctttgacattggctccttctcagtccgcgctgggtacgctggggaggactgtcccaaggctgacttccccaccacagtggggctgctggccgcggaggaggggggcgggctggagctggagggggacaaagagaagaaagggaagatcttccacatcgacaccaatgccctgcacgtgcctcgggatggagcggaggtcatgtcgcccctcaagaatggcatgatcgaggactgggagtgcttccgagccatcctggatcacacctacagcaaacacgtcaagtctgagccaaacctgcacccagtgctcatgtccgaggctccgtggaacacacgggccaagcgggagaagctgacagagctgatgttcgagcagtacaacattcctgccttcttcttatgcaagacggctgtgctcaccgcctttgcaaacgggcggtccactggcctcgtgctggacagtggagccacccacaccacggccattccagtacatgacggctacgttctgcagcaaggcatcgtcaagtcccctctggcaggggacttcatctccatgcagtgccgggagctgttccaggagatggccattgacatcatcccaccttacatgatcgcagccaaggtggggcctctggggacatggagctgccactagagtcctggccactcgccccatggccgtcaaccctctgacacatgagatatcagagcagagagcagcaggctccccagtgggtcctggctccagttcctccttttataatcgaggcatccgaaatccagacaggctgagggatatgctgaggtcatgaaaccagctggcagacagcaggatgtgtgagggccagtgtggtgggttctagggtccaatatagacccaggttcaagttctgcctctgccgtgcaagagctgcaggaccggtcaggcatggtggctcacacctgtaatc

SEQ ID NO: 368 - DNA, 790 bp, Homo sapiens
  source 1..790: mol_type = unassigned DNA
gcagcgggcactatgagcgggggcgtctacggcggagatgaggtgggggcgctggtctttgacattggctccttctcagtccgcgctgggtacgctggggaggactgtcccaaggtgagccttccagtctcctctccaaatcctaggggcttcggacccttcttcaggctttccagtgacccagggctctcccagatcgcccagaagctctgctgagcgggaatatgggaataaacccaggggcggtctgaggaccctgctgtggggctggacaggggcaagagggtgacctctctccctgccaatactcccccaacccttccccaccaggctgacttccccaccacagtggggctgctggccgcggaggaggggggcgggctggagctggagggggacaaagagaagaaagggaagatcttccacatcgacaccaatgccctgcacgtgcctcgggatggagcggaggtcatgtcgcccctcaagaatggcatgatcgaggactgggagtgcttccgagccatcctggatcacacctacagcaaacacgtcaagtctgagccaaacctgcacccagtgctcatgtccgaggctccgtggaacacacgggccaagcgggagaagctgacagagctgatgttcgagcagtacaacattcctgccttcttcttatgcaagacggctgtgctcaccgcctttgcaaacgggcggtccactggcctcgtgctggacagtggagccacccacaccacggccattccagtacatgacggctacgttctgcagcaag

SEQ ID NO: 369 - DNA, 309 bp, Homo sapiens
  source 1..309: mol_type = unassigned DNA
cggaggtcatgtcgcccctcaagaatggcatgatcgaggactgggagtgcttccgagccatcctggatcacacctacagcaaacacgtcaagtctgagccaaacctgcacccagtgctcatgtccgaggctccgtggaacacacgggccaagcgggagaagctgacagagctgatgttcgagcagtacaacattcctgccttcttcttatgcaagacggctgtgctcaccgcgtatcctctggactgagctgctctgactgggtggagggctggggtggggcctgtgctgagctcagctgtgatgagct

SEQ ID NO: 370 - DNA, 444 bp, Homo sapiens
  source 1..444: mol_type = unassigned DNA
agggatcccgggagctgtccggccgcctcggtgctgatcccgccaccgcccacgggccgctagcagcgcagcgggcactatgagcgggggcgtctacggcggaggctgacttccccaccacagtggggctgctggccgcggaggaggggggcgggctggagctggagggggacaaagagaagaaagggaagatcttccacatcgacaccaatgccctgcacgtgcctcgggatggagcggaggtcatgtcgcccctcaagaatggcatgatcgaggactgggagtgcttccgagccatcctggatcacacctacagcaaacacgtcaagtctgagccaaacctgcacccagtgctcatgtccgaggctccgtggaacacacgggccaagcgggagaagctgacagagctgatgttcgagcagtacaacattcctgccttcttct

SEQ ID NO: 371 - DNA, 4863 bp, Homo sapiens
  source 1..4863: mol_type = unassigned DNA
gcttcgcccgagacccagcgcccaggcgtgtcgccccgagaggagccgcgcgaaggtcaccccgcgcccgccgcccgccgcccgccgcctccgtgggtccgtttgccagtcagcccgtgcgtccgagcccctcgcgccccgccgcagccccggccaaccgagcgccatgaaccagatagagcccggcgtgcagtacaactacgtgtacgacgaggatgagtacatgatccaggaggaggagtgggaccgcgacctgctcctggacccagcctgggagaagcagcagaggaagaccttcactgcctggtgtaactcccacctaaggaaagccggcacccagattgagaacatcgaggaagacttcaggaatggccttaagctcatgctgcttttggaagtcatctcaggggaaaggctgcccaaacctgaccggggaaaaatgcggttccacaaaattgctaatgtcaacaaagctttggattacatagccagcaaaggggtgaaactggtgtccattggcgctgaagaaattgttgatggcaacgtgaaaatgaccctgggtatgatctggaccatcatccttcgctttgctattcaggatatttcggttgaagaaacatctgccaaagaaggtctgctgctttggtgtcagaggaaaactgctccttatagaaatgtgaacattcagaacttccatactagctggaaagatggccttggactctgtgccctcatccaccgacaccggcctgacctcattgactactcaaagcttaacaaggatgaccccataggaaatattaacctggccatggaaatcgctgagaagcacctggatattcctaaaatgttggatgctgaagacatcgtgaacacccctaaacccgatgaaagagccatcatgacgtacgtctcttgcttctaccacgcttttgcgggcgcggagcaggccgagacagcggctaacaggatatgtaaggttcttgctgtgaatcaagagaatgagaggctgatggaagaatatgagaggctagcgagtgagcttttggaatggattcgtcgcacgatcccctggctggagaaccggactcccgagaagaccatgcaagccatgcagaagaagctggaggacttccgggattaccgccggaagcacaagccacccaaggtgcaggagaaatgccagctggagatcaacttcaacacgctgcagaccaagctgcggatcagcaaccgtcctgccttcatgccctccgagggcaagatggtgtcggatattgctggtgcctggcagaggctggagcaggctgagaagggttacgaggagtggttgctcaatgagattcggagactggagcgcttggaacacctggctgagaagttcaggcagaaggcctcaacgcacgagacttgggcttatggcaaagagcagatcttgctgcagaaggattacgagtcggcgtcgctgacagaggtgcgggctctgctgcggaagcacgaggcgttcgagagcgacctggcagcgcaccaggaccgcgtggagcagatcgcagccatcgcgcaggagctcaatgaactggactatcacgacgctgtgaatgtcaatgatcggtgccagaaaatttgtgaccagtgggaccgactgggaacgcttactcagaagaggagagaagccctagagagaatggagaaattgctagaaaccattgatcagcttcacctggagtttgccaagagggctgctcctttcaacaattggatggagggcgctatggaggatctgcaagatatgttcattgtccacagcattgaggagatccagagtctgatcactgcgcatgagcagttcaaggccacgctgcccgaggcggacggagagcggcagtccatcatggccatccagaacgaggtggagaaggtgattcagagctacaacatcagaatcagctcaagcaacccgtacagcactgtcaccatggatgagctccggaccaagtgggacaaggtgaagcaactcgtgcccatccgcgatcaatccctgcaggaggagctggctcgccagcatgctaacgagcgtctgaggcgccagtttgctgcccaagccaatgccattgggccctggatccagaacaagatggaggagattgcccggagctccatccagatcacaggagccctggaagaccagatgaaccagctgaagcagtatgagcacaacatcatcaactataagaacaacatcgacaagctggagggagaccatcagctcatccaggaggcccttgtctttgacaacaagcacacgaactacacgatggagcacattcgtgttggatgggagctgctgctgacaaccatcgccagaaccatcaatgaggtggagactcagatcctgacgagagatgcgaagggcatcacccaggagcagatgaatgagttcagagcctccttcaaccactttgacaggaggaagaatggcctgatggatcatgaggatttcagagcctgcctgatttccatgggttatgacctgggtgaagccgaatttgcccgcattatgaccctggtagatcccaacgggcaaggcaccgtcaccttccaatccttcatcgacttcatgactagagagacggctgacaccgacactgccgagcaggtcatcgcctccttccggatcctggcttctgataagccatacatcctggcggaggagctgcgtcgggagctgcccccggatcaggcccagtactgcatcaagaggatgcccgcctactcgggcccaggcagtgtgcctggtgcactggattacgctgcgttctcttccgcactctacggggagagcgatctgtgatgctgagcttctgtaatcactcatcccatcagaatgcaataaaagcggaagtcacagtttgtttcctggaaactttgacaagctttattaagttgagagagagagaggggaaaaaaaaaagcctttcgtagttcagtaattgccagcaatataacacggctaaaatgaagtttttacagtatatgacatagtgcgcttcataaataggtttatttctgagtttttagcaaaatgtaatgaaatatcaggttgatttctttgattaaacagaacaaattacttgagtaataggaaattaggaggatctagggacagaaggaaagtgaaaaatgtgaaaatacaaaatacccaagatttaagaccggggggaaaaaaccacaaattggtaaataaaggtttgctatttgtaaaaaatttcatttatctctaatatgcttatgtgattgcccctaggggagtatatttgggattctaatgttttattttcatgcttatccaaagattactattgtatcttcaaatgaatttaatattgtgagatggaactgccggggattaaaaagactacccaaaagatttttggcacttacaatttttaaaatagtttatgtcatctcttcattatttagggctggatggtcaactcagtcagtgattttttgatgcttctcttatcctccagaatagagacctaaggacacgtggaagtcagtttaattgccagagagaaggatgcaatcactaggtaaaatgaggtttttaggattatttattgattccaggttcccatgctttttgttagagcttattagtacaggttctcaagagatgaccacataaaagtgctctgtttataaataagcaggtttctgtagtactgactggttcatcacaaggcaagtcagaaaccagtatccttctagctctccagtcaggacttccttatgcctctagttttatgaccggttaaggagaagccagagttagagtaggagaggactaattctcagcagcagtggaggtgagttctttcttttgcggaagctttacatatgttttgtgtagtaggaataactagatattttagctagtgtgcggtgtgtgttcacccctgggattggacagtgtatcctaacaagtcccatgtctggttctgtgtctaaaggcctgctccatgacacaggatgctacatgcactcctgctagcacatcttgatctgttgaatgttcattctttctttttgctcatactgctgtaggctataattcccccctgtttttccatcttgttgacagcttgtagagaataaagcaggaattctttttatatctgagtccttaatgatcaggaaatggattacaaacaaacaaaaacagttgcaaacagcaattaaagcattactagagaagcagtaacatgtctgttacctacagtctgtttgctcagatttttatagatttccaccaacagctggaaatgtaatatttccattccaagctgtctgacagcttgactcttcttcctacactgggccatttagaaccttcaacctttatgaatttcacttaatttgcttcattattaagtaattggtagtttccagattcctgaaatatttgaatccttgagtttaatgccaaacacttttggggtggtttagatgaactctgactctattttatttcaagtaggtgctatatcccggccataaacccctatagaaaagccagaaagttgtgcttcctttgaggctattagggggctctgtggtgttttaggatgggtgtgggtaactcatctacctaaacttttaatttctttacaacattcagcaagagagggggtcagtagtctctatctgctaataaatgaagaaaggaagtaaactctgaaaaataataaacatgtttatactctcattttaggtattatttttatttctgaagctggatgctcaaaaattaaaacgtttataagtttctaaattaaacttaatttataaaagaaaaaa

SEQ ID NO: 372 - DNA, 1632 bp, Homo sapiens
  source 1..1632: mol_type = unassigned DNA
gcccaggcgtgtcgccccgagaggagccgcgcgaaggtcaccccgcgcccgccgcccgccgcccgccgcctccgtgggtccgtttgccagtcagcccgtgcgtccgagcccctcgcgccccgccgcagccccggccaaccgagcgccatgaaccagatagagcccggcgtgcagtacaactacgtgtacgacgaggatgagtacatgatccaggaggaggagtgggaccgcgacctgctcctggacccagcctgggagaagcagcagaggaagaccttcactgcctggtgtaactcccacctaaggaaagccggcacccagattgagaacatcgaggaagacttcaggaatggccttaagctcatgctgcttttggaagtcatctcaggggaaaggctgcccaaacctgaccggggaaaaatgcggttccacaaaattgctaatgtcaacaaagctttggattacatagccagcaaaggggtgaaactggtgtccattggcgctgaagaaattgttgatggcaacgtgaaaatgaccctgggtatgatctggaccatcatccttcgctttgctattcaggatatttcggttgaagaaacatctgccaaagaaggtctgctgctttggtgtcagaggaaaactgctccttatagaaatgtgaacattcagaacttccatactagctggaaagatggccttggactctgtgccctcatccaccgacaccggcctgacctcattgactactcaaagcttaacaaggatgaccccataggaaatattaacctggccatggaaatcgctgagaagcacctggatattcctaaaatgttggatgctgaagatttagtatacactgccagacccgatgaaagagccataatgacttatgtttcctgttactatcatgcttttgctggtgcacagaagacatcgtgaacacccctaaacccgatgaaagagccatcatgacgtacgtctcttgcttctaccacgcttttgcgggcgcggagcaggccgagacagcggctaacaggatatgtaaggttcttgctgtgaatcaagagaatgagaggctgatggaagaatatgagaggctagcgagtgagcttttggaatggattcgtcgcacgatcccctggctggagaaccggactcccgagaagaccatgcaagccatgcagaagaagctggaggacttccgggattaccgccggaagcacaagccacccaaggtgcaggagaaatgccagctggagatcaacttcaacacgctgcagaccaagctgcggatcagcaaccgtcctgccttcatgccctccgagggcaagatggtgtcggatattgctggtgcctggcagaggctggagcaggctgagaagggttacgaggagtggttgctcaatgagattcggagactggagcgcttggaacacctggctgagaagttcaggcagaaggcctcaacgcacgagacttgggcttatggcaaagagcagatcttgctgcagaaggattacgagtcggcgtcgctgacagaggtgcgggctctgctgcggaagcacgaggcgttcgagagcgacctggcagcgcaccaggaccgcgtggagcagatcgcagccatcgcgcagg

SEQ ID NO: 373 - DNA, 453 bp, Homo sapiens
  source 1..453: mol_type = unassigned DNA
gcacgccaccctcctcgtcccctctcatcacccacctcgttccatgctgtgtgtgcgcattcccgtcgacagagccgtcctgtttacctattgtgttttacaggccgagacagcggctaacaggatatgtaaggttcttgctgtgaatcaagagaatgagaggctgatggaagaatatgagaggctagcgagtgagcttttggaatggattcgtcgcacgatcccctggctggagaaccggactcccgagaagaccatgcaagccatgcagaagaagctggaggacttccgggattaccgccggaagcacaagccacccaaggtgcaggagaaatgccagctggagatcaacttcaacacgctgcagaccaagctgcggatcagcaaccgtcctgccttcatgccctccgagggcaagatggtgtcggatattgctggtgcctggcagaggct

SEQ ID NO: 374 - DNA, 341 bp, Homo sapiens
  source 1..341: mol_type = unassigned DNA
tgatcggtgccagaaaatttgtgaccagtgggaccgactgggaacgcttactcagaagaggagagaagccctagaggttgcctagtgaaaggaacctctaaagaaaacatgaaaagtggaagaaagagggaaatgggaagttgggagctttgtgctgtaatttatccagacagcagcgaagtatatttttcaattttaaaaaatccaggggtgatgagattacggcataaatctactttgtatctggtagtaacagtacgtttccaaaagtccttctacctgagtaaattgagctgtgagtgagtcgggaaatcagagatgtgcaaagggaagatggaacc

SEQ ID NO: 375 - DNA, 841 bp, Homo sapiens
  source 1..841: mol_type = unassigned DNA
tgagaccacagctggcctctaacccttgttgtccttgggccctgacaggtgaagcaactcgtgcccatccgcgatcaatccctgcaggaggagctggctcgccagcatgctaacgagcgtctgaggcgccagtttgctgcccaagccaatgccattgggccctggatccagaacaagatggaggagattgcccggagctccatccagatcacaggagccctggaagaccagatgaaccagctgaagcagtatgagcacaacatcatcaactataagaacaacatcgacaagctggagggagaccatcagctcatccaggaggcccttgtctttgacaacaagcacacgaactacacgatggagcacattcgtgttggatgggagctgctgctgacaaccatcgccagaaccatcaatgaggtggagactcagatcctgacgagagatgcgaagggcatcacccaggagcagatgaatgagttcagagcctccttcaaccactttgacaggaggaagaatggcctgatggatcatgaggatttcagagcctgcctgatttccatgggttatgacctgggtgaagccgaatttgcccgcattatgaccctggtagatcccaacgggcaaggcaccgtcaccttccaatccttcatcgacttcatgactagagagacggctgacaccgacactgccgagcaggtcatcgcctccttccggatcctggcttctgataagccatacatcctggcggaggagctgcgtcgggagctgcccccggatcaggcccagtactgcatcaagaggatgcccgcctactcgggcccaggcagtgtgcctggtg

SEQ ID NO: 376 - DNA, 5103 bp, Homo sapiens
  source 1..5103: mol_type = unassigned DNA
gacgggcggcgcggctattaagccgcgcggcagctgctcgcagccggagctggtgcttcgcccgagacccagcgcccaggcgtgtcgccccgagaggagccgcgcgaaggtcaccccgcgcccgccgcccgccgcccgccgcctccgtgggtccgtttgccagtcagcccgtgcgtccgagcccctcgcgccccgccgcagccccggccaaccgagcgccatgaaccagatagagcccggcgtgcagtacaactacgtgtacgacgaggatgagtacatgatccaggaggaggagtgggaccgcgacctgctcctggacccagcctgggagaagcagcagaggaagaccttcactgcctggtgtaactcccacctaaggaaagccggcacccagattgagaacatcgaggaagacttcaggaatggccttaagctcatgctgcttttggaagtcatctcaggggaaaggctgcccaaacctgaccggggaaaaatgcggttccacaaaattgctaatgtcaacaaagctttggattacatagccagcaaaggggtgaaactggtgtccattggcgctgaagaaattgttgatggcaacgtgaaaatgaccctgggtatgatctggaccatcatccttcgctttgctattcaggatatttcggttgaagaaacatctgccaaagaaggtctgctgctttggtgtcagaggaaaactgctccttatagaaatgtgaacattcagaacttccatactagctggaaagatggccttggactctgtgccctcatccaccgacaccggcctgacctcattgactactcaaagcttaacaaggatgaccccataggaaatattaacctggccatggaaatcgctgagaagcacctggatattcctaaaatgttggatgctgaagatttagtatacactgccagacccgatgaaagagccataatgacttatgtttcctgttactatcatgcttttgctggtgcacagaagacatcgtgaacacccctaaacccgatgaaagagccatcatgacgtacgtctcttgcttctaccacgcttttgcgggcgcggagcaggttagacaaagtcttaaagcacactcagctctgtggaaggatccccctccagaaagttctacatgttcatatcaggagatgaggaggtcttcagtgaattcaagtgcaatggccgagacagcggctaacaggatatgtaaggttcttgctgtgaatcaagagaatgagaggctgatggaagaatatgagaggctagcgagtgagcttttggaatggattcgtcgcacgatcccctggctggagaaccggactcccgagaagaccatgcaagccatgcagaagaagctggaggacttccgggattaccgccggaagcacaagccacccaaggtgcaggagaaatgccagctggagatcaacttcaacacgctgcagaccaagctgcggatcagcaaccgtcctgccttcatgccctccgagggcaagatggtgtcggatattgctggtgcctggcagaggctggagcaggctgagaagggttacgaggagtggttgctcaatgagattcggagactggagcgcttggaacacctggctgagaagttcaggcagaaggcctcaacgcacgagacttgggcttatggcaaagagcagatcttgctgcagaaggattacgagtcggcgtcgctgacagaggtgcgggctctgctgcggaagcacgaggcgttcgagagcgacctggcagcgcaccaggaccgcgtggagcagatcgcagccatcgcgcaggagctcaatgaactggactatcacgacgctgtgaatgtcaatgatcggtgccagaaaatttgtgaccagtgggaccgactgggaacgcttactcagaagaggagagaagccctagagagaatggagaaattgctagaaaccattgatcagcttcacctggagtttgccaagagggctgctcctttcaacaattggatggagggcgctatggaggatctgcaagatatgttcattgtccacagcattgaggagatccagagtctgatcactgcgcatgagcagttcaaggccacgctgcccgaggcggacggagagcggcagtccatcatggccatccagaacgaggtggagaaggtgattcagagctacaacatcagaatcagctcaagcaacccgtacagcactgtcaccatggatgagctccggaccaagtgggacaaggtgaagcaactcgtgcccatccgcgatcaatccctgcaggaggagctggctcgccagcatgctaacgagcgtctgaggcgccagtttgctgcccaagccaatgccattgggccctggatccagaacaagatggaggagattgcccggagctccatccagatcacaggagccctggaagaccagatgaaccagctgaagcagtatgagcacaacatcatcaactataagaacaacatcgacaagctggagggagaccatcagctcatccaggaggcccttgtctttgacaacaagcacacgaactacacgatggagcacattcgtgttggatgggagctgctgctgacaaccatcgccagaaccatcaatgaggtggagactcagatcctgacgagagatgcgaagggcatcacccaggagcagatgaatgagttcagagcctccttcaaccactttgacaggaggaagaatggcctgatggatcatgaggatttcagagcctgcctgatttccatgggttatgacctgggtgaagccgaatttgcccgcattatgaccctggtagatcccaacgggcaaggcaccgtcaccttccaatccttcatcgacttcatgactagagagacggctgacaccgacactgccgagcaggtcatcgcctccttccggatcctggcttctgataagccatacatcctggcggaggagctgcgtcgggagctgcccccggatcaggcccagtactgcatcaagaggatgcccgcctactcgggcccaggcagtgtgcctggtgcactggattacgctgcgttctcttccgcactctacggggagagcgatctgtgatgctgagcttctgtaatcactcatcccatcagaatgcaataaaagcggaagtcacagtttgtttcctggaaactttgacaagctttattaagttgagagagagagaggggaaaaaaaaaagcctttcgtagttcagtaattgccagcaatataacacggctaaaatgaagtttttacagtatatgacatagtgcgcttcataaataggtttatttctgagtttttagcaaaatgtaatgaaatatcaggttgatttctttgattaaacagaacaaattacttgagtaataggaaattaggaggatctagggacagaaggaaagtgaaaaatgtgaaaatacaaaatacccaagatttaagaccggggggaaaaaaccacaaattggtaaataaaggtttgctatttgtaaaaaatttcatttatctctaatatgcttatgtgattgcccctaggggagtatatttgggattctaatgttttattttcatgcttatccaaagattactattgtatcttcaaatgaatttaatattgtgagatggaactgccggggattaaaaagactacccaaaagatttttggcacttacaatttttaaaatagtttatgtcatctcttcattatttagggctggatggtcaactcagtcagtgattttttgatgcttctcttatcctccagaatagagacctaaggacacgtggaagtcagtttaattgccagagagaaggatgcaatcactaggtaaaatgaggtttttaggattatttattgattccaggttcccatgctttttgttagagcttattagtacaggttctcaagagatgaccacataaaagtgctctgtttataaataagcaggtttctgtagtactgactggttcatcacaaggcaagtcagaaaccagtatccttctagctctccagtcaggacttccttatgcctctagttttatgaccggttaaggagaagccagagttagagtaggagaggactaattctcagcagcagtggaggtgagttctttcttttgcggaagctttacatatgttttgtgtagtaggaataactagatattttagctagtgtgcggtgtgtgttcacccctgggattggacagtgtatcctaacaagtcccatgtctggttctgtgtctaaaggcctgctccatgacacaggatgctacatgcactcctgctagcacatcttgatctgttgaatgttcattctttctttttgctcatactgctgtaggctataattcccccctgtttttccatcttgttgacagcttgtagagaataaagcaggaattctttttatatctgagtccttaatgatcaggaaatggattacaaacaaacaaaaacagttgcaaacagcaattaaagcattactagagaagcagtaacatgtctgttacctacagtctgtttgctcagatttttatagatttccaccaacagctggaaatgtaatatttccattccaagctgtctgacagcttgactcttcttcctacactgggccatttagaaccttcaacctttatgaatttcacttaatttgcttcattattaagtaattggtagtttccagattcctgaaatatttgaatccttgagtttaatgccaaacacttttggggtggtttagatgaactctgactctattttatttcaagtaggtgctatatcccggccataaacccctatagaaaagccagaaagttgtgcttcctttgaggctattagggggctctgtggtgttttaggatgggtgtgggtaactcatctacctaaacttttaatttctttacaacattcagcaagagagggggtcagtagtctctatctgctaataaatgaagaaaggaagtaaactctgaaaaataataaacatgtttatactctcattttaggtattatttttatttctgaagctggatgctcaaaaattaaaacgtttataagtttctaaattaaacttaatttat

SEQ ID NO: 377 - DNA, 4906 bp, Homo sapiens
  source 1..4906: mol_type = unassigned DNA
gacgggcggcgcggctattaagccgcgcggcagctgctcgcagccggagctggtgcttcgcccgagacccagcgcccaggcgtgtcgccccgagaggagccgcgcgaaggtcaccccgcgcccgccgcccgccgcccgccgcctccgtgggtccgtttgccagtcagcccgtgcgtccgagcccctcgcgccccgccgcagccccggccaaccgagcgccatgaaccagatagagcccggcgtgcagtacaactacgtgtacgacgaggatgagtacatgatccaggaggaggagtgggaccgcgacctgctcctggacccagcctgggagaagcagcagaggaagaccttcactgcctggtgtaactcccacctaaggaaagccggcacccagattgagaacatcgaggaagacttcaggaatggccttaagctcatgctgcttttggaagtcatctcaggggaaaggctgcccaaacctgaccggggaaaaatgcggttccacaaaattgctaatgtcaacaaagctttggattacatagccagcaaaggggtgaaactggtgtccattggcgctgaagaaattgttgatggcaacgtgaaaatgaccctgggtatgatctggaccatcatccttcgctttgctattcaggatatttcggttgaagaaacatctgccaaagaaggtctgctgctttggtgtcagaggaaaactgctccttatagaaatgtgaacattcagaacttccatactagctggaaagatggccttggactctgtgccctcatccaccgacaccggcctgacctcattgactactcaaagcttaacaaggatgaccccataggaaatattaacctggccatggaaatcgctgagaagcacctggatattcctaaaatgttggatgctgaagatttagtatacactgccagacccgatgaaagagccataatgacttatgtttcctgttactatcatgcttttgctggtgcacagaaggccgagacagcggctaacaggatatgtaaggttcttgctgtgaatcaagagaatgagaggctgatggaagaatatgagaggctagcgagtgagcttttggaatggattcgtcgcacgatcccctggctggagaaccggactcccgagaagaccatgcaagccatgcagaagaagctggaggacttccgggattaccgccggaagcacaagccacccaaggtgcaggagaaatgccagctggagatcaacttcaacacgctgcagaccaagctgcggatcagcaaccgtcctgccttcatgccctccgagggcaagatggtgtcggatattgctggtgcctggcagaggctggagcaggctgagaagggttacgaggagtggttgctcaatgagattcggagactggagcgcttggaacacctggctgagaagttcaggcagaaggcctcaacgcacgagacttgggcttatggcaaagagcagatcttgctgcagaaggattacgagtcggcgtcgctgacagaggtgcgggctctgctgcggaagcacgaggcgttcgagagcgacctggcagcgcaccaggaccgcgtggagcagatcgcagccatcgcgcaggagctcaatgaactggactatcacgacgctgtgaatgtcaatgatcggtgccagaaaatttgtgaccagtgggaccgactgggaacgcttactcagaagaggagagaagccctagagagaatggagaaattgctagaaaccattgatcagcttcacctggagtttgccaagagggctgctcctttcaacaattggatggagggcgctatggaggatctgcaagatatgttcattgtccacagcattgaggagatccagagtctgatcactgcgcatgagcagttcaaggccacgctgcccgaggcggacggagagcggcagtccatcatggccatccagaacgaggtggagaaggtgattcagagctacaacatcagaatcagctcaagcaacccgtacagcactgtcaccatggatgagctccggaccaagtgggacaaggtgaagcaactcgtgcccatccgcgatcaatccctgcaggaggagctggctcgccagcatgctaacgagcgtctgaggcgccagtttgctgcccaagccaatgccattgggccctggatccagaacaagatggaggagattgcccggagctccatccagatcacaggagccctggaagaccagatgaaccagctgaagcagtatgagcacaacatcatcaactataagaacaacatcgacaagctggagggagaccatcagctcatccaggaggcccttgtctttgacaacaagcacacgaactacacgatggagcacattcgtgttggatgggagctgctgctgacaaccatcgccagaaccatcaatgaggtggagactcagatcctgacgagagatgcgaagggcatcacccaggagcagatgaatgagttcagagcctccttcaaccactttgacaggaggaagaatggcctgatggatcatgaggatttcagagcctgcctgatttccatgggttatgacctgggtgaagccgaatttgcccgcattatgaccctggtagatcccaacgggcaaggcaccgtcaccttccaatccttcatcgacttcatgactagagagacggctgacaccgacactgccgagcaggtcatcgcctccttccggatcctggcttctgataagccatacatcctggcggaggagctgcgtcgggagctgcccccggatcaggcccagtactgcatcaagaggatgcccgcctactcgggcccaggcagtgtgcctggtgcactggattacgctgcgttctcttccgcactctacggggagagcgatctgtgatgctgagcttctgtaatcactcatcccatcagaatgcaataaaagcggaagtcacagtttgtttcctggaaactttgacaagctttattaagttgagagagagagaggggaaaaaaaaaagcctttcgtagttcagtaattgccagcaatataacacggctaaaatgaagtttttacagtatatgacatagtgcgcttcataaataggtttatttctgagtttttagcaaaatgtaatgaaatatcaggttgatttctttgattaaacagaacaaattacttgagtaataggaaattaggaggatctagggacagaaggaaagtgaaaaatgtgaaaatacaaaatacccaagatttaagaccggggggaaaaaaccacaaattggtaaataaaggtttgctatttgtaaaaaatttcatttatctctaatatgcttatgtgattgcccctaggggagtatatttgggattctaatgttttattttcatgcttatccaaagattactattgtatcttcaaatgaatttaatattgtgagatggaactgccggggattaaaaagactacccaaaagatttttggcacttacaatttttaaaatagtttatgtcatctcttcattatttagggctggatggtcaactcagtcagtgattttttgatgcttctcttatcctccagaatagagacctaaggacacgtggaagtcagtttaattgccagagagaaggatgcaatcactaggtaaaatgaggtttttaggattatttattgattccaggttcccatgctttttgttagagcttattagtacaggttctcaagagatgaccacataaaagtgctctgtttataaataagcaggtttctgtagtactgactggttcatcacaaggcaagtcagaaaccagtatccttctagctctccagtcaggacttccttatgcctctagttttatgaccggttaaggagaagccagagttagagtaggagaggactaattctcagcagcagtggaggtgagttctttcttttgcggaagctttacatatgttttgtgtagtaggaataactagatattttagctagtgtgcggtgtgtgttcacccctgggattggacagtgtatcctaacaagtcccatgtctggttctgtgtctaaaggcctgctccatgacacaggatgctacatgcactcctgctagcacatcttgatctgttgaatgttcattctttctttttgctcatactgctgtaggctataattcccccctgtttttccatcttgttgacagcttgtagagaataaagcaggaattctttttatatctgagtccttaatgatcaggaaatggattacaaacaaacaaaaacagttgcaaacagcaattaaagcattactagagaagcagtaacatgtctgttacctacagtctgtttgctcagatttttatagatttccaccaacagctggaaatgtaatatttccattccaagctgtctgacagcttgactcttcttcctacactgggccatttagaaccttcaacctttatgaatttcacttaatttgcttcattattaagtaattggtagtttccagattcctgaaatatttgaatccttgagtttaatgccaaacacttttggggtggtttagatgaactctgactctattttatttcaagtaggtgctatatcccggccataaacccctatagaaaagccagaaagttgtgcttcctttgaggctattagggggctctgtggtgttttaggatgggtgtgggtaactcatctacctaaacttttaatttctttacaacattcagcaagagagggggtcagtagtctctatctgctaataaatgaagaaaggaagtaaactctgaaaaataataaacatgtttatactctcattttaggtattatttttatttctgaagctggatgctcaaaaattaaaacgtttataagtttctaaattaaacttaatttat

SEQ ID NO: 378 - DNA, 1566 bp, Homo sapiens
  source 1..1566: mol_type = unassigned DNA
agcatccgggctcccggcagcggcgctgcggcggctcgcgggagacgctgcgcgcggggctagcgggcggcggagcggacggcgacggggcgctctcgggctgccggcggggccgagcgccgcgcgtcccgagcatggcaggctccctgcctccctgcgtggtggactgtggcaccgggtataccaagcttggctacgcaggcaacactgagccccagttcattattccttcatgtattgccatcagagagtcagcaaaggtagttgaccaagctcaaaggagagtgttgaggggagttgatgaccttgactttttcataggagatgaagccatcgataaacctacatatgctacaaagtggccgatacgacatggaatcattgaagactgggatcttatggaaaggttcatggagcaagtggtttttaaatatcttcgagctgaacctgaggaccattattttttaatgacagaacctccactcaatacaccagaaaacagagagtatcttgcagaaattatgtttgaatcatttaacgtaccaggactctacattgcagttcaggcagtgctggccttggcggcatcttggacatctcgacaagtgggtgaacgtacgttaacggggatagtcattgacagcggagatggagtcacccatgttatcccagtggcagaaggttatgtaattggaagctgcatcaaacacatcccgattgcaggtagagatattacgtatttcattcaacagctgctaagggagagggaggtgggaatccctcctgagcagtcactggagaccgcaaaagccattaaggagaaatactgttacatttgccccgatatagtcaaggaatttgccaagtatgatgtggatccccggaagtggatcaaacagtacacgggtatcaatgcgatcaaccagaagaagtttgttatagacgttggttacgaaagattcctgggacctgaaatattctttcacccggagtttgccaacccagactttatggagtccatctcagatgttgttgatgaagtaatacagaactgccccatcgatgtgcggcgcccgctgtataagcccgagttctttcaggtctgccacaccaagaaggactatgaagagtacgggcccagcatctgccgccacaaccccgtctttggagtcatgtcctagtgtctgcctgaacgcgtcgttcgatggtgtcacgttggggaacaagtgtccttcagaacccagagaaggccgccgttctgtaaatagcgacgtcggtgttgctgcccagcagcgtgcttgcattgccggtgcatgaggcgcggcgcgggcccttcagtaaaagccatttatccgtgtgccgaccgctgtctgccagcctcctccttctcccgccctcctcaccctcgctctccctcctcctcctcctccgagctgctagctgacaaatacaattctgaaggaatccaaatgtgactttgaaaattgttagagaaaacaacattagaaaatggcgcaaaatcgttaggtcccaggagagaatgtgggggcgcaaacccttttcctc

SEQ ID NO: 379 - DNA, 2216 bp, Homo sapiens
  source 1..2216: mol_type = unassigned DNA
agcatccgggctcccggcagcggcgctgcggcggctcgcgggagacgctgcgcgcggggctagcgggcggcggagcggacggcgacggggcgctctcgggctgccggcggggccgagcgccgcgcgtcccgagcatggcaggctccctgcctccctgcgtggtggactgtggcaccgggtataccaagcttggctacgcaggcaacactgagccccagttcattattccttcatgtattgccatcagagagtcagcaaaggtagttgaccaagctcaaaggagagtgttgaggggagttgatgaccttgactttttcataggagatgaagccatcgataaacctacatatgctacaaagtggccgatacgacatggaatcattgaagactgggatcttatggaaaggttcatggagcaagtggtttttaaatatcttcgagctgaacctgaggaccattattttttaatgacagaacctccactcaatacaccagaaaacagagagtatcttgcagaaattatgtttgaatcatttaacgtaccaggactctacattgcagttcaggcagtgctggccttggcggcatcttggacatctcgacaagtgggtgaacgtacgttaacggggatagtcattgacagcggagatggagtcacccatgttatcccagtggcagaaggttatgtaattggaagctgcatcaaacacatcccgattgcaggtagagatattacgtatttcattcaacagctgctaagggagagggaggtgggaatccctcctgagcagtcactggagaccgcaaaagccattaaggagaaatactgttacatttgccccgatatagtcaaggaatttgccaagtatgatgtggatccccggaagtggatcaaacagtacacgggtatcaatgcgatcaaccagaagaagtttgttatagacgttggttacgaaagattcctgggacctgaaatattctttcacccggagtttgccaacccagactttatggagtccatctcagatgttgttgatgaagtaatacagaactgccccatcgatgtgcggcgcccgctgtataagaatgtcgtactctcaggaggctccaccatgttcagggatttcggacgccgactgcagagggatttgaagagagtggtggatgctaggctgaggctcagcgaggagctcagcggcgggaggatcaagccgaagcctgtggaggtccaggtggtcacgcatcacatgcagcgctacgccgtgtggttcggaggctccatgctggcctcgactcccgagttctttcaggtctgccacaccaagaaggactatgaagagtacgggcccagcatctgccgccacaaccccgtctttggagtcatgtcctagtgtctgcctgaacgcgtcgttcgatggtgtcacgttggggaacaagtgtccttcagaacccagagaaggccgccgttctgtaaatagcgacgtcggtgttgctgcccagcagcgtgcttgcattgccggtgcatgaggcgcggcgcgggcccttcagtaaaagccatttatccgtgtgccgaccgctgtctgccagcctcctccttctcccgccctcctcaccctcgctctccctcctcctcctcctccgagctgctagctgacaaatacaattctgaaggaatccaaatgtgactttgaaaattgttagagaaaacaacattagaaaatggcgcaaaatcgttaggtcccaggagagaatgtgggggcgcaaacccttttcctcccagcctatttttgtaaataaaatgtttaaacttgaaatacaaatcgatgtttatatttcctatcattttgtattttatggtatttggtacaactggctgatactaagcacgaatagatattgatgttatggagtgctgtaatccaaagtttttaattgtgaggcatgttctgatatgtttataggcaaacaaataaaacagcaaacttttttgccacatgtttgctagaaaatgattatactttattggagtgacatgaagtttgaacactaaacagtaatgtatgagaattactacagatacatgtatcttttagttttttttgtttgaactttctggagctgttttatagaagatgatggtttgttgtcggtgagtgttggatgaaatacttccttgcaccattgtaataaaagctgttagaatatttgtaaatatc

SEQ ID NO: 380 - DNA, 1692 bp, Homo sapiens
  source 1..1692: mol_type = unassigned DNA
gggagacgctgcgcgcggggctagcgggcggcggagcggacggcgacggggcgctctcgggctgccggcggggccgagcgccgcgcgtcccgagcatggcaggctccctgcctccctgcgtggtggactgtggcaccgggtattgccatcagagagtcagcaaaggtagttgaccaagctcaaaggagagtgttgaggggagttgatgaccttgactttttcataggagatgaagccatcgataaacctacatatgctacaaagtggccgatacgacatggaatcattgaagactgggatcttatggaaaggttcatggagcaagtggtttttaaatatcttcgagctgaacctgaggaccattattttttaatgacagaacctccactcaatacaccagaaaacagagagtatcttgcagaaattatgtttgaatcatttaacgtaccaggactctacattgcagttcaggcagtgctggccttggcggcatcttggacatctcgacaagtgggtgaacgtacgttaacggggatagtcattgacagcggagatggagtcacccatgttatcccagtggcagaaggttatgtaattggaagctgcatcaaacacatcccgattgcaggtagagatattacgtatttcattcaacagctgctaagggagagggaggtgggaatccctcctgagcagtcactggagaccgcaaaagccattaaggagaaatactgttacatttgccccgatatagtcaaggaatttgccaagtatgatgtggatccccggaagtggatcaaacagtacacgggtatcaatgcgatcaaccagaagaagtttgttatagacgttggttacgaaagattcctgggacctgaaatattctttcacccggagtttgccaacccagactttatggagtccatctcagatgttgttgatgaagtaatacagaactgccccatcgatgtgcggcgcccgctgtataagaatgtcgtactctcaggaggctccaccatgttcagggatttcggacgccgactgcagagggatttgaagagagtggtggatgctaggctgaggctcagcgaggagctcagcggcgggaggatcaagccgaagcctgtggaggtccaggtggtcacgcatcacatgcagcgctacgccgtgtggttcggaggctccatgctggcctcgactcccgagttctttcaggtctgccacaccaagaaggactatgaagagtacgggcccagcatctgccgccacaaccccgtctttggagtcatgtcctagtgtctgcctgaacgcgtcgttcgatggtgtcacgttggggaacaagtgtccttcagaacccagagaaggccgccgttctgtaaatagcgacgtcggtgttgctgcccagcagcgtgcttgcattgccggtgcatgaggcgcggcgcgggcccttcagtaaaagccatttatccgtgtgccgaccgctgtctgccagcctcctccttctcccgccctcctcaccctcgctctccctcctcctcctcctccgagctgctagctgacaaatacaattctgaaggaatccaaatgtgactttgaaaattgttagagaaaacaacattagaaaatggcgcaaaatcgttaggtcccaggagagaatgtgggggcgcaaacccttttcctcccagcctattt

SEQ ID NO: 381 - DNA, 319 bp, Homo sapiens
  source 1..319: mol_type = unassigned DNA
gaagccatcgataaacctacatatgctacaaagtggccgatacgacatggaatcattgaagactgggatcttatggaaaggttcatggagcaagtggtttttaaatatcttcgagctgaacctgaggaccattattttttaatggggtaactatctccttcctgctgtaatcagtgaccagacagaacctccactcaatacaccagaaaacagagagtatcttgcagaaattatgtttgaatcatttaacgtaccaggactctacattgcagttcaggcagtgctggccttggcggcatcttggacatctcgacaagtg

SEQ ID NO: 382 - DNA, 5543 bp, Homo sapiens
  source 1..5543: mol_type = unassigned DNA
aaatacaaaacttaactgagcgtgatggcatgtgcctgtaatcccagctactctggaggcagaggcaggagaattgcttgaattctgggaggtggagtctcccagagatccgagattgggctactgcacttgagcctggttgacagagtgagacgctgtctcaaaaaaaaaaaaaaaaaagttttcattacaaattgttgaagcagaaggatatttaaaaatgtatacggaatggagacacctctttttcacttaacaattcatcatagagattgtttcttcatagagttcatttttttaaattgttccaaagtgtttagtgatgggtatttaggttgtttctgatcttctgatacagacaatgttgactttttacctttccaagctactttgttttagttgggtctcttaacctcagaatgtaatttgattttgtttttgtttttaactgagagacttttagtagttgaatttcccatttgtatttgctgataattttagtaatagcaactcacttccattgaacacatctgtgtatccagtactgctctaagcacattatttagactgcctttaatctttccaactctctgagtggggtactaattacctgcactttacccatgaggagactcagggagagaggaaatagcttaccaagcctagtaaagtggaaggctgggatttgatcccagtcagtttgacttcacatctcttaatcggactggtatggcatgctactgtgtgacagatacgtttggtcttaatttaactattttttaaaaatgttatgcttcatgtttttaatgtattttatttatgtattagtattttttaactgaagacttgtttttctctttgctttttattgggtgtgtgttcttggtaataattaaaaggactcatgtttgcatattttagtataatttgatatatttaccctgtatttgtttaggggtaactatctccttcctgctgtaatcagtgaccaggttggtattgccacatgttcttgcctccccttccttctctccaccacctgcttttgattaatgatgtcactaaacttattccagtgttaacatttataactttatgtttactaatgcctctgatactttatcagttttaaataatatcttttgatttcactgtaagaggcaagtgtctttacactctctccttctttccttgtgcactgctcaacttgataacatttttttccattaaaatttataacatttacattctgttcttaattcccagaaaataaaagtctttttttttttttttttttttttttttttgagacggagtcttactccatcgcccaggctggaatgcagtggtgcgatctcagctcactgcaacctccgcctcccacgttcaagcaattctcctgcctcagccacccaagtagctgggactacaggtgcacaccaccatgcctggctaatttttgtatttttagtagagatggggtttcaccatgttggtcaggctggtctcaaactcctgacctcaggtgatccgcccgcctcggcctcccaaagtgctgggattacaggcatgagccaccgtgcccggccaaagaaaagtctttattcctacatcttaaatggcttcattgctcactgtaagtcttttgctggactttctgcattcttcttgagtggataaagtttatcctctaatagttcatgaacccatacattttggctcatgggaatgaaattttccaagttcttgtatgtttaaggatatatattttttctccttagtattttattttattgtttttttttaaattgacacataatgtgcatatttatggggtacagagtgaagttttgatacatataatgtgtggttatcagatcagggtaattagcatatccatcatctcaaatattagatattttgattttgtaacatacttgattgacactgtggccagatatagaattcttgggtcgtaccttcttcccttgaagactctaagtgtggccctatgtgtcctagtgttaaatgtagccgtgttgaaggctgaggctgattgtactttccctgtcgtaggggtgtattagtctactcggctgctgtaattttgtttataccacaggttgggtggcgtaaacagcagacagttcgttgttttctcacagttctggaggttagaagtccaaggtcgaggtgccgtcggggttggctcctggcgcagccctcttcctggcttgtatgtggtcacctttcctgctgggtcctcacatgcctttcccctgtgtgagcgtagagtggggagagaataggagagagagactgatttctggtgtctcttccttttcttagaagaccttcctccagtcctgtcaaattagggccccacccctatgacctcaggtaaccgtgatgacctcttgaaaggccctatttccaattatagtacactgggagttagggctttaatgtatgaactggaggtagggggagcacagttcattcataataaagggtaatgtatacgttttgcccaaaggtccagagactttttattttttcagttttaaatacgagatatagacccatatttgttgacaaggaaaaatgttcatagtatattgttgaatgagaaaaatcaagtttatttattctttttctgtttctgttgtctgtcattttgtcctgtttgatgacggttattgttttaaaatagatacttggattcttggaaatgtctttggaaattcttggcaatttttatctgctttgtttcaatatttttccagatattttttttttcggtcttttggagacaggatcttgctctgtcacccaggttggagtgcagtggcacaatcttggttcatgtagccttcacctccgaggctcaagtggtcctacctcagcccccgagtagctgggatcacaggcatgtgccaccacacttggctgacttttaaattttttcatagaggtggggtctcccaatattgcccaggctggtctcaaactcctggactcaagtgatcctccctcctcagcctcctaaagtgctaggatgatgggcgtgagctaccacgcctgcccctggatatgtgtttttgtctgccatttgtttttcctcttttctctgtcccttttctttctctttgagtgtttttatatcactgttggctggcttctttgtgccccttactcgtctctgaatgagcagagttcttctggactaatggcgtgtgggtaggctggggaggtcctgggcagcgtctgggggaagctgtgatctgccctggactcttcccttgccgctggactgtaagggtgcttggcctaaccctgcctgctctgccaccctgtggctcctcacaccggcctgtcctgagcaagggcttgctgctgctcctctggctctcctttgctgagacctgaagtcaccggttcgcctttgatgtcctcactcgtcttggttgtgttttcatagcccttggcaacttgcttctgggatattcagtttcggggtgtttaggtgttacgttattgaagataagagtttctttttctgtaacttgttctaatttgggtgggtaataagaacagaggccttcagagaagtatttactctgacgtcttaaagcttttaaggcccatggccagatttctttaatacactttgggcatcctctgtctgtaaaattagggaattgtataatgtcctcgctaacatactttcaggttaacctgtttatggttctgatgtatttacatgaaattcgggtaaacactaaatatagtgaatgttttcttacagacagaacctccactcaatacaccagaaaacagagagtatcttgcagaaattatgtttgaatcatttaacgtaccaggactctacattgcagttcagtgctggccttggcggcatcttggacatctcgacaagtgggtgaacgtacgttaacggggatagtcattgacagcggagatggagtcacccatgttatcccagtggcagaaggttatgtaattggaagctgcatcaaacacatcccgattgcaggtagagatattacgtatttcattcaacagctgctaagggagagggaggtgggaatccctcctgagcagtcactggagaccgcaaaagccattaaggagaaatactgttacatttgccccgatatagtcaaggaatttgccaagtatgatgtggatccccggaagtggatcaaacagtacacgggtatcaatgcgatcaaccagaagaagtttgttatagacgttggttacgaaagattcctgggacctgaaatattctttcacccggagtttgccaacccagactttatggagtccatctcagatgttgttgatgaagtaatacagaactgccccatcgatgtgcggcgcccgctgtataagaatgtcgtactctcaggaggctccaccatgttcagggatttcggacgccgactgcagagggatttgaagagagtggtggatgctaggctgaggctcagcgaggagctcagcggcgggaggatcaagccgaagcctgtggaggtccaggtggtcacgcatcacatgcagcgctacgccgtgtggttcggaggctccatgctggcctcgactcccgagttctttcaggtctgccacaccaagaaggactatgaagagtacgggcccagcatctgccgccacaaccccgtctttggagtcatgtcctagtgtctgcctgaacgcgtcgttcgatggtgtcacgttggggaacaagtgtccttcagaacccagagaaggccgccgttctgtaaatagcgacgtcggtgttgctgcccagcagcgtgcttgcattgccggtgcatgaggcgcggcgcgggcccttcagtaaaagccatttatccgtgtgccgaccgctgtctgccagcctcctccttctcccgccctcctcaccctcgctctccctcctcctcctcctccgagctgctagctgacaaatacaattctgaaggaatccaaatgtgactttgaaaattgttagagaaaacaacattagaaaatggcgcaaaatcgttaggtcccaggagagaatgtgggggcgcaaacccttttcctcccagcctatttttgtaaataaaatgtttaaacttgaaatacaaatcgatgtttatatttcctatcattttgtattttatggtatttggtacaactggctgatactaagcacgaatagatattgatgttatggagtgctgtaatccaaagtttttaattgtgaggcatgttctgatatgtttataggcaaacaaataaaacagcaaacttttttgccacatgtttgctagaaaatgattatactttattggagtgacatgaagtttgaacactaaacagtaatgtatgagaattactacagatacatgtatcttttagttttttttgtttgaactttctggagctgttttatagaagatgatggtttgttgtcggtgagtgttggatgaaatacttccttgcaccattgtaataaaagctgttagaatatttgt

SEQ ID NO: 383 - DNA, 4571 bp, Homo sapiens
  source 1..4571: mol_type = unassigned DNA
cgctgagccccggcgccgtccctgccgcccccacctctccgcgacccccgcccggccccgcgcccccgccccggctccgcagctggcgcctccccacccccgtccctgctcccgccctccccgcgccgctggcagccgcagcccccggaccgggaggaatgagcgagccatgaggctgctgcggcgctgggcgttcgcggctctgctgctgtcgctgctccccacgcccggtcttgggacccaaggtcctgctggagctctgcgatgggggggcttaccccagctgggaggcccaggagcccctgaggtcacggaacccagccgtctggttagggagagctccgggggagaggtccgaaagcagcagctggacacaagggtccgccaggagccaccagggggcccgcctgtccatctggcccaggtgagtttcgtcatcccagccttcaactcaaacttcaccctggacctggagctgaaccaccacctcctctcctcgcaatacgtggagcgccacttcagccgggaggggacaacccagcacagcaccggggctggagaccactgctactaccaggggaagctccgggggaacccgcactccttcgccgccctctccacctgccaggggctgcatggggtcttctctgatgggaacttgacttacatcgtggagccccaagaggtggctggaccttggggagcccctcagggaccccttccccacctcatttaccggacccctctcctcccagatcccctcggatgcagggaaccaggctgcctgtttgctgtgcctgcccagtcggctcctccaaaccggccgaggctgagaaggaaaaggcaggtccgccggggccaccctacagtgcacagtgaaaccaagtatgtggagctaattgtgatcaacgaccaccagctgttcgagcagatgcgacagtcggtggtcctcaccagcaactttgccaagtccgtggtgaacctggccgatgtgatatacaaggagcagctcaacactcgcatcgtcctggttgccatggaaacatgggcagatggggacaagatccaggtgcaggatgacctcctggagaccctggcccggctcatggtctaccgacgggagggtctgcctgagcccagtgatgccacccacctcttctcgggcaggaccttccagagcacgagcagcggggcagcctacgtggggggcatatgctccctgtcccacggcgggggtgtgaacgagtacggcaacatgggggcgatggccgtgacccttgcccagacgctgggacagaacctgggcatgatgtggaacaaacaccggagctcggcaggggactgcaagtgtccagacatctggctgggctgcatcatggaggacactgggttctacctgccccgcaagttctcgcgctgtagcatcgacgagtacaaccagtttctgcaggagggtggtggcagctgcctcttcaacaagcccctcaagctcctggaccccccagagtgcgggaacggcttcgtggaggcaggggaggagtgcgactgcggctcggtgcaggagtgcagccgcgcaggtggcaactgctgcaagaaatgcaccctgactcacgacgccatgtgcagcgacgggctctgctgtcgccgctgcaagtacgaaccacggggtgtgtcctgccgagaggccgtgaacgagtgcgacatcgcggagacctgcaccggggactctagccagtgcccgcctaacctgcacaagctggacggttactactgtgaccatgagcagggccgctgctacggaggtcgctgcaaaacccgggaccggcagtgccaggttctttggggccatgcggctgctgatcgcttctgctacgagaagctgaatgtggaggggacggagcgtgggagctgtgggcgcaagggatctggctgggtccagtgcagtaagcaggacgtgctgtgtggcttcctcctctgtgtcaacatctctggagctcctcggctaggggacctggtgggagacatcagtagtgtcaccttctaccaccagggcaaggagctggactgcaggggaggccacgtgcagctggcggacggctctgacctgagctatgtggaggatggcacagcctgcgggcctaacatgttgtgcctggaccatcgctgcctgccagcttctgccttcaacttcagcacctgccccggcagtggggagcgccggatttgctcccaccacggggtctgcagcaatgaagggaagtgcatctgtcagccagactggacaggcaaagactgcagtatccataaccccctgcccacgtccccacccacgggggagacggagagatataaaggtcccagcggcaccaacatcatcattggctccattgctggggctgtcctggttgcagccatcgtcctgggcggcacgggctggggatttaaaaacattcgccgaggaaggtccggaggggcctaagtgccaccctcctccctccaagcctggcacccaccgtctcggccctgaaccacgaggctgcccccatccagccacggagggaggcaccatgcaaatgtcttccaggtccaaacccttcaactcctggctccgcaggggtttgggtgggggctgtggccctgcccttggcaccaccagggtggaccaggcctggagggcacttcctccacagtcccccacccacctcctgcggctcagccttgcacacccactgccccgtgtgaatgtagcttccacctcatggattgccacagctcaactcgggggcgcctggagggatgcccccaggcagccaccagtggacctagcctggatggcccctccttgcaaccaggcagctgagaccagggtcttacctctctgggacctagggggacggggctgacatctacattttttaaaactgaatcttaatcgatgaatgtaaactcgggggtgctggggccagggcagatgtggggatgttttgacatttacaggagggcccggagaaactgaggtatggccatgccctagaccctccccaaggatgaccacacccgaagtcctgtcactgagcacagtcaggggctgggcatcccagcttgcccccgcttagccccgctgagcttggaggaagtatgagtgctgattcaaaccaaagctgcctgtgccatgcccaaggcctaggttatgggtacggcaaccacatgtcccagatcgtctccaattcgaaaacaaccgtcctgctgtccctgtcaggacacatggattttggcagggcggggggggttctagaaaatatagttcctataataaaatggcaccttccccctttcaagaagggtgattctggggccgactcagggtttaggtgccccctggtgtggcctagatgtccccacctgggccatctttctggggaggactctcccaggtagggaaggccagaggtggcccagtgcctggagggttagggtctctgcctgggatatgcaagaggaagtaggaaagggaggtctcatggatgatcctaggctgctagaagtccttaaggccccatctagtccattccactccctacccccattccagagccgagtagtaagtttacagatgtttcccccattacgtacccccacccatccctgctgcagcgagcctgagagccaggtagagccaggcacagctcctcagtcttctcacacagtcctgccggtggccttccctcatgacccttgcttgggagggtggagcactggctccttgaccctaaaaggtagctggcaggggcaagatgggggccagctacctaatggatgaaagccacaagtgaatacagttcttgtcaccagggttgccctgccctcactcggcagggagttctgacaccccagggcccgtgagctacctgcttgagcccctgtttctggggcaccttcgaggaggcgttgtggagggcatcgccccctgtttattcacaacaccctcaggggcaaacaggcctgggacccgctgacaccattttgggtagctggatgcacccgacagcagtggggtccacacactgagctccagctggcactgcccactcaagggctgagtggaggggcccctccggccagctctgctccaccagccctgcaagctgatgcagggcgggggaagggctgggtgttgcactattgctgcgctgccttaaggcatctgtcctctggtggtgcacccgtgcacacaggtacagtgcatctgggcacagcttttggatccacacctctgcacaagtgtgaatacctctgcacatatgggcgtatctgtgtgtgctcgtgtatatggggtggggaacatgagacttcctgtgaccagtccaccctggctcccagctgtctgtatcctcctgccccgccctggcgagtgcctaccctggcagaacccagggaggagtggaggctgcctctgcctgggcctccacacagcatcctgtacatacgccacctgggctgggggtggggaggcagggccaggagcatcgattaaagatcacatcctggggcttccagggagctcacaccaa

SEQ ID NO: 384 - DNA, 4220 bp, Homo sapiens
  source 1..4220: mol_type = unassigned DNA
accgggaggaatgagcgagccatgaggctgctgcggcgctgggcgttcgcggctctgctgctgtcgctgctccccacgcccggtcttgggacccaaggtcctgctggagctctgcgatgggggggcttaccccagctgggaggcccaggagcccctgaggtcacggaacccagccgtctggttagggagagctccgggggagaggtccgaaagcagcagctggacacaagggtccgccaggagccaccagggggcccgcctgtccatctggcccaggtgagtttcgtcatcccagccttcaactcaaacttcaccctggacctggagctgaaccaccacctcctctcctcgcaatacgtggagcgccacttcagccgggaggggacaacccagcacagcaccggggctggagaccactgctactaccaggggaagctccgggggaacccgcactccttcgccgccctctccacctgccaggggctgcatggggtcttctctgatgggaacttgacttacatcgtggagccccaagaggtggctggaccttggggagcccctcagggaccccttccccacctcatttaccggacccctctcctcccagatcccctcggatgcagggaaccaggctgcctgtttgctgtgcctgcccagtcggctcctccaaaccggccgaggctgagaaggaaaaggtccgccggggccaccctacagtgcacagtgaaaccaagtatgtggagctaattgtgatcaacgaccaccagctgttcgagcagatgcgacagtcggtggtcctcaccagcaactttgccaagtccgtggtgaacctggccgatgtgatatacaaggagcagctcaacactcgcatcgtcctggttgccatggaaacatgggcagatggggacaagatccaggtgcaggatgacctcctggagaccctggcccggctcatggtctaccgacgggagggtctgcctgagcccagtgatgccacccacctcttctcgggcaggaccttccagagcacgagcagcggggcagcctacgtggggggcatatgctccctgtcccacggcgggggtgtgaacgagtacggcaacatgggggcgatggccgtgacccttgcccagacgctgggacagaacctgggcatgatgtggaacaaacaccggagctcggcaggggactgcaagtgtccagacatctggctgggctgcatcatggaggacactgggttctacctgccccgcaagttctcgcgctgtagcatcgacgagtacaaccagtttctgcaggagggtggtggcagctgcctcttcaacaagcccctcaagctcctggaccccccagagtgcgggaacggcttcgtggaggcaggggaggagtgcgactgcggctcggtgcaggagtgcagccgcgcaggtggcaactgctgcaagaaatgcaccctgactcacgacgccatgtgcagcgacgggctctgctgtcgccgctgcaagtacgaaccacggggtgtgtcctgccgagaggccgtgaacgagtgcgacatcgcggagacctgcaccggggactctagccagtgcccgcctaacctgcacaagctggacggttactactgtgaccatgagcagggccgctgctacggaggtcgctgcaaaacccgggaccggcagtgccaggttctttggggccatgcggctgctgatcgcttctgctacgagaagctgaatgtggaggggacggagcgtgggagctgtgggcgcaagggatctggctgggtccagtgcagtaagcaggacgtgctgtgtggcttcctcctctgtgtcaacatctctggagctcctcggctaggggacctggtgggagacatcagtagtgtcaccttctaccaccagggcaaggagctggactgcaggggaggccacgtgcagctggcggacggctctgacctgagctatgtggaggatggcacagcctgcgggcctaacatgttgtgcctggaccatcgctgcctgccagcttctgccttcaacttcagcacctgccccggcagtggggagcgccggatttgctcccaccacggggtctgcagcaatgaagggaagtgcatctgtcagccagactggacaggcaaagactgcagtatccataaccccctgcccacgtccccacccacgggggagacggagagatataaaggtcccagcggcaccaacatcatcattggctccattgctggggctgtcctggttgcagccatcgtcctgggcggcacgggctggggatttaaaaacattcgccgaggaaggtccggaggggcctaagtgccaccctcctccctccaagcctggcacccaccgtctcggccctgaaccacgaggctgcccccatccagccacggagggaggcaccatgcaaatgtcttccaggtccaaacccttcaactcctggctccgcaggggtttgggtgggggctgtggccctgcccttggcaccaccagggtggaccaggcctggagggcacttcctccacagtcccccacccacctcctgcggctcagccttgcacacccactgccccgtgtgaatgtagcttccacctcatggattgccacagctcaactcgggggcgcctggagggatgcccccaggcagccaccagtggacctagcctggatggcccctccttgcaaccaggcagctgagaccagggtcttacctctctgggacctagggggacggggctgacatctacattttttaaaactgaatcttaatcgatgaatgtaaactcgggggtgctggggccagggcagatgtggggatgttttgacatttacaggagggcccggagaaactgaggtatggccatgccctagaccctccccaaggatgaccacacccgaagtcctgtcactgagcacagtcaggggctgggcatcccagcttgcccccgcttagccccgctgagcttggaggaagtatgagtgctgattcaaaccaaagctgcctgtgccatgcccaaggcctaggttatgggtacggcaaccacatgtcccagatcgtctccaattcgaaaacaaccgtcctgctgtccctgtcaggacacatggattttggcagggcggggggggttctagaaaatatagttcctataataaaatggcaccttccccctttcaagaagggtgattctggggccgactcagggtttaggtgccccctggtgtggcctagatgtccccacctgggccatctttctggggaggactctcccaggtagggaaggccagaggtggcccagtgcctggagggttagggtctctgcctgggatatgcaagaggaagtaggaaagggaggtctcatggatgatcctaggctgctagaagtccttaaggccccatctagtccattccactccctacccccattccagagccgagtagtaagtttacagatgtttcccccattacgtacccccacccatccctgctgcagcgagcctgagagccaggtagagccaggcacagctcctcagtcttctcacacagtcctgccggtggccttccctcatgacccttgcttgggagggtggagcactggctccttgaccctaaaaggtagctggcaggggcaagatgggggccagctacctaatggatgaaagccacaagtgaatacagttcttgtcaccagggttgccctgccctcactcggcagggagttctgacaccccagggcccgtgagctacctgcttgagcccctgtttctggggcaccttcgaggaggcgttgtggagggcatcgccccctgtttattcacaacaccctcaggggcaaacaggcctgggacccgctgacaccattttgggtagctggatgcacccgacagcagtggggtccacacactgagctccagctggcactgcccactcaagggctgagtggaggggcccctccggccagctctgctccaccagccctgcaagctgatgcagggcgggggaagggctgggtgttgcactattgctgcgctgccttaaggcatctgtcctctggtggtgcacccgtgcacacaggtacagtgcatctgggcacagcttttggatccacacctctgcacaagtgtgaatacctctgcacatatgggcgtatctgtgtgtgctcgtgtatatggggtggggaacatgagacttcctgtgaccagtccaccctg

SEQ ID NO: 385 - DNA, 2529 bp, Homo sapiens
  source 1..2529: mol_type = unassigned DNA
gctgctgcagccaccttttcctgcagtgctcggggtgacagccggtccggagcgcgggagggtaggggagcgggagaggagggaaggtgcgtccacccacctgtccccagctggccgggcccaccgcgtccctgcccctgccgccgaccggccagctctgcaggtcttgggacccaaggtcctgctggagctctgcgatgggggggcttaccccagctgggaggcccaggagcccctgaggtcacggaacccagccgtctggttagggagagctccgggggagaggtccgaaagcagcagctggacacaagggtccgccaggagccaccagggggcccgcctgtccatctggcccaggtgagtttcgtcatcccagccttcaactcaaacttcaccctggacctggagctgaaccaccacctcctctcctcgcaatacgtggagcgccacttcagccgggaggggacaacccagcacagcaccggggctggagaccactgctactaccaggggaagctccgggggaacccgcactccttcgccgccctctccacctgccaggggctgcatggggtcttctctgatgggaacttgacttacatcgtggagccccaagaggtggctggaccttggggagcccctcagggaccccttccccacctcatttaccggacccctctcctcccagatcccctcggatgcagggaaccaggctgcctgtttgctgtgcctgcccagtcggctcctccaaaccggccgaggctgagaaggaaaaggtccgccggggccaccctacagtgcacagtgaaaccaagtatgtggagctaattgtgatcaacgaccaccagctgttcgagcagatgcgacagtcggtggtcctcaccagcaactttgccaagtccgtggtgaacctggccgatgtgatatacaaggagcagctcaacactcgcatcgtcctggttgccatggaaacatgggcagatggggacaagatccaggtgcaggatgacctcctggagaccctggcccggctcatggtctaccgacgggagggtctgcctgagcccagtgatgccacccacctcttctcgggcaggaccttccagagcacgagcagcggggcagcctacgtggggggcatatgctccctgtcccacggcgggggtgtgaacgagtacggcaacatgggggcgatggccgtgacccttgcccagacgctgggacagaacctgggcatgatgtggaacaaacaccggagctcggcaggggactgcaagtgtccagacatctggctgggctgcatcatggaggacactgggttctacctgccccgcaagttctcgcgctgtagcatcgacgagtacaaccagtttctgcaggagggtggtggcagctgcctcttcaacaagcccctcaagctcctggaccccccagagtgcgggaacggcttcgtggaggcaggggaggagtgcgactgcggctcggtgcaggagtgcagccgcgcaggtggcaactgctgcaagaaatgcaccctgactcacgacgccatgtgcagcgacgggctctgctgtcgccgctgcaagtacgaaccacggggtgtgtcctgccgagaggccgtgaacgagtgcgacatcgcggagacctgcaccggggactctagccagtgcccgcctaacctgcacaagctggacggttactactgtgaccatgagcagggccgctgctacggaggtcgctgcaaaacccgggaccggcagtgccaggttctttggggccatgcggctgctgatcgcttctgctacgagaagctgaatgtggaggggacggagcgtgggagctgtgggcgcaagggatctggctgggtccagtgcagtaagcaggacgtgctgtgtggcttcctcctctgtgtcaacatctctggagctcctcggctaggggacctggtgggagacatcagtagtgtcaccttctaccaccagggcaaggagctggactgcaggggaggccacgtgcagctggcggacggctctgacctgagctatgtggaggatggcacagcctgcgggcctaacatgttgtgcctggaccatcgctgcctgccagcttctgccttcaacttcagcacctgccccggcagtggggagcgccggatttgctcccaccacggggtctgcagcaatgaagggaagtgcatctgtcagccagactggacaggcaaagactgcagtatccataaccccctgcccacgtccccacccacgggggagacggagagatataaaggtcccagcggcaccaacatcatcattggctccattgctggggctgtcctggttgcagccatcgtcctgggcggcacgggctggggatttaaaaacattcgccgaggaaggtccggaggggcctaagtgccaccctcctccctccaagcctggcacccaccgtctcggccctgaaccacgaggctgcccccatccagccacggagggaggcaccatgcaaatgtcttccaggtccaaacccttcaac

SEQ ID NO: 386 - DNA, 2858 bp, Homo sapiens
  source 1..2858: mol_type = unassigned DNA
ctcctctcctcgcaatacgtggagcgccacttcagccgggaggggacaacccagcacagcaccggggctggagaccactgctactaccaggggaagctccgggggaacccgcactccttcgccgccctctccacctgccaggggctgcatggggtcttctctgatgggaacttgacttacatcgtggagccccaagaggtggctggaccttggggagcccctcagggaccccttccccacctcatttaccggacccctctcctcccagatcccctcggatgcagggaaccaggctgcctgtttgctgtgcctgcccagtcggctcctccaaaccggccgaggctgagaaggaaaaggcaggtccgccggggccaccctacagtgcacagtgaaaccaagtatgtggagctaattgtgatcaacgaccaccagctgttcgagcagatgcgacagtcggtggtcctcaccagcaactttgccaagtccgtggtgaacctggccgatgtgatatacaaggagcagctcaacactcgcatcgtcctggttgccatggaaacatgggcagatggggacaagatccaggtgcaggatgacctcctggagaccctggcccggctcatggtctaccgacgggagggtctgcctgagcccagtgatgccacccacctcttctcgggcaggaccttccagagcacgagcagcggggcagcctacgtggggggcatatgctccctgtcccacggcgggggtgtgaacgagtacggcaacatgggggcgatggccgtgacccttgcccagacgctgggacagaacctgggcatgatgtggaacaaacaccggagctcggcaggggactgcaagtgtccagacatctggctgggctgcatcatggaggacactgggttctacctgccccgcaagttctcgcgctgtagcatcgacgagtacaaccagtttctgcaggagggtggtggcagctgcctcttcaacaagcccctcaagctcctggaccccccagagtgcgggaacggcttcgtggaggcaggggaggagtgcgactgcggctcggtgcaggagtgcagccgcgcaggtggcaactgctgcaagaaatgcaccctgactcacgacgccatgtgcagcgacgggctctgctgtcgccgctgcaagtacgaaccacggggtgtgtcctgccgagaggccgtgaacgagtgcgacatcgcggagacctgcaccggggactctagccagtgcccgcctaacctgcacaagctggacggttactactgtgaccatgagcagggccgctgctacggaggtcgctgcaaaacccgggaccggcagtgccaggttctttggggccatgcggctgctgatcgcttctgctacgagaagctgaatgtggaggggacggagcgtgggagctgtgggcgcaagggatctggctgggtccagtgcagtaagcagccccaacagggacgtgctgtgtggcttcctcctctgtgtcaacatctctggagctcctcggctaggggacctggtgggagacatcagtagtgtcaccttctaccaccagggcaaggagctggactgcaggggaggccacgtgcagctggcggacggctctgacctgagctatgtggaggatggcacagcctgcgggcctaacatgttgtgcctggaccatcgctgcctgccagcttctgccttcaacttcagcacctgccccggcagtggggagcgccggatttgctcccaccacggggtctgcagcaatgaagggaagtgcatctgtcagccagactggacaggcaaagactgcagtatccataaccccctgcccacgtccccacccacgggggagacggagagatataaaggtcccagcggcaccaacatcatcattggctccattgctggggctgtcctggttgcagccatcgtcctgggcggcacgggctggggatttaaaaacattcgccgaggaaggtccggaggggcctaagtgccaccctcctccctccaagcctggcacccaccgtctcggccctgaaccacgaggctgcccccatccagccacggagggaggcaccatgcaaatgtcttccaggtccaaacccttcaactcctggctccgcaggggtttgggtgggggctgtggccctgcccttggcaccaccagggtggaccaggcctggagggcacttcctccacagtcccccacccacctcctgcggctcagccttgcacacccactgccccgtgtgaatgtagcttccacctcatggattgccacagctcaactcgggggcgcctggagggatgcccccaggcagccaccagtggacctagcctggatggcccctccttgcaaccaggcagctgagaccagggtcttacctctctgggacctagggggacggggctgacatctacattttttaaaactgaatcttaatcgatgaatgtaaactcgggggtgctggggccagggcagatgtggggatgttttgacatttacaggagggcccggagaaactgaggtatggccatgccctagaccctccccaaggatgaccacacccgaagtcctgtcactgagcacagtcaggggctgggcatcccagcttgcccccgcttagccccgctgagcttggaggaagtatgagtgctgattcaaaccaaagctgcctgtgccatgcccaaggcctaggttatgggtacggcaaccacatgtcccagatcgtctccaattcgaaaacaaccgtcctgctgtccctgtcaggacacatggattttggcagggcggggggggttctagaaaatatagttcctataataaaatggcaccttcccccttt

SEQ ID NO: 387 - DNA, 643 bp, Homo sapiens
  source 1..643: mol_type = unassigned DNA
ccttcccctcctcccgcgtccctcaggagtgcagccgcgcaggtggcaactgctgcaagaaatgcaccctgactcacgacgccatgtgcagcgacgggctctgctgtcgccgctgcaagtacgaaccacggggtgtgtcctgccgagaggccgtgaacgagtgcgacatcgcggagacctgcaccggggactctagccagtgcccgcctaacctgcacaagctggacggttactactgtgaccatgagcagggccgctgctacggaggtcgctgcaaaacccgggaccggcagtgccaggttctttggggccatgcggctgctgatcgcttctgctacgagaagctgaatgtggaggggacggagcgtgggagctgtgggcgcaagggatctggctgggtccagtgcagtaagcaggacgtgctgtgtggcttcctcctctgtgtcaacatctctggagctcctcggctaggggacctggtgggagacatcagtagtgtcaccttctaccaccagggcaaggagctggactgcaggggaggccacgtgcagctggcggacggctctgacctgagctatgtggaggatggcacagcctgcgggcctaacatgttgtgcctggaccatcgctgcctgccagcttc

SEQ ID NO: 388 - DNA, 7938 bp, Homo sapiens
  source 1..7938: mol_type = unassigned DNA
cactaacgctcttcctagtccccgggccaactcggacagtttgctcatttattgcaacggtcaaggctggcttgtgccagaacggcgcgcgcgcgcgcacgcacgcacacacacggggggaaacttttttaaaaatgaaaggctagaagagctcagcggcggcgcgggcgctgcgcgagggctccggagctgactcgccgaggcaggaaatccctccggtcgcgacgcccggccccggctcggcgcccgcgtgggatggtgcagcgctcgccgccgggcccgagagctgctgcactgaaggccggcgacgatggcagcgcgcccgctgcccgtgtcccccgcccgcgccctcctgctcgccctggccggtgctctgctcgcgccctgcgaggcccgaggggtgagcttatggaaccaaggaagagctgatgaagttgtcagtgcctctgttgggagtggggacctctggatcccagtgaagagcttcgactccaagaatcatccagaagtgctgaatattcgactacaacgggaaagcaaagaactgatcataaatctggaaagaaatgaaggtctcattgccagcagtttcacggaaacccactatctgcaagacggtactgatgtctccctcgctcgaaattacacggtaattctgggtcactgttactaccatggacatgtacggggatattctgattcagcagtcagtctcagcacgtgttctggtctcaggggacttattgtgtttgaaaatgaaagctatgtcttagaaccaatgaaaagtgcaaccaacagatacaaactcttcccagcgaagaagctgaaaagcgtccggggatcatgtggatcacatcacaacacaccaaacctcgctgcaaagaatgtgtttccaccaccctctcagacatgggcaagaaggcataaaagagagaccctcaaggcaactaagtatgtggagctggtgatcgtggcagacaaccgagagtttcagaggcaaggaaaagatctggaaaaagttaagcagcgattaatagagattgctaatcacgttgacaagttttacagaccactgaacattcggatcgtgttggtaggcgtggaagtgtggaatgacatggacaaatgctctgtaagtcaggacccattcaccagcctccatgaatttctggactggaggaagatgaagcttctacctcgcaaatcccatgacaatgcgcagcttgtcagtggggtttatttccaagggaccaccatcggcatggccccaatcatgagcatgtgcacggcagaccagtctgggggaattgtcatggaccattcagacaatccccttggtgcagccgtgaccctggcacatgagctgggccacaatttcgggatgaatcatgacacactggacaggggctgtagctgtcaaatggcggttgagaaaggaggctgcatcatgaacgcttccaccgggtacccatttcccatggtgttcagcagttgcagcaggaaggacttggagaccagcctggagaaaggaatgggggtgtgcctgtttaacctgccggaagtcagggagtctttcgggggccagaagtgtgggaacagatttgtggaagaaggagaggagtgtgactgtggggagccagaggaatgtatgaatcgctgctgcaatgccaccacctgtaccctgaagccggacgctgtgtgcgcacatgggctgtgctgtgaagactgccagctgaagcctgcaggaacagcgtgcagggactccagcaactcctgtgacctcccagagttctgcacaggggccagccctcactgcccagccaacgtgtacctgcacgatgggcactcatgtcaggatgtggacggctactgctacaatggcatctgccagactcacgagcagcagtgtgtcacgctctggggaccaggtgctaaacctgcccctgggatctgctttgagagagtcaattctgcaggtgatccttatggcaactgtggcaaagtctcgaagagttcctttgccaaatgcgagatgagagatgctaaatgtggaaaaatccagtgtcaaggaggtgccagccggccagtcattggtaccaatgccgtttccatagaaacaaacatccccctgcagcaaggaggccggattctgtgccgggggacccacgtgtacttgggcgatgacatgccggacccagggcttgtgcttgcaggcacaaagtgtgcagatggaaaaatctgcctgaatcgtcaatgtcaaaatattagtgtctttggggttcacgagtgtgcaatgcagtgccacggcagaggggtgtgcaacaacaggaagaactgccactgcgaggcccactgggcacctcccttctgtgacaagtttggctttggaggaagcacagacagcggccccatccggcaagcagataaccaaggtttaaccataggaattctggtgaccatcctgtgtcttcttgctgccggatttgtggtttatctcaaaaggaagaccttgatacgactgctgtttacaaataagaagaccaccattgaaaaactaaggtgtgtgcgcccttcccggccaccccgtggcttccaaccctgtcaggctcacctcggccaccttggaaaaggcctgatgaggaagccgccagattcctacccaccgaaggacaatcccaggagattgctgcagtgtcagaatgttgacatcagcagacccctcaacggcctgaatgtccctcagccccagtcaactcagcgagtgcttcctcccctccaccgggctccacgtgcacctagcgtccctgccagacccctgccagccaagcctgcacttaggcaggcccaggggacctgtaagccaaacccccctcagaagcctctgcctgcagatcctctggccagaacaactcggctcactcatgccttggccaggaccccaggacaatgggagactgggctccgcctggcacccctcagacctgctccacaatatccacaccaagtgcccagatccacccacaccgcctatattaagtgagaagccgacaccttttttcaacagtgaagacagaagtttgcactatctttcagctccagttggagttttttgtaccaacttttaggattttttttaatgtttaaaacatcattactataagaactttgagctactgccgtcagtgctgtgctgtgctatggtgctctgtctacttgctcaggtacttgtaaattattaatttatgcagaatgttgattacagtgcagtgcgctgtagtaggcatttttaccatcactgagttttccatggcaggaaggcttgttgtgcttttagtattttagtgaacttgaaatatcctgcttgatgggattctggacaggatgtgtttgctttctgatcaaggccttattggaaagcagtcccccaactacccccagctgtgcttatggtaccagatgcagctcaagagatcccaagtagaatctcagttgattttctggattccccatctcaggccagagccaaggggcttcaggtccaggctgtgtttggctttcagggaggccctgtgccccttgacaactggcaggcaggctcccagggacacctgggagaaatctggcttctggccaggaagctttggtgagaacctgggttgcagacaggaatcttaaggtgtagccacaccaggatagagactggaacactagacaagccagaacttgaccctgagctgaccagccgtgagcatgtttggaaggggtctgtagtgtcactcaaggcggtgcttgatagaaatgccaagcacttctttttctcgctgtcctttctagagcactgccaccagtaggttatttagcttgggaaaggtggtgtttctgtaagaaacctactgcccaggcactgcaaaccgccacctccctatactgcttggagctgagcaaatcaccacaaactgtaatacaatgatcctgtattcagacagatgaggctttccatgggaccacaactattttcagatgtgaaccattaaccagatctagtcaatcaagtctgtttactgcaaggttcaacttattaacaattaggcagactctttatgcttgcaaaaactacaaccaatggaatgtgatgttcatgggtatagttcatgtctgctatcattattcgtagatattggacaaagaaccttctctatggggcatcctctttttccaacttggctgcaggaatctttaaaagatgcttttaacagagtctgaacctatttcttaaacacttgcaacctacctgttgagcatcacagaatgtgataaggaaatcaacttgcttatcaacttcctaaatattatgagatgctggcttgggcagcatccccttgaactcttcactcttcaaatgcctgactagggagccatgtttcacaaggtctttaaagtgactaatggcatgagaaatacaaaaatactcagataaggtaaaatgccatgatgcctctgtcttctggactggttttcacattagaagacaattgacaacagttacataattcactctgagtgttttatgagaaagccttcttttgggggtcaacagttttcctatgctttgaaacagaaaaatatgtaccaagaatcttggtttgccttccagaaaacaaaactgcatttcactttcccggtgttccccactgtatctaggcaacatagtattcatgactatggataaactaaacacgtgacacaaacacacacaaaagggaacccagctctaatacattccaactcgtatagcatgcatctgtttattctatagttattaagttctttaaaatgtaaagccatgctggaaaataatactgctgagatacatacagaattactgtaactgattacacttggtaattgtactaaagccaaacatatatatactattaaaaaggtttacagaattttatggtgcattacgtgggcattgtctttttagatgcccaaatccttagatctggcatgttagcccttcctccaattataagaggatatgaactgagtttttcttttgttgtttgttcttagctgtaattcctatgcttctatttcagagagccaggagagtttgatattaaaggaggttaaaactgtgatcttatgccatgtcatcaatggccacttaggggccatggctgatgacacattcttatctctacagtactaatgtgttattatagagccatgcattttatttctgaataagaacatatttaaactaatattcccttacaatatggacagtattaatccttccaagatgcagtatttatcaagtgaagcatatttagcagcaaattccattttaacataacttaggaaccaataaccagggtgttttgtggttgggggaggcacggggtggagtattcttttttatatcctcaaaacaaaaaaaatcaatacttatatttcaatggcaatctagtatttttttaaaagactgtataggcatgaataatagaggtggtttgagttttgtagggccatcacctggaaagtcaatgtgactagacacaaagtagcccagaggctacttttcttcctacagcttattatagttgtaggttctatgacctcacttcatgggttccaggcaattccgctgaaaggtttgtctcctgaaattttttaagtttgttttcctgacacatgtaatcagatgtgtagcaaccgagggaaacgaagcctaacattctccattgtggaaatacacacaggaggttacatttcacagcgtggatttttccagcttacacatgtgggatgacatcacagaaaccacaaaagcagcaaattaaactgtaggagagtcaatactcctgacgagtctcggggggggggcatttttatgccttcttaactttatgagaattctcaggctgaactataggccattgttcccaggcaaatcaatacatcaatgcatcctcaaaaaaaaaaaaaaaaaaaaaaaaccggctaaaactgtgtcaaaatgttcttaaggagcctatggtctccacggtgctaaaaagagcctggtgctgggccgactggcagggctgagcatcctcctgccccctcgccactgatgtttactaagcactctgagccaatgagacccccagcagcagaaagggcacaaggtggcgccagggcagcagggccagatctttctcatgcacctcgacctcttgcagactttcttcgtgagatgtactactcatttcaaaactgctttgcagggctcccctatgtattcggggggcccacggcacactcaggctggagatccttcctcactgcgctcaagatggcctcagccagacaccagttacccagctgaaagtcacaatccctcccagaagtctcccaacactagtgctgaccagaggtggggctctcaggctaggagtttcacacacaatgacaggctgctgggggacattgcaggaccccttttcctctcctctccatgctagaagccagccctaggcagctgcagttactccctgtgactcagcagcaggctgattcaacacagctgcccacacaaagccagtggctaatacatctgtttacctttccctatcacccagacacaagcccctttcccaggtcaaaccacaggccgatgcatctccagtttgacagtcaaatcactacttccattgctactttagatcagccaaagtggtgactgctgcagtgtgtggctatccctacaaggcccacccaagggatgcccaaagcccaaccttctccagggctgcagcccagagcaaccccaccagcctaagtccagcagaggacctcccacccaatgtcttgttctaattagaaggggaagttagccacagaaaatcaacttatctataattacaaaattctcttgactcaccttaaagttcctattgacatctactgcttttaaacctatttgaaaactctgatactaaaacaaatgacactctaagaaagtttgggagccccatgctgagaaccatttctgtgcagtgaggatgtttccagaagctacttacctacatgtgaatgtgccattttctttccttttgtagagaaaatcccctttactttttggaacagtaatggcagcttctagtacagccattacagtttcatatgagaaaaattaagaataactataaaattgttaaaatatccaataatggataatgatggccagaagatttaacatacaaagtaattctcaatgtaaagctattcagctcttccaggttgaatgccctgtaacccaccctgaccttccacatcatcttcaaaaagcagtttctctgttccccatgattctcctataaggtaactctttagtcctccatttagcacattttaaatcctccaaagaataagtatcatgtgattattttagctttacaaaaaaaaagttgaatggcgttttattttcatggcctataagcaggtaccttagtagggcagatataggaaaaacaaattagagcaaaacaaatcctctacaaatccaaggcaggaaaagtggtggcagagtgactcattctcctgtccctcccatcaggtcaaatcaggaggctgcagtgaatgcctgttctttgaatgtgtagcagttgttcctgtaactctttaaaacttggctataggctgtttagcacagtacagattaaagatacagttacgtaaacagcaaagtaattttatagtgcttcatccatttatcatgctttggtttgctaattttttcacatacctttttctatcacagtctgttgcttttgtacacatttctcatattggggttcgacaggtaaacacaaactgctatttcagtagaaaaagttattgttatgaatattaaacccaataaattgtataaaggtaaatatcaatgtg

SEQ ID NO: 389 - DNA, 3313 bp, Homo sapiens
  source 1..3313: mol_type = unassigned DNA
cactaacgctcttcctagtccccgggccaactcggacagtttgctcatttattgcaacggtcaaggctggcttgtgccagaacggcgcgcgcgcgcgcacgcacgcacacacacggggggaaacttttttaaaaatgaaaggctagaagagctcagcggcggcgcgggcgctgcgcgagggctccggagctgactcgccgaggcaggaaatccctccggtcgcgacgcccggccccggctcggcgcccgcgtgggatggtgcagcgctcgccgccgggcccgagagctgctgcactgaaggccggcgacgatggcagcgcgcccgctgcccgtgtcccccgcccgcgccctcctgctcgccctggccggtgctctgctcgcgccctgcgaggcccgaggggtgagcttatggaaccaaggaagagctgatgaagttgtcagtgcctctgttgggagtggggacctctggatcccagtgaagagcttcgactccaagaatcatccagaagtgctgaatattcgactacaacgggaaagcaaagaactgatcataaatctggaaagaaatgaaggtctcattgccagcagtttcacggaaacccactatctgcaagacggtactgatgtctccctcgctcgaaattacacggtaattctgggtcactgttactaccatggacatgtacggggatattctgattcagcagtcagtctcagcacgtgttctggtctcaggggacttattgtgtttgaaaatgaaagctatgtcttagaaccaatgaaaagtgcaaccaacagatacaaactcttcccagcgaagaagctgaaaagcgtccggggatcatgtggatcacatcacaacacaccaaacctcgctgcaaagaatgtgtttccaccaccctctcagacatgggcaagaaggcataaaagagagaccctcaaggcaactaagtatgtggagctggtgatcgtggcagacaaccgagagtttcagaggcaaggaaaagatctggaaaaagttaagcagcgattaatagagattgctaatcacgttgacaagttttacagaccactgaacattcggatcgtgttggtaggcgtggaagtgtggaatgacatggacaaatgctctgtaagtcaggacccattcaccagcctccatgaatttctggactggaggaagatgaagcttctacctcgcaaatcccatgacaatgcgcagcttgtcagtggggtttatttccaagggaccaccatcggcatggccccaatcatgagcatgtgcacggcagaccagtctgggggaattgtcatggaccattcagacaatccccttggtgcagccgtgaccctggcacatgagctgggccacaatttcgggatgaatcatgacacactggacaggggctgtagctgtcaaatggcggttgagaaaggaggctgcatcatgaacgcttccaccgggtacccatttcccatggtgttcagcagttgcagcaggaaggacttggagaccagcctggagaaaggaatgggggtgtgcctgtttaacctgccggaagtcagggagtctttcgggggccagaagtgtgggaacagatttgtggaagaaggagaggagtgtgactgtggggagccagaggaatgtatgaatcgctgctgcaatgccaccacctgtaccctgaagccggacgctgtgtgcgcacatgggctgtgctgtgaagactgccagctgaagcctgcaggaacagcgtgcagggactccagcaactcctgtgacctcccagagttctgcacaggggccagccctcactgcccagccaacgtgtacctgcacgatgggcactcatgtcaggatgtggacggctactgctacaatggcatctgccagactcacgagcagcagtgtgtcacgctctggggaccaggtgctaaacctgcccctgggatctgctttgagagagtcaattctgcaggtgatccttatggcaactgtggcaaagtctcgaagagttcctttgccaaatgcgagatgagagatgctaaatgtggaaaaatccagtgtcaaggaggtgccagccggccagtcattggtaccaatgccgtttccatagaaacaaacatccccctgcagcaaggaggccggattctgtgccgggggacccacgtgtacttgggcgatgacatgccggacccagggcttgtgcttgcaggcacaaagtgtgcagatggaaaaatctgcctgaatcgtcaatgtcaaaatattagtgtctttggggttcacgagtgtgcaatgcagtgccacggcagaggggtgtgcaacaacaggaagaactgccactgcgaggcccactgggcacctcccttctgtgacaagtttggctttggaggaagcacagacagcggccccatccggcaagcagaagcaaggcaggaagctgcagagtccaacagggagcgcggccagggccaggagcccgtgggatcgcaggagcatgcgtctactgcctcactgacactcatctgagccctcccatgacatggagaccgtgaccagtgctgctgcagaggaggtcacgcgtccccaaggcctcctgtgactggcagcattgactctgtggctttgccatcgtttccatgacaacagacacaacacagttctcggggctcaggaggggaagtccagcctaccaggcacgtctgcagaaacagtgcaaggaagggcagcgacttcctggttgagcttctgctaaaacatggacatgcttcagtgctgctcctgagagagtagcaggttaccactctggcaggccccagccctgcagcaaggaggaagaggactcaaaagtctggcctttcactgagcctccacagcagtgggggagaagcaagggttgggcccagtgtcccctttccccagtgacacctcagccttggcagccctgatgactggtctctggctgcaacttaatgctctgatatggcttttagcatttattatatgaaaatagcagggttttagtttttaatttatcagagaccctgccacccattccatctccatccaagcaaactgaatggcaatgaaacaaactggagaagaaggtaggagaaagggcggtgaactctggctctttgctgtggacatgcgtgaccagcagtactcaggtttgagggtttgcagaaagccagggaacccacagagtcaccaacccttcatttaacaagtaagaatgttaaaaagtgaaaacaatgtaagagcctaactccatcccccgtggccattactgcataaaatagagtgcatttgaaa

SEQ ID NO: 390 - DNA, 600 bp, Homo sapiens
  source 1..600: mol_type = unassigned DNA
gctaaattcacagatggacttaatgagggcttaggaagagcatctccaagggctgctctgaaagagggagtttagggtggaggagaaatcgtgttgagactggcgcatccggtatattcctgtgttcatcacacaaacaactggcaaacagaatgttcatcatatccccatcttcaagtctctgaggttttccataccaggaggaatgagcttggtctgacagtttctgcaagaacgctggaagtatgaatgtatgaatcgctgctgcaatgccaccacctgtaccctgaagccggacgctgtgtgcgcacatgggctgtgctgtgaagactgccagctgaagcctgcaggaacagcgtgcagggactccagcaactcctgtgacctcccagagttctgcacaggggccagccctcactgcccagccaacgtgtacctgcacgatgggcactcatgtcaggatgtggacggctactgctacaatggcatctgccagactcacgagcagcagtgtgtcacgctctggggaccaggtgctaaacctgcccctgggatctgctttgagagagtcaattctgcaggtgatccttatggcaactg

SEQ ID NO: 391 - DNA, 597 bp, Homo sapiens
  source 1..597: mol_type = unassigned DNA
cagggactcgtagacccagttggttcataaaaagcagaagctttgctttcctaacagacggaaacaggcaggtgtgcagttcaggagctgggccctcttggtctttcttgctttttgcagccatttaaggtgtgatgtttgcattcagtgagtgcatactccataagaccctgtcaaacaaatgccattcccctttccaggaatgtatgaatcgctgctgcaatgccaccacctgtaccctgaagccggacgctgtgtgcgcacatgggctgtgctgtgaagactgccagctgaagcctgcaggaacagcgtgcagggactccagcaactcctgtgacctcccagagttctgcacaggggccagccctcactgcccagccaacgtgtacctgcacgatgggcactcatgtcaggatgtggacggctactgctacaatggcatctgccagactcacgagcagcagtgtgtcacgctctggggaccaggtacgtggccgccacaagctcggcatcaggagaggcactggcagacctgggctgtgggactgggggcatgtgctctgttttggttagcccccactcctggcgggcgctgtc

SEQ ID NO: 392 - DNA, 381 bp, Homo sapiens
  source 1..381: mol_type = unassigned DNA
cagacaaccgagagtttcagaggcaaggaaaagatctggaaaaagttaagcagcgattaatagagattgctaatcacgttgacaagttttacagaccactgaacattcggatcgtgttggtaggcttggggatgtcagttaaattcagtctcagctccaaaggtgattcagagatgaatcagtaactgctttaatgatattaacatctcagaatcaaaaagaaccaagtattgtagatggcttaaaggagaaaagtatatcccttcatataccttgtttattctttatcaaaacattccagaatcctaactctgaaaacattaaccaattgctgtcactgacaaatgggacctgaggcctgtaaatacaaggatagagtcc

SEQ ID NO: 393 - DNA, 1145 bp, Homo sapiens
  source 1..1145: mol_type = unassigned DNA
cactaacgctcttcctagtccccgggccaactcggacagtttgctcatttattgcaacggtcaaggctggcttgtgccagaacggcgcgcgcgcgcgcacgcacgcacacacacggggggaaacttttttaaaaatgaaaggctagaagagctcagcggcggcgcgggcgctgcgcgagggctccggagctgactcgccgaggcaggaaatccctccggtcgcgacgcccggccccggctcggcgcccgcgtgggatggtgcagcgctcgccgccgggcccgagagctgctgcactgaaggccggcgacgatggcagcgcgcccgctgcccgtgtcccccgcccgcgccctcctgctcgccctggccggtgctctgctcgcgccctgcgaggcccgaggggtgagcttatggaaccaaggaagagctgatgaagttgtcagtgcctctgttgggagtggggacctctggatcccagtgaagagcttcgactccaagaatcatccagaagtgctgaatattcgactacaacgggaaagcaaagaactgatcataaatctggaaagaaatgaaggtctcattgccagcagtttcacggaaacccactatctgcaagacggtactgatgtctccctcgctcgaaattacacgggtcactgttactaccatggacatgtacggggatattctgattcagcagtcagtctcagcacgtgttctggtctcaggggacttattgtgtttgaaaatgaaagctatgtcttagaaccaatgaaaagtgcaaccaacagatacaaactcttcccagcgaagaagctgaaaagcgtccggggatcatgtggatcacatcacaacacaccaaacctcgctgcaaagaatgtgtttccaccaccctctcagacatgggcaagaaggcataaaagagagaccctcaaggcaactaagtatgtggagctggtgatcgtggcagacaaccgagagtttcagaggcaaggaaaagatctggaaaaagttaagcagcgattaatagagattgctaatcacgttgacaagttttacagaccactgaacattcggatcgtgttggtaggcgtggaagtgtggaatgacatggacaaatgctctgtaagtcaggacccattcacca

SEQ ID NO: 394 - DNA, 372 bp, Homo sapiens
  source 1..372: mol_type = unassigned DNA
aggtctcattgccagcagtttcacggaaacccactatctgcaagacggtactgatgtctccctcgctcgaaattacacgggtcactgttactaccatggacatgtacggggatattctgattcagcagtcagtctcagcacgtgttctggtctcaggtaagtggccatgaccatggcggctctagtcttcagccatctactgcaggcaacctctgtcttttcctgctcgtgctaaagcactgagagtgagtgatgggggctcccagctcagctacacctccacctaggcaagagaacacggaggccctctctccactgcttacaagagcatggccacccaggatcttagcctcatgttcatgccccctctta

SEQ ID NO: 395 - DNA, 2839 bp, Homo sapiens
  source 1..2839: mol_type = unassigned DNA
agacgcgcctccaccgccgggcagtgggcaggtatggctgagggcgtgtgagcgccgagcgctaagggccgccgccaccatgccagggggcgcaggcgccgcccggctctgcttgctggcgtttgccctgcagcccctccggccgcgggcggcgcgggagcctggatggacaagaggaagtgaggaaggcagccccaagctgcagcatgaacttatcatacctcagtggaagacttcagaaagccccgtgagagaaaagcatccactcaaagctgagctcagggtaatggctgaggggcgagaactgatcctggacctggagaagaatgagcaactttttgctccttcctacacagaaacccattatacttcaagtggtaaccctcaaaccaccacacggaaattggaggatcactgcttttaccacggcacggtgagggagacagaactgtccagcgtcacgctcagcacttgccgaggaattagaggactgattacggtgagcagcaacctcagctacgtcatcgagcccctccctgacagcaagggccaacaccttatttacagatctgaacatctcaagccgcccccgggaaactgtgggttcgagcactccaagcccaccaccagggactgggctcttcagtttacacaacagaccaagaagcgacctcgcaggatgaaaagggaagatttaaactccatgaagtatgtggagctttacctcgtggctgattatttagagtttcagaagaatcgacgagaccaggacgccaccaaacacaagctcatagagatcgccaactatgttgataaggtgagaccagttttaccgatccttgaacatccggattgctctcgtgggcttggaagtgtggacccacgggaacatgtgtgaagtttcagagaatccatattctaccctctggtcctttctcagttggaggcgcaagctgcttgcccagaagtaccatgacaacgcccaattaatcacgggcatgtccttccacggcaccaccatcggcctggcccccctcatggccatgtgctctgtgtaccagtctggaggagtcaacatggaccactccgagaatgccattggcgtggctgccaccatggcccacgagatgggccacaactttggcatgacccatgattctgcagattgctgctcggccagtgcggctgatggtgggtgcatcatggcagctgccactgggcacccctttcccaaagtgttcaatggatgcaacaggagggagctggacaggtatctgcagtcaggtggtggaatgtgtctctccaacatgccagacaccaggatgttgtatggaggccggaggtgtgggaacgggtatctggaagatggggaagagtgtgactgtggagaagaagaggaatgtaacaacccctgctgcaatgcctctaattgtaccctgaggccgggggcggagtgtgctcacggctcctgctgccaccagtgtaagctgttggctcctgggaccctgtgccgcgagcaggccaggcagtgtgacctcccggagttctgtacgggcaagtctccccactgccctaccaacttctaccagatggatggtaccccctgtgagggcggccaggcctactgctacaacggcatgtgcctcacctaccaggagcagtgccagcagctgtggggacccggagcccgacctgcccctgacctctgcttcgagaaggtgaatgtggcaggagacacctttggaaactgtggaaaggacatgaatggtgaacacaggaagtgcaacatgagagatgcgaagtgtgggaagatccagtgtcagagctctgaggcccggcccctggagtccaacgcggtgcccattgacaccactatcatcatgaatgggaggcagatccagtgccggggcacccacgtctaccgaggtcctgaggaggagggtgacatgctggacccagggctggtgatgactggaaccaagtgtggctacaaccatatttgctttgaggggcagtgcaggaacacctccttctttgaaactgaaggctgtgggaagaagtgcaatggccatggggtctgtaacaacaaccagaactgccactgcctgccgggctgggccccgcccttctgcaacacaccgggccacgggggcagtatcgacagtgggcctatgccccctgagagtgtgggtcctgtggtagctggagtgttggtggccatcttggtgctggcggtcctcatgctgatgtactactgctgcagacagaacaacaaactaggccaactcaagccctcagctctcccttccaagctgaggcaacagttcagttgtcccttcagggtttctcagaacagcgggactggtcatgccaacccaactttcaagctgcagacgccccagggcaagcgaaaggtgatcaacactccggaaatcctgcggaagccctcccagcctcctccccggccccctccagattatctgcgtggtgggtccccacctgcaccactgccagctcacctgagcagggctgctaggaactccccagggcccgggtctcaaatagagaggacggagtcgtccaggaggcctcctccaagccggccaattccccccgcaccaaattgcatcgtttcccagaagtgccttttgcctcctgccatgattctgagggctccccagccaagtggaactgttgtttgcttagtaattagttttaatatggccttctacaggtcaatgaggattagaatagaaccaggaatcaagaccaagttgctggttttactagtttggaagcagttttaatgaagatggaaatgtttatcaactcaacacag

SEQ ID NO: 396 - DNA, 1847 bp, Homo sapiens
  source 1..1847: mol_type = unassigned DNA
gtgactgtggagaagaagaggaatgtaacaacccctgctgcaatgcctctaattgtaccctgaggccgggggcggagtgtgctcacggctcctgctgccaccagtgtaagctgttggctcctgggaccctgtgccgcgagcaggccaggcagtgtgacctcccggagttctgtacgggcaagtctccccactgccctaccaacttctaccagatggatggtaccccctgtgagggcggccaggcctactgctacaacggcatgtgcctcacctaccaggagcagtgccagcagctgtggggacccggagcccgacctgcccctgacctctgcttcgagaaggtgaatgtggcaggagacacctttggaaactgtggaaaggacatgaatggtgaacacaggaagtgcaacatgagagatgcgaagtgtgggaagatccagtgtcagagctctgaggcccggcccctggagtccaacgcggtgcccattgacaccactatcatcatgaatgggaggcagatccagtgccggggcacccacgtctaccgaggtcctgaggaggagggtgacatgctggacccagggctggtgatgactggaaccaagtgtggctacaaccatatttgctttgaggggcagtgcaggaacacctccttctttgaaactgaaggctgtgggaagaagtgcaatggccatggggtctgtaacaacaaccagaactgccactgcctgccgggctgggccccgcccttctgcaacacaccgggccacgggggcagtatcgacagtgggcctatgccccctgagagtgtgggtcctgtggtagctggagtgttggtggccatcttggtgctggcggtcctcatgctgatgtactactgctgcagacagaacaacaaactaggccaactcaagccctcagctctcccttccaagctgaggcaacagttcagttgtcccttcagggtttctcagaacagcgggactggtcatgccaacccaactttcaagctgcagacgccccagggcaagcgaaaggtgatcaacactccggaaatcctgcggaagccctcccagcctcctccccggccccctccagattatctgcgtggtgggtccccacctgcaccactgccagctcacctgagcagggctgctaggaactccccagggcccgggtctcaaatagagaggacggagtcgtccaggaggcctcctccaagccggccaattccccccgcaccaaattgcatcgtttcccaggacttctccaggcctcggccgccccagaaggcactcccggcaaacccagtgccaggccgcaggagcctccccaggccaggaggtgcatccccactgcggccccctggtgctggccctcagcagtcccggcctctggcagcacttgccccaaagagggtatggaagacttgcaatttgaaaactggggaccagttccaaagtcagtaattgtgttaaccacgtgtataacagctctgctggacacccaagaaagccatgggaacgccaactggaaaggtccccttccccaggggagcctgcgaaggagaggttctgtagaatccaagcccacatttccaaagtcacccccaacgcgtcctctcacaccgtccactgtgcgtttgtatgtgtctgggatccagggcaatgtgaattttctttttatttgggagattgttcacggaaaacagatcttcttctctcttgtccacctattaattgtttacaatatttgtacatctatgcaaaatacttgaatgggccatggtgccttttttccttgttagtatttaattaaaaatgaattgtttgtcatttgcaatgtta

SEQ ID NO: 397 - DNA, 6481 bp, Homo sapiens
  source 1..6481: mol_type = unassigned DNA
agacgcgcctccaccgccgggcagtgggcaggtatggctgagggcgtgtgagcgccgagcgctaagggccgccgccaccatgccagggggcgcaggcgccgcccggctctgcttgctggcgtttgccctgcagcccctccggccgcgggcggcgcgggagcctggatggacaagaggaagtgaggaaggcagccccaagctgcagcatgaacttatcatacctcagtggaagacttcagaaagccccgtgagagaaaagcatccactcaaagctgagctcagggtaatggctgaggggcgagaactgatcctggacctggagaagaatgagcaactttttgctccttcctacacagaaacccattatacttcaagtggtaaccctcaaaccaccacacggaaattggaggatcactgcttttaccacggcacggtgagggagacagaactgtccagcgtcacgctcagcacttgccgaggaattagaggactgattacggtgagcagcaacctcagctacgtcatcgagcccctccctgacagcaagggccaacaccttatttacagatctgaacatctcaagccgcccccgggaaactgtgggttcgagcactccaagcccaccaccagggactgggctcttcagtttacacaacagaccaagaagcgacctcgcaggatgaaaagggaagatttaaactccatgaagtatgtggagctttacctcgtggctgattatttagagtttcagaagaatcgacgagaccaggacgccaccaaacacaagctcatagagatcgccaactatgttgataagttttaccgatccttgaacatccggattgctctcgtgggcttggaagtgtggacccacgggaacatgtgtgaagtttcagagaatccatattctaccctctggtcctttctcagttggaggcgcaagctgcttgcccagaagtaccatgacaacgcccaattaatcacgggcatgtccttccacggcaccaccatcggcctggcccccctcatggccatgtgctctgtgtaccagtctggaggagtcaacatggaccactccgagaatgccattggcgtggctgccaccatggcccacgagatgggccacaactttggcatgacccatgattctgcagattgctgctcggccagtgcggctgatggtgggtgcatcatggcagctgccactgggcacccctttcccaaagtgttcaatggatgcaacaggagggagctggacaggtatctgcagtcaggtggtggaatgtgtctctccaacatgccagacaccaggatgttgtatggaggccggaggtgtgggaacgggtatctggaagatggggaagagtgtgactgtggagaagaagaggaatgtaacaacccctgctgcaatgcctctaattgtaccctgaggccgggggcggagtgtgctcacggctcctgctgccaccagtgtaagctgttggctcctgggaccctgtgccgcgagcaggccaggcagtgtgacctcccggagttctgtacgggcaagtctccccactgccctaccaacttctaccagatggatggtaccccctgtgagggcggccaggcctactgctacaacggcatgtgcctcacctaccaggagcagtgccagcagctgtggggacccggagcccgacctgcccctgacctctgcttcgagaaggtgaatgtggcaggagacacctttggaaactgtggaaaggacatgaatggtgaacacaggaagtgcaacatgagagatgcgaagtgtgggaagatccagtgtcagagctctgaggcccggcccctggagtccaacgcggtgcccattgacaccactatcatcatgaatgggaggcagatccagtgccggggcacccacgtctaccgaggtcctgaggaggagggtgacatgctggacccagggctggtgatgactggaaccaagtgtggctacaaccatatttgctttgaggggcagtgcaggaacacctccttctttgaaactgaaggctgtgggaagaagtgcaatggccatggggtctgtaacaacaaccagaactgccactgcctgccgggctgggccccgcccttctgcaacacaccgggccacgggggcagtatcgacagtgggcctatgccccctgagagtgtgggtcctgtggtagctggagtgttggtggccatcttggtgctggcggtcctcatgctgatgtactactgctgcagacagaacaacaaactaggccaactcaagccctcagctctcccttccaagctgaggcaacagttcagttgtcccttcagggtttctcagaacagcgggactggtcatgccaacccaactttcaagctgcagacgccccagggcaagcgaaaggtgatcaacactccggaaatcctgcggaagccctcccagcctcctccccggccccctccagattatctgcgtggtgggtccccacctgcaccactgccagctcacctgagcagggctgctaggaactccccagggcccgggtctcaaatagagaggacggagtcgtccaggaggcctcctccaagccggccaattccccccgcaccaaattgcatcgtttcccaggacttctccaggcctcggccgccccagaaggcactcccggcaaacccagtgccaggccgcaggagcctccccaggccaggaggtgcatccccactgcggccccctggtgctggccctcagcagtcccggcctctggcagcacttgccccaaagtttccagaatacagatcacagagggctggagggatgattagctcgaaaatctagacctgtccaaggggcttctccctttccttgagctctctggacactgcagaggacccatggccatggaaccctgaagaagcatgtctggccgcctctgagctcctcccaccctcctccaggaacctccacatctccaaaaatctccctgttgactcagtgcctcctcggcttccttggaagcccagagggactatgatctgatggcctctaggtgttgttttgtgcaatatacagccccaggtagggaggggagagtatgaggagggtgactggcagcttctcctccagactcctagccccgaggtgctgatggagatgctcaaggccagcaagcccctcaggccagcacttcgcttgcagaagccatccattcactcctggggtgcagggcacgcaagagagcttcccattgcttctgctctcctcagaggtcccgggctggatggaggctggtacttacccaccccttttagcttttagggattaaggaagggtcaagccagccactgctgtggccctgcccagggcttggttgagggaacggcttctggctgtatggctgcatgtgacaagccacgtcccctcccacctctccccaaacccctgcatccctgtattcacacgggtcactctgactcagacaggtactattcgtaggcagtgtagacagcaggaggagcaccgggcttgggcttcctctgagccgtgatgccaaaggttgcgactcctgactctggataatttttagttgctctttgttttctctgccgcactttcctggtgccccacgcttttctctcttccttcccctctcattctccctctaatgtgtggtgctttggtgagcaaaccctcagcagtcctgaccttcgggtgaccaggtgcttgtgacctacaagtcagagtcctctctcacagtcggccactggatttccctcactggctctcaggagtgtgaccagagtagacttggggcatggccattggggtcatatgtttatttttcattgtgttttgtgacctcagcagggtgggggtcttcctccttactctaagctaaatctaggtgaggtttccccttagggagcccagctatttacaaagtacacacgagggagcaggctggtcattgacttcgggctggaccgttgccctctgagcagagaacagacccatttctgggagctgcccgagatcactggagaaggcagccagcagcagctgcactggaacagtcagagcagggagcctcttcctcaacccagctttttgtcattcacttccttttgttctctctctggtcactgcccttacctgaccctcacagaaagagagctctgagcaggtgagggggtctgcggtggctcctgtcttccctgcagcagggaaggagggccgtgtggtgctttgctagataggacggtttttgcaaagcacctggagatgtttgctgggagatagactcccactccacaaaggtgctgggtggctctccggacaggagctggcctgactctcactcctctgaggctttcctggggcctcctcccatcctgccatgagcaattgtttgctcttgaaaacctcactgcaaggctgaggctgagcttctgattcaccaccccagggcctccttatagttctctgcacacaataggtgcttcttggatgttcttgggtttggaaataagtggaaaatacgggatgtacccctgggggaaaagcctgggttgggtttagaaagatctcaggaaaatgagtttctcttccctcagggtggctgtgatacaggttccccatgtccttgccgtgggtcatccttgctgtgggtcatccttgctgtggagatccattccccacctttcctgtggcccaaccttttatttaaatgtgctaccctctgcctcaaggcttggttcctggaaagtaaaggtgaaaacatcccctttcacccctctgcaaaacaaacaagcaacatcctcaaaacccaaccccatgcctcacagagcttcctgtggcttctccagcctttctccctcacatcaggaggtagatagctctgaaatgacagcgccacagccatagtgactgcatgagccatctgaacctgcagtccaccctccctggaaccacaccagaaagagacctgggttgtcgttttcttgctttttgttttgttttgttttattattttcatatcacctccatcccataaagttgtactgtgaactggaagatggtggaatgttttggaatttgatagactttcggcaaccagttctactaatgcttcactcctggctctgttcagggaggctgcccaggaggaagactggccattatgcatccccttttctttccagtgcccagtatgctgttttgaggtgtcaaatacaaataaatctgggcttagggaaggagagaccttattccaaagcacgattgcagaaggggaaagggaatattgcaaaagggagaggaaggggccttatgggaatagtgaaaaggctcagaccgaccgatggcaagatctgcaagcgtctcaaagcccaggcagaaaaggacttttcttttattggaagaagtaaacatggctagaaagaaccacgttcagggaatgacgttgtgcccagcctttttttttttttttttttttttgtctccaggggaggggctgtttgctggctcaggctgaggatggcccaaagtccagggtctggtggggaggagggaagcttaactcaagtttgggttagtgagttagcaagctctttgtgcagatggggatgtaggtaaatctttttaaaagtgaaattaacctcctgccaattttacaacccaagaatttttttttaagggccttggagccatctctaaaacaaacctcaagggatttagtgccctgtctccctgtctctagaagccttagcctgggcacctggctcaatcttgtaactgcctgctagccatagattcctttcagccttgctgacttctccctataaaagtaaagcctttttctgccccagctctgagacacttgcagatcttaaggtctgagacttgctgattttctggttggagtgtttttttgtattgccatagtcccttccccctgaagcaatagcccctccccacctcctgcaatacgcctttccaatctttattggaagtctctccctgcctacttcctaatttattcttatttgacagagggtatggaagacttgcaatttgaaaactggggaccagttccaaagtcagtaattgtgttaaccacgtgtataacagctctgctggacacccaagaaagccatgggaacgccaactggaaaggtccccttccccaggggagcctgcgaaggagaggttctgtagaatccaagcccacatttccaaagtcacccccaacgcgtcctctcacaccgtccactgtgcgtttgtatgtgtctgggatccagggcaatgtgaattttctttttatttgggagattgttcacggaaaacagatcttcttctctcttgtccacctattaattgtttacaatatttgtacatctatgcaaaatacttgaatgggccatggtgccttttttccttgttagtatttaattaaaaatgaattgtttgtcatttgcaatgtta

SEQ ID NO: 398 - DNA, 3312 bp, Homo sapiens
  source 1..3312: mol_type = unassigned DNA
tggctgagggcgtgtgagcgccgagcgctaagggccgccgccaccatgccagggggcgcaggcgccgcccggctctgcttgctggcgtttgccctgcagcccctccggccgcgggcggcgcgggagcctggatggacaagaggaagtgaggaaggcagccccaagctgcagcatgaacttatcatacctcagtggaagacttcagaaagccccgtgagagaaaagcatccactcaaagctgagctcagggtaatggctgaggggcgagaactgatcctggacctggagaagaatgagcaactttttgctccttcctacacagaaacccattatacttcaagtggtaaccctcaaaccaccacacggaaattggaggatcactgcttttaccacggcacggtgagggagacagaactgtccagcgtcacgctcagcacttgccgaggaattagaggactgattacggtgagcagcaacctcagctacgtcatcgagcccctccctgacagcaagggccaacaccttatttacagatctgaacatctcaagccgcccccgggaaactgtgggttcgagcactccaagcccaccaccagggactgggctcttcagtttacacaacagaccaagaagcgacctcgcaggatgaaaagggaagatttaaactccatgaagtatgtggagctttacctcgtggctgattatttagagtttcagaagaatcgacgagaccaggacgccaccaaacacaagctcatagagatcgccaactatgttgataagttttaccgatccttgaacatccggattgctctcgtgggcttggaagtgtggacccacgggaacatgtgtgaagtttcagagaatccatattctaccctctggtcctttctcagttggaggcgcaagctgcttgcccagaagtaccatgacaacgcccaattaatcacgggcatgtccttccacggcaccaccatcggcctggcccccctcatggccatgtgctctgtgtaccagtctggaggagtcaacatggaccactccgagaatgccattggcgtggctgccaccatggcccacgagatgggccacaactttggcatgacccatgattctgcagattgctgctcggccagtgcggctgatggtgggtgcatcatggcagctgccactgggcacccctttcccaaagtgttcaatggatgcaacaggagggagctggacaggtatctgcagtcaggtggtggaatgtgtctctccaacatgccagacaccaggatgttgtatggaggccggaggtgtgggaacgggtatctggaagatggggaagagtgtgactgtggagaagaagaggaatgtaacaacccctgctgcaatgcctctaattgtaccctgaggccgggggcggagtgtgctcacggctcctgctgccaccagtgtaagctgttggctcctgggaccctgtgccgcgagcaggccaggcagtgtgacctcccggagttctgtacgggcaagtctccccactgccctaccaacttctaccagatggatggtaccccctgtgagggcggccaggcctactgctacaacggcatgtgcctcacctaccaggagcagtgccagcagctgtggggacccggagcccgacctgcccctgacctctgcttcgagaaggtgaatgtggcaggagacacctttggaaactgtggaaaggacatgaatggtgaacacaggaagtgcaacatgagagatgcgaagtgtgggaagatccagtgtcagagctctgaggcccggcccctggagtccaacgcggtgcccattgacaccactatcatcatgaatgggaggcagatccagtgccggggcacccacgtctaccgaggtcctgaggaggagggtgacatgctggacccagggctggtgatgactggaaccaagtgtggctacaaccatatttgctttgaggggcagtgcaggaacacctccttctttgaaactgaaggctgtgggaagaagtgcaatggccatggggtctgtaacaacaaccagaactgccactgcctgccgggctgggccccgcccttctgcaacacaccgggccacgggggcagtatcgacagtgggcctatgccccctgagagtgtgggtcctgtggtagctggagtgttggtggccatcttggtgctggcggtcctcatgctgatgtactactgctgcagacagaacaacaaactaggccaactcaagccctcagctctcccttccaagctgaggcaacagttcagttgtcccttcagggtttctcagaacagcgggactggtcatgccaacccaactttcaagctgcagacgccccagggcaagcgaaaggtgatcaacactccggaaatcctgcggaagccctcccagcctcctccccggccccctccagattatctgcgtggtgggtccccacctgcaccactgccagctcacctgagcagggctgctaggaactccccagggcccgggtctcaaatagagaggacggagtcgtccaggaggcctcctccaagccggccaattccccccgcaccaaattgcatcgtttcccaggacttctccaggcctcggccgccccagaaggcactcccggcaaacccagtgccaggccgcaggagcctccccaggccaggaggtgcatccccactgcggccccctggtgctggccctcagcagtcccggcctctggcagcacttgccccaaaggtgagtccacgggaagccctcaaggtgaaagctggtaccagagggctccaggggggcaggtgtagagttgagaaaacaaagcaattcatgcttcttgtggtctggactgaacttccagaacaaaagccaagggcaaaacattcatgtttcttggtgcccgcttgactgtggagttttggcttcatgtgaaaggtgattcttagaatcctgagctgtggtggcttcagtcctgcccctgcacctgacctggggagggaccctgagcaagtccctcttgagtctgtttcctcatttgtacagaggctatgatgagcagtagtaccagccccatcaggttgttgtgaagagcaaggaagtgcattagtagaagccacctggcctgcgggaggctgtgtacacttggcccctcctcgtacttcttctgtgtggctgacagtctcagtttgccagtcttggcagtcaggtcagaaagggatgaggtgaagaagctggctgaccatgctgtattcccacgaggcattgagaaaactatggactgtgctgctgccttagcagggaagggaa

SEQ ID NO: 399 - DNA, 690 bp, Homo sapiens
  source 1..690: mol_type = unassigned DNA
gggcagtgggcaggtatggctgagggcgtgtgagcgccgagcgctaagggccgccgccaccatgccagggggcgcaggcgccgcccggctctgcttgctggcgtttgccctgcagcccctccggccgcgggcggcgcgggagcctggatggacaagaggaagtgaggaaggcagccccaagctgcagcatgaacttatcatacctcagtggaagacttcagaaagccccgtgagagaaaaggtaagactcaaaagacctcatttacactggcaggagttgacaactgaggtttgggctacctactcaactttcttagaatcccagtcatcaccattagttctgtttctggcccactctgtcctctgggtgcccattttggagatcacagatgggactttccttccttgtatgacaaacttctagaacacttcccaatgctattagttgaggaaatgaaaattcacattaatgctgacacaagctaagtgcagatgtgttggtgtcacagaaatcacttagtcttgattggaattcattaaatattgtcattgttatttttgctctgcataatacatacttcattttcttgaaggaataatgtacttggagagaaaaaagataataatataaactataaactattttaataagacgcagcgtagagacctagtactggggaatgtatctta

SEQ ID NO: 400 - DNA, 2458 bp, Homo sapiens
  source 1..2458: mol_type = unassigned DNA
atctctggctggggcctggagtggggaacggtgcatggggccgacgagtgtcctccgggctggactcactccttcctgtctccccccacccagtggtgctacaaacgggtctgtgtcccctttgggtcgcgcccagagggtgtggacggagcctgggggccgtggactccatggggcgactgcagccggacctgtggcggcggcgtgtcctcttctagccgtcactgcgacagccccaggccaaccatcgggggcaagtactgtctgggtgagagaaggcggcaccgctcctgcaacacggatgactgtccccctggctcccaggacttcagagaagtgcagtgttctgaatttgacagcatccctttccgtgggaaattctacaagtggaaaacgtaccggggaggcctgctcgctcacgtgcctagcggaaggcttcaacttctacacggagagggcggcagccgtggtggacgggacaccctgccgtccagacacggtggacatttgcgtcagtggcgaatgcaagcacgtgggctgcgaccgagtcctgggctccgacctgcgggaggacaagtgccgagtgtgtggcggtgacggcagtgcctgcgagaccatcgagggcgtcttcagcccagcctcacctggggccgggtacgaggatgtcgtctggattcccaaaggctccgtccacatcttcatccaggatctgaacctctctctcagtcacttggccctgaagggagaccaggagtccctgctgctggaggggctgcctgggaccccccagccccaccgtctgcctctagctgggaccacctttcaactgcgacaggggccagaccaggtccagagcctcgaagccctgggaccgattaatgcatctctcatcgtcatggtgctggcccggaccgagctgcctgccctccgctaccgcttcaatgcccccatcgcccgtgactcgctgcccccctactcctggcactatgcgccctggaccaagtgctcggcccagtgtgcaggcggtagccaggtgcaggcggtggagtgccgcaaccagctggacagctccgcggtcgccccccactactgcagtgcccacagcaagctgcccaaaaggcagcgcgcctgcaacacggagccttgccctccagactgggttgtagggaactggtcgctctgcagccgcagctgcgatgcaggcgtgcgcagccgctcggtcgtgtgccagcgccgcgtctctgccgcggaggagaaggcgctggacgacagcgcatgcccgcagccgcgcccacctgtactggaggcctgccacggccccacttgccctccggagtgggcggccctcgactggtctgagtgcacccccagctgcgggccgggcctccgccaccgcgtggtcctttgcaagagcgcagaccaccgcgccacgctgcccccggcgcactgctcacccgccgccaagccaccggccaccatgcgctgcaacttgcgccgctgccccccggcccgctgggtggctggcgagtggggtgagtgctctgcacagtgcggcgtcgggcagcggcagcgctcggtgcgctgcaccagccacacgggccaggcgtcgcacgagtgcacggaggccctgcggccgcccaccacgcagcagtgtgaggccaagtgcgacagcccaacccccggggacggccctgaagagtgcaaggatgtgaacaaggtcgcctactgccccctggtgctcaaatttcagttctgcagccgagcctacttccgccagatgtgctgcaaaacctgccatggccactagggggcgcgcggcacccggagccacagctggcggggtctccgccgccagccctgcagcgggccggccagagggggccccgggggggcgggaactgggagggaagggtgagacggagccggaagttatttattgggaacccctgcagggccctggctggggggatggagaggggctggctatccccccagagcccctcttcagcatccgccccttccagttcacatagtgagaccccccctccagggtgggtctggggaggggacagctgttcaccccagcaccctttgaacccacccttagggagtccccaacactccccccctcctttgatcggaatatgtactgtgaagagtaggggtggggaggtggtctgccggtgccctgccccccagcactgccctacccctccactccgagctgggggggaatctgtgtctgctatgggaggggggggggtagcaccacctccctgacaccctcccctgacctgactagggggaggatccaccccaacctctgccctgcccgccccaggggcaccccgacatccaggccaccccctcatggtgctacagaccctgccctggggcccacacactcctgccaggaagccctacatcaataaagttctgtcttgtgtagatttctacg

SEQ ID NO: 401 - DNA, 3333 bp, Homo sapiens
  source 1..3333: mol_type = unassigned DNA
aggggaggcggcactgtgggggctgccggcagccggggctggggagagacatgtggacacgtggcctctatggctcccgcctgccagatcctccgctgggccctcgccctggggctgggcctcatgttcgaggtcacgcacgccttccggtctcaagatgagttcctgtccagtctggagagctatgagatcgccttccccacccgcgtggaccacaacggggcactgctggccttctcgccacctcctccccggaggcagcgccgcggcacgggggccacagccgagtcccgcctcttctacaaagtggcctcgcccagcacccacttcctgctgaacctgacccgcagctcccgtctactggcagggcacgtctccgtggagtactggacacgggagggcctggcctggcagagggcggcccggccccactgcctctacgctggtcacctgcagggccaggccagcagctcccatgtggccatcagcacctgtggaggcctgcacggcctgatcgtggcagacgaggaagagtacctgattgagcccctgcacggtgggcccaagggttctcggagcccggaggaaagtggaccacatgtggtgtacaagcgttcctctctgcgtcacccccacctggacacagcctgtggagtgagagatgagaaaccgtggaaagggcggccatggtggctgcggaccttgaagccaccgcctgccaggcccctggggaatgaaacagagcgtggccagccaggcctgaagcgatcggtcagccgagagcgctacgtggagaccctggtggtggctgacaagatgatggtggcctatcacgggcgccgggatgtggagcagtatgtcctggccatcatgaacattgtcaggttgccaaacttttccaggactcgagtctgggaagcaccgttaacatcctcgtaactcgcctcatcctgctcacggaggaccagcccactctggagatcacccaccatgccgggaagtccctggacagcttctattcggcatgaaccatgacggcgtgggaaacagctgtggggcccgtggtcaggacccagccaagctcatggctgcccacattaccatgaagaccaacccattcgtgtggtcatcctgcagccgtgactacatcaccagctttctagactcgggcctggggctctgcctgaacaaccggccccccagacaggactttgtgtacccgacagtggcaccgggccaagcctacgatgcagatgagcaatgccgctttcagcatggagtcaaatcgcgtcagtgaggtctgcagcgagctgtggtgtctgagcaagagcaaccggtgcatcaccaacagcatcccggccgccgagggcacgctgtgccagacgcacaccatcgacaaggggtggtgctacaaacgggtctgtgtcccctttgggtcgcgcccagagggtgtggacggagcctgggggccgtggactccatggggcgactgcagccggacctgtggcggcggcgtgtcctcttctagccgtcactgcgacagccccaggccaaccatcgggggcaagtactgtctgggtgagagaaggcggcaccgctcctgcaacacggatgactgtccccctggctcccaggacttcagagaagtgcagtgttctgaatttgacagcatccctttccgtgggaaattctacaagtggaaaacgtaccggggagggggcgtgaaggcctgctcgctcacgtgcctagcggaaggcttcaacttctacacggagagggcggcagccgtggtggacgggacaccctgccgtccagacacggtggacatttgcgtcagtggcgaatgcaagcacgtgggctgcgaccgagtcctgggctccgacctgcgggaggacaagtgccgagtgtgtggcggtgacggcagtgcctgcgagaccatcgagggcgtcttcagcccagcctcacctggggccgggtacgaggatgtcgtctggattcccaaaggctccgtccacatcttcatccaggatctgaacctctctctcagtcacttggccctgaagggagaccaggagtccctgctgctggaggggctgcctgggaccccccagccccaccgtctgcctctagctgggaccacctttcaactgcgacaggggccagaccaggtccagagcctcgaagccctgggaccgattaatgcatctctcatcgtcatggtgctggcccggaccgagctgcctgccctccgctaccgcttcaatgcccccatcgcccgtgactcgctgcccccctactcctggcactatgcgccctggaccaagtgctcggcccagtgtgcaggcggtagccaggtgcaggcggtggagtgccgcaaccagctggacagctccgcggtcgccccccactactgcagtgcccacagcaagctgcccaaaaggcagcgcgcctgcaacacggagccttgccctccagactgggttgtagggaactggtcgctctgcagccgcagctgcgatgcaggcgtgcgcagccgctcggtcgtgtgccagcgccgcgtctctgccgcggaggagaaggcgctggacgacagcgcatgcccgcagccgcgcccacctgtactggaggcctgccacggccccacttgccctccggagtgggcggccctcgactggtctgagtgcacccccagctgcgggccgggcctccgccaccgcgtggtcctttgcaagagcgcagaccaccgcgccacgctgcccccggcgcactgctcacccgccgccaagccaccggccaccatgcgctgcaacttgcgccgctgccccccggcccgctgggtggctggcgagtggggtgagtgctctgcacagtgcggcgtcgggcagcggcagcgctcggtgcgctgcaccagccacacgggccaggcgtcgcacgagtgcacggaggccctgcggccgcccaccacgcagcagtgtgaggccaagtgcgacagcccaacccccggggacggccctgaagagtgcaaggatgtgaacaaggtcgcctactgccccctggtgctcaaatttcagttctgcagccgagcctacttccgccagatgtgctgcaaaacctgccatggccactagggggcgcgcggcacccggagccacagctggcggggtctccgccgccagccctgcagcgggccggccagagggggccccgggggggcgggaactgggagggaagggtgagacggagccggaagttatttattgggaacccctgcagggccctggctggggggatggagaggggctggctatccccccagagcccctcttcagcatc

SEQ ID NO: 402 - DNA, 3749 bp, Homo sapiens
  source 1..3749: mol_type = unassigned DNA
cgcgcggggcggcgagacagcggcggcgacggcgcggaggccccgggcgcggcgcaggctccaaagaagaagaaaccaaggcccagagagggaggcccaggtgcagggagcaggcgagggaaggatccgtacaggggcccaacactactccaccaaccgaagcccccaaaaggagcccggtgatgctgcgaaggctgtgaacaggggaggcggcactgtgggggctgccggcagccggggctggggagagacatgtggacacgtggcctctatggctcccgcctgccagatcctccgctgggccctcgccctggggctgggcctcatgttcgaggtcacgcacgccttccggtctcaagatgagttcctgtccagtctggagagctatgagatcgccttccccacccgcgtggaccacaacggggcactgctggccttctcgccacctcctccccggaggcagcgccgcggcacgggggccacagccgagtcccgcctcttctacaaagtggcctcgcccagcacccacttcctgctgaacctgacccgcagctcccgtctactggcagggcacgtctccgtggagtactggacacgggagggcctggcctggcagagggcggcccggccccactgcctctacgctggtcacctgcagggccaggccagcagctcccatgtggccatcagcacctgtggaggcctgcacggcctgatcgtggcagacgaggaagagtacctgattgagcccctgcacggtgggcccaagggttctcggagcccggaggaaagtggaccacatgtggtgtacaagcgttcctctctgcgtcacccccacctggacacagcctgtggagtgagagatgagaaaccgtggaaagggcggccatggtggctgcggaccttgaagccaccgcctgccaggcccctggggaatgaaacagagcgtggccagccaggcctgaagcgatcggtcagccgagagcgctacgtggagaccctggtggtggctgacaagatgatggtggcctatcacgggcgccgggatgtggagcagtatgtcctggccatcatgaacattgttgccaaacttttccaggactcgagtctgggaagcaccgttaacatcctcgtaactcgcctcatcctgctcacggaggaccagcccactctggagatcacccaccatgccgggaagtccctggacagcttctgtaagtggcagaaatccatcgtgaaccacagcggccatggcaatgccattccagagaacggtgtggctaaccatgacacagcagtgctcatcacacgctatgacatctgcatctacaagaacaaaccctgcggcacactaggcctggccccggtgggcggaatgtgtgagcgcgagagaagctgcagcgtcaatgaggacattggcctggccacagcgttcaccattgcccacgagatcgggcacacattcggcatgaaccatgacggcgtgggaaacagctgtggggcccgtggtcaggacccagccaagctcatggctgcccacattaccatgaagaccaacccattcgtgtggtcatcctgcagccgtgactacatcaccagctttctagactcgggcctggggctctgcctgaacaaccggccccccagacaggactttgtgtacccgacagtggcaccgggccaagcctacgatgcagatgagcaatgccgctttcagcatggagtcaaatcgcgtcagtgtaaatacggggaggtctgcagcgagctgtggtgtctgagcaagagcaaccggtgcatcaccaacagcatcccggccgccgagggcacgctgtgccagacgcacaccatcgacaaggggtggtgctacaaacgggtctgtgtcccctttgggtcgcgcccagagggtgtggacggagcctgggggccgtggactccatggggcgactgcagccggacctgtggcggcggcgtgtcctcttctagccgtcactgcgacagccccaggccaaccatcgggggcaagtactgtctgggtgagagaaggcggcaccgctcctgcaacacggatgactgtccccctggctcccaggacttcagagaagtgcagtgttctgaatttgacagcatccctttccgtgggaaattctacaagtggaaaacgtaccggggagggggcgtgaaggcctgctcgctcacgtgcctagcggaaggcttcaacttctacacggagagggcggcagccgtggtggacgggacaccctgccgtccagacacggtggacatttgcgtcagtggcgaatgcaagcacgtgggctgcgaccgagtcctgggctccgacctgcgggaggacaagtgccgagtgtgtggcggtgacggcagtgcctgcgagaccatcgagggcgtcttcagcccagcctcacctggggccgggtacgaggatgtcgtctggattcccaaaggctccgtccacatcttcatccaggatctgaacctctctctcagtcacttggccctgaagggagaccaggagtccctgctgctggaggggctgcctgggaccccccagccccaccgtctgcctctagctgggaccacctttcaactgcgacaggggccagaccaggtccagagcctcgaagccctgggaccgattaatgcatctctcatcgtcatggtgctggcccggaccgagctgcctgccctccgctaccgcttcaatgcccccatcgcccgtgactcgctgcccccctactcctggcactatgcgccctggaccaagtgctcggcccagtgtgcaggcggtagccaggtgcaggcggtggagtgccgcaaccagctggacagctccgcggtcgccccccactactgcagtgcccacagcaagctgcccaaaaggcagcgcgcctgcaacacggagccttgccctccagactgggttgtagggaactggtcgctctgcagccgcagctgcgatgcaggcgtgcgcagccgctcggtcgtgtgccagcgccgcgtctctgccgcggaggagaaggcgctggacgacagcgcatgcccgcagccgcgcccacctgtactggaggcctgccacggccccacttgccctccggagtgggcggccctcgactggtctgagtgcacccccagctgcgggccgggcctccgccaccgcgtggtcctttgcaagagcgcagaccaccgcgccacgctgcccccggcgcactgctcacccgccgccaagccaccggccaccatgcgctgcaacttgcgccgctgccccccggcccgctgggtggctggcgagtggggtgagtgctctgcacagtgcggcgtcgggcagcggcagcgctcggtgcgctgcaccagccacacgggccaggcgtcgcacgagtgcacggaggccctgcggccgcccaccacgcagcagtgtgaggccaagtgcgacagcccaacccccggggacggccctgaagagtgcaaggatgtgaacaaggtcgcctactgccccctggtgctcaaatttcagttctgcagccgagcctacttccgccagatgtgctgcaaaacctgccatggccactagggggcgcgcggcacccggagccacagctggcggggtctccgccgccagccctgcagcgggccggccagagggggccccgggggggcgggaactgggagggaagggtgagacggagccggaagttatttattgggaacccctgcagggccctggctggggggatgga

SEQ ID NO: 403 - DNA, 3423 bp, Homo sapiens
  source 1..3423: mol_type = unassigned DNA
gcggcggcgacggcgcggaggccccgggcgcggcgcaggagcccggtgatgctgcgaaggctgtgaacaggggaggcggcactgtgggggctgccggcagccggggctggggagagacatgtggacacgtggcctctatggctcccgcctgccagatcctccgctgggccctcgccctggggctgggcctcatgttcgaggtcacgcacgccttccggtctcaagatgagttcctgtccagtctggagagctatgagatcgccttccccacccgcgtggaccacaacggggcactgctggccttctcgccacctcctccccggaggcagcgccgcggcacgggggccacagccgagtcccgcctcttctacaaagtggcctcgcccagcacccacttcctgctgaacctgacccgcagctcccgtctactggcagggcacgtctccgtggagtactggacacgggagggcctggcctggcagagggcggcccggccccactgcctctacgctggtcacctgcagggccaggccagcagctcccatgtggccatcagcacctgtggaggcctgcacggcctgatcgtggcagacgaggaagagtacctgattgagcccctgcacggtgggcccaagggttctcggagcccggaggaaagtggaccacatgtggtgtacaagcgttcctctctgcgtcacccccacctggacacagcctgtggagtgagagatgagaaaccgtggaaagggcggccatggtggctgcggaccttgaagccaccgcctgccaggcccctggggaatgaaacagagcgtggccagccaggcctgaagcgatcggtcagccgagagcgctacgtggagaccctggtggtggctgacaagatgatggtggcctatcacgggcgccgggatgtggagcagtatgtcctggccatcatgaacattgtcaggttgccaaacttttccaggactcgagtctgggaagcaccgttaacatcctcgtaactcgcctcatcctgctcacggaggaccagcccactctggagatcacccaccatgccgggaagtccctggacagcttctgtaagtggcagaaatccatcgtgaaccacagcggccatggcaatgccattccagagaacggtgtggctaaccatgacacagcagtgctcatcacacgctatgacatctgcatctacaagaacaaaccctgcggcacactaggcctggccccggtgggcggaatgtgtgagcgcgagagaagctgcagcgtcaatgaggacattggcctggccacagcgttcaccattgcccacgagatcgggcacacattcggcatgaaccatgacggcgtgggaaacagctgtggggcccgtggtcaggacccagccaagctcatggctgcccacattaccatgaagaccaacccattcgtgtggtcatcctgcagccgtgactacatcaccagctttctagactcgggcctggggctctgcctgaacaaccggccccccagacaggactttgtgtacccgacagtggcaccgggccaagcctacgatgcagatgagcaatgccgctttcagcatggagtcaaatcgcgtcagtgtaaatacggggaggtctgcagcgagctgtggtgtctgagcaagagcaaccggtgcatcaccaacagcatcccggccgccgagggcacgctgtgccagacgcacaccatcgacaaggggtggtgctacaaacgggtctgtgtcccctttgggtcgcgcccagagggtgtggacggagcctgggggccgtggactccatggggcgactgcagccggacctgtggcggcggcgtgtcctcttctagccgtcactgcgacagccccaggccaaccatcgggggcaagtactgtctgggtgagagaaggcggcaccgctcctgcaacacggatgactgtccccctggctcccaggacttcagagaagtgcagtgttctgaatttgacagcatccctttccgtgggaaattctacaagtggaaaacgtaccggggagggggcgtgaaggcctgctcgctcacgtgcctagcggaaggcttcaacttctacacggagagggcggcagccgtggtggacgggacaccctgccgtccagacacggtggacatttgcgtcagtggcgaatgcaagcacgtgggctgcgaccgagtcctgggctccgacctgcgggaggacaagtgccgagtgtgtggcggtgacggcagtgcctgcgagaccatcgagggcgtcttcagcccagcctcacctggggccgggtacgaggatgtcgtctggattcccaaaggctccgtccacatcttcatccaggatctgaacctctctctcagtcacttggccctgaagggagaccaggagtccctgctgctggaggggctgcctgggaccccccagccccaccgtctgcctctagctgggaccacctttcaactgcgacaggggccagaccaggtccagagcctcgaagccctgggaccgattaatgcatctctcatcgtcatggtgctggcccggaccgagctgcctgccctccgctaccgcttcaatgcccccatcgcccgtgactcgctgcccccctactcctggcactatgcgccctggaccaagtgctcggcccagtgtgcaggcggtagccaggtgcaggcggtggagtgccgcaaccagctggacagctccgcggtcgccccccactactgcagtgcccacagcaagctgcccaaaaggcagcgcgcctgcaacacggagccttgccctccagactgggttgtagggaactggtcgctctgcagccgcagctgcgatgcaggcgtgcgcagccgctcggtcgtgtgccagcgccgcgtctctgccgcggaggagaaggcgctggacgacagcgcatgcccgcagccgcgcccacctgtactggaggcctgccacggccccacttgccctccggagtgggcggccctcgactggtctgaggtcagccgcccccttccttcgcgcccactgggatgcccaggtggggtgtccacggagacgcctctgcgcggtctccaggttagctgtcccctcctcacttcgcactggggcagcaccctgagcacgaaacgccccttccaactgcagtgcacccccagctgcgggccgggcctccgccaccgcgtggtcctttgcaagagcgcagaccaccgcgccacgctgcccccggcgcactgctcacccgccgccaagccaccggccaccatgcgctgcaacttgcgccgctgccccccggcccgctgggtggctggcgagtggggtgagtgctctgcacagtgcggcgtcgggcagcggcagcgctcggtgcgctgcaccagccacacgggccaggcgtcgcacgagtgcacggaggccct

SEQ ID NO: 404 - DNA, 545 bp, Homo sapiens
  source 1..545: mol_type = unassigned DNA
tcctcttgggtctggggtctgtccctcttggcctcactcccccagggagcaagcaaagagttccggggtggcctggcccgtggtgtgacggggccgtgccccccagggggcgtgaaggcctgctcgctcacgtgcctagcggaaggcttcaacttctacacggagagggcggcagccgtggtggacgggacaccctgccgtccagacacggtggacatttgcgtcagtggcgaatgcaagcacgtgggctgcgaccgagtcctgggctccgacctgcgggaggacaagtgccgagtgtgtggcggtgacggcagtgcctgcgagaccatcgagggcgtcttcagcccagcctcacctggggccgggtacgaggatgtcgtctggattcccaaaggctccgtccacatcttcatccaggatctgaacctctctctcagtcacttggccctgaagggagaccaggagtccctgctgctggaggggctgcctgggaccccccagccccaccgtctgcctctagctgggaccacctttcaactgcgaca

SEQ ID NO: 405 - DNA, 831 bp, Homo sapiens
  source 1..831: mol_type = unassigned DNA
cccatcccggagaggctgatatctctggctggggcctggagtggggaacggtgcatggggccgacgagtgtcctccgggctggactcactccttcctgtctccccccacccagtggtgctacaaacgggtctgtgtcccctttgggtcgcgcccagagggtgtggacggagcctgggggccgtggactccatggggcgactgcagccggacctgtggcggcggcgtgtcctcttctagccgtcactgcgacagccccaggccaaccatcgggggcaagtactgtctgggtgagagaaggcggcaccgctcctgcaacacggatgactgtccccctggctcccaggacttcagagaagtgcagtgttctgaatttgacagcatccctttccgtgggaaattctacaagtggaaaacgtaccggggagggggcgtgaaggcctgctcgctcacgtgcctagcggaaggcttcaacttctacacggagagggcggcagccgtggtggacgggacaccctgccgtccagacacggtggacatttgcgtcagtggcgaatgcaagcacgtgggctgcgaccgagtcctgggctccgacctgcgggaggacaagtgccgagtgtgtggcggtgacggcagtgcctgcgagaccatcgagggcgtcttcagcccagcctcacctggggccgggtacgaggatgtcgtctggattcccaaaggctccgtccacatcttcatccaggatctgaacctctctctcagtcacttggccctgaagggagaccaggagtccctgctgctggaggggctgcctgggaccccccagccccaccgtc

SEQ ID NO: 406 - DNA, 472 bp, Homo sapiens
  source 1..472: mol_type = unassigned DNA
ggggaacggtgcatggggccgacgagtgtcctccgggctggactcactccttcctgtctccccccacccagtggtgctacaaacgggtctgtgtcccctttgggtcgcgcccagagggtgtggacggagcctgggggccgtggactccatggggcgactgcagccggacctgtggcggcggcgtgtcctcttctagccgtcactgcgacagccccaggccaaccatcgggggcaagtactgtctgggtgagagaaggcggcaccgctcctgcaacacggatgactgtccccctggctcccaggacttcagagaagtgcagtgttctgaatttgacagcatccctttccgtgggaaattctacaagtggaaaacgtaccggggaggtgagtgtgggactccaaaggctgtggggccgtgaagggcagccgtgggagtgtccagcagcaggtggatgaatgcagcatcccgggg

SEQ ID NO: 407 - DNA, 1015 bp, Homo sapiens
  source 1..1015: mol_type = unassigned DNA
ctcggcattgtcccctcccaaactcccacccctccacatagcttaaaagtgttgggggcttctccagtttagatgggggaacaaagagaaccaacagctggaaaaaactagagatgaggccgttggcctagtcatcatccaggccgatttctcagaaccaccactttctcttcggctactttgcccatcccataaaagaaccccaaatccttcctgttcattcctcagcagttcccacgtttccttccagaaactcagaaggcaccaggaactgaattgcaaagttcgttagagcacagactctgaattaaagagctgggttaaactccaggctattcccttagtagctgtgtgaccttacctgtctgaagcttggttttctcccagtaagatggggtagtactgcctaaagaggtatatggcatgtataaagtgctccataaatggagcttattgggagagtataagtcacaggccatgccccgcaaggggatgcacgaagacccaccgcgagccaggaagggagcaccgggctctctgctctgggaccggcagtgagccggacatctgggtcctcccaagccgggcgggctgccccagggaggaagggaggggggcgagcctgagcgggcacctcggcccgcaggaggtctgcagcgagctgtggtgtctgagcaagagcaaccggtgcatcaccaacagcatcccggccgccgagggcacgctgtgccagacgcacaccatcgacaaggggtggtgctacaaacgggtctgtgtcccctttgggtcgcgcccagagggtgtggacggagcctgggggccgtggactccatggggcgactgcagccggacctgtggcggcggcgtgtcctcttctagccgtcactgcgacagccccaggccaaccatcgggggcaagtactgtctgggtgagagaaggcggcaccgctcctgcaacacggatgactgtccccctggctcccaggacttcagagaagtgcagtgttctgaattt

SEQ ID NO: 408 - DNA, 1079 bp, Homo sapiens
  source 1..1079: mol_type = unassigned DNA
gtcaggttgccaaacttttccaggactcgagtctgggaagcaccgttaacatcctcgtaactcgcctcatcctgctcacggaggaccagcccactctggagatcacccaccatgccgggaagtccctggacagcttctgtaagtggcagaaatccatcgtgaaccacagcggccatggcaatgccattccagagaacggtgtggctaaccatgacacagcagtgctcatcacacgctatgacatctgcatctacaagaacaaaccctgcggcacactaggcctggccccggtgggcggaatgtgtgagcgcgagagaagctgcagcgtcaatgaggacattggcctggccacagcgttcaccattgcccacgagatcgggcacacgtgaggccagggcacacaagagggggaggaggggaggagctgggcgggtccctcagcgcccggcagagccgacacccctttccccagattcggcatgaaccatgacggcgtgggaaacagctgtggggcccgtggtcaggacccagccaagctcatggctgcccacattaccatgaagaccaacccattcgtgtggtcatcctgcagccgtgactacatcaccagctttctagactcgggcctggggctctgcctgaacaaccggccccccagacaggactttgtgtacccgacagtggcaccgggccaagcctacgatgcagatgagcaatgccgctttcagcatggagtcaaatcgcgtcagtgtaaatacggggaggtctgcagcgagctgtggtgtctgagcaagagcaaccggtgcatcaccaacagcatcccggccgccgagggcacgctgtgccagacgcacaccatcgacaaggggtggtgctacaaacgggtctgtgtcccctttgggtcgcgcccagagggtgtggacggagcctgggggccgtggactccatggggcgactgcagccggacctgtggcggcggcgtgtcctcttctagccgtcactgcgacagccccaggccaaccatcgggggcaagtactgtctgggtgagagaaggcggcaccgctcctgcaacacggat

SEQ ID NO: 409 - DNA, 576 bp, Homo sapiens
  source 1..576: mol_type = unassigned DNA
ggacattggcctggccacagcgttcaccattgcccacgagatcgggcacacgtgaggccagggcacacaagagggggaggaggggaggagctgggcgggtccctcagcgcccggcagagccgacacccctttccccagattcggcatgaaccatgacggcgtgggaaacagctgtggggcccgtggtcaggacccagccaagctcatggctgcccacattaccatgaagaccaacccattcgtgtggtcatcctgcagccgtgactacatcaccagctttctagactcgggcctggggctctgcctgaacaaccggccccccagacaggactttgtgtacccgacagtggcaccgggccaagcctacgatgcagatgagcaatgccgctttcagcatggagtcaaatcgcgtcagtgtaaatacggggtagagagagtcttcctgctttccttcctgggaggggagggggccgctggggctgggggagggaactccaccagggcacccacctgggaagtgagggggtgggagaaccgggaaggggggtgaggtgagcccccatggtgacctgggag

SEQ ID NO: 410 - DNA, 980 bp, Homo sapiens
  source 1..980: mol_type = unassigned DNA
cgcgcggggcggcgagacagcggcggcgacggcgcggaggccccgggcgcggcgcaggctccaaagaagaagaaaccaaggcccagagagggaggcccaggtgcagggagcaggcgagggaaggatccgtacaggggcccaacactactccaccaaccgaagcccccaaaagatgagttcctgtccagtctggagagctatgagatcgccttccccacccgcgtggaccacaacggggcactgctggccttctcgccacctcctccccggaggcagcgccgcggcacgggggccacagccgagtcccgcctcttctacaaagtggcctcgcccagcacccacttcctgctgaacctgacccgcagctcccgtctactggcagggcacgtctccgtggagtactggacacgggagggcctggcctggcagagggcggcccggccccactgcctctacgctggtcacctgcagggccaggccagcagctcccatgtggccatcagcacctgtggaggcctgcacggcctgatcgtggcagacgaggaagagtacctgattgagcccctgcacggtgggcccaagggttctcggagcccggaggaaagtggaccacatgtggtgtacaagcgttcctctctgcgtcacccccacctggacacagcctgtggagtgagagatgagaaaccgtggaaagggcggccatggtggctgcggaccttgaagccaccgcctgccaggcccctggggaatgaaacagagcgtggccagccaggcctgaagcgatcggtcagccgagagcgctacgtggagaccctggtggtggctgacaagatgatggtggcctatcacgggcgccgggatgtggagcagtatgtcctggccatcatgaacattgtcaggttgccaaacttttccaggactcgagtctgggaagcaccgttaacatcctcgtaactcgcctcatcctgctcacggaggac

SEQ ID NO: 411 - DNA, 836 bp, Homo sapiens
  source 1..836: mol_type = unassigned DNA
cggcggcgacggcgcggaggccccgggcgcggcgcagatgagttcctgtccagtctggagagctatgagatcgccttccccacccgcgtggaccacaacggggcactgctggccttctcgccacctcctccccggaggcagcgccgcggcacgggggccacagccgagtcccgcctcttctacaaagtggcctcgcccagcacccacttcctgctgaacctgacccgcagctcccgtctactggcagggcacgtctccgtggagtactggacacgggagggcctggcctggcagagggcggcccggccccactgcctctacgctggtcacctgcagggccaggccagcagctcccatgtggccatcagcacctgtggaggcctgcacggcctgatcgtggcagacgaggaagagtacctgattgagcccctgcacggtgggcccaagggttctcggagcccggaggaaagtggaccacatgtggtgtacaagcgttcctctctgcgtcacccccacctggacacagcctgtggagtgagagatgagaaaccgtggaaagggcggccatggtggctgcggaccttgaagccaccgcctgccaggcccctggggaatgaaacagagcgtggccagccaggcctgaagcgatcggtcagccgagagcgctacgtggagaccctggtggtggctgacaagatgatggtggcctatcacgggcgccgggatgtggagcagtatgtcctggccatcatgaacattgtcaggttgccaaacttttccaggactcgagtctgggaagcaccgttaacatcctcgtaactcgcctcatcctgctc

SEQ ID NO: 412 - DNA, 630 bp, Homo sapiens
  source 1..630: mol_type = unassigned DNA
cgccgccgcgctcgctcgctccctcccttcctgcgcgcgcggggcggcgagacagcggcggcgacggcgcggaggccccgggcgcggcgcaggctccaaagaagaagaaaccaaggcccagagagggaggcccaggtgcagggagcaggcgagggaaggatccgtacaggggcccaacactactccaccaaccgaagcccccaaaagatgagttcctgtccagtctggagagctatgagatcgccttccccacccgcgtggaccacaacggggcactgctggccttctcgccacctcctccccggaggcagcgccgcggcacgggggccacagccgagtcccgcctcttctacaaagtggcctcgcccagcacccacttcctgctgaacctgacccgcagctcccgtctactggcagggcacgtctccgtggagtactggacacgggagggcctggcctggcagagggcggcccggccccactgcctctacgctggtcacctgcagggccaggccagcagctcccatgtggccatcagcacctgtggaggcctggtgagctgaggattctggaacgcggggggaaatgcccataagtttggaagttaagaaaaacacttctacatagagg

SEQ ID NO: 413 - DNA, 4194 bp, Homo sapiens
  source 1..4194: mol_type = unassigned DNA
gacccctccctgcccaggctccaaagaagaagaaaccaaggcccagagagggaggcccaggtgcagggagcaggcgagggaaggatccgtacaggggcccaacactactccaccaaccgaagcccccaaaaggagcccggtgatgctgcgaaggctgtgaacaggggaggcggcactgtgggggctgccggcagccggggctggggagagacatgtggacacgtggcctctatggctcccgcctgccagatcctccgctgggccctcgccctggggctgggcctcatgttcgaggtcacgcacgccttccggtctcaagatgagttcctgtccagtctggagagctatgagatcgccttccccacccgcgtggaccacaacggggcactgctggccttctcgccacctcctccccggaggcagcgccgcggcacgggggccacagccgagtcccgcctcttctacaaagtggcctcgcccagcacccacttcctgctgaacctgacccgcagctcccgtctactggcagggcacgtctccgtggagtactggacacgggagggcctggcctggcagagggcggcccggccccactgcctctacgctggtcacctgcagggccaggccagcagctcccatgtggccatcagcacctgtggaggcctgcacggcctgatcgtggcagacgaggaagagtacctgattgagcccctgcacggtgggcccaagggttctcggagcccggaggaaagtggaccacatgtggtgtacaagcgttcctctctgcgtcacccccacctggacacagcctgtggagtgagagatgagaaaccgtggaaagggcggccatggtggctgcggaccttgaagccaccgcctgccaggcccctggggaatgaaacagagcgtggccagccaggcctgaagcgatcggtcagccgagagcgctacgtggagaccctggtggtggctgacaagatgatggtggcctatcacgggcgccgggatgtggagcagtatgtcctggccatcatgaacattgttgccaaacttttccaggactcgagtctgggaagcaccgttaacatcctcgtaactcgcctcatcctgctcacggaggaccagcccactctggagatcacccaccatgccgggaagtccctggacagcttctgtaagtggcagaaatccatcgtgaaccacagcggccatggcaatgccattccagagaacggtgtggctaaccatgacacagcagtgctcatcacacgctatgacatctgcatctacaagaacaaaccctgcggcacactaggcctggccccggtgggcggaatgtgtgagcgcgagagaagctgcagcgtcaatgaggacattggcctggccacagcgttcaccattgcccacgagatcgggcacacattcggcatgaaccatgacggcgtgggaaacagctgtggggcccgtggtcaggacccagccaagctcatggctgcccacattaccatgaagaccaacccattcgtgtggtcatcctgcagccgtgactacatcaccagctttctagactcgggcctggggctctgcctgaacaaccggccccccagacaggactttgtgtacccgacagtggcaccgggccaagcctacgatgcagatgagcaatgccgctttcagcatggagtcaaatcgcgtcagtgtaaatacggggaggtctgcagcgagctgtggtgtctgagcaagagcaaccggtgcatcaccaacagcatcccggccgccgagggcacgctgtgccagacgcacaccatcgacaaggggtggtgctacaaacgggtctgtgtcccctttgggtcgcgcccagagggtgtggacggagcctgggggccgtggactccatggggcgactgcagccggacctgtggcggcggcgtgtcctcttctagccgtcactgcgacagccccaggccaaccatcgggggcaagtactgtctgggtgagagaaggcggcaccgctcctgcaacacggatgactgtccccctggctcccaggacttcagagaagtgcagtgttctgaatttgacagcatccctttccgtgggaaattctacaagtggaaaacgtaccggggagggggcgtgaaggcctgctcgctcacgtgcctagcggaaggcttcaacttctacacggagagggcggcagccgtggtggacgggacaccctgccgtccagacacggtggacatttgcgtcagtggcgaatgcaagcacgtgggctgcgaccgagtcctgggctccgacctgcgggaggacaagtgccgagtgtgtggcggtgacggcagtgcctgcgagaccatcgagggcgtcttcagcccagcctcacctggggccgggtacgaggatgtcgtctggattcccaaaggctccgtccacatcttcatccaggatctgaacctctctctcagtcacttggccctgaagggagaccaggagtccctgctgctggaggggctgcctgggaccccccagccccaccgtctgcctctagctgggaccacctttcaactgcgacaggggccagaccaggtccagagcctcgaagccctgggaccgattaatgcatctctcatcgtcatggtgctggcccggaccgagctgcctgccctccgctaccgcttcaatgcccccatcgcccgtgactcgctgcccccctactcctggcactatgcgccctggaccaagtgctcggcccagtgtgcaggcggtagccaggtgcaggcggtggagtgccgcaaccagctggacagctccgcggtcgccccccactactgcagtgcccacagcaagctgcccaaaaggcagcgcgcctgcaacacggagccttgccctccagactgggttgtagggaactggtcgctctgcagccgcagctgcgatgcaggcgtgcgcagccgctcggtcgtgtgccagcgccgcgtctctgccgcggaggagaaggcgctggacgacagcgcatgcccgcagccgcgcccacctgtactggaggcctgccacggccccacttgccctccggagtgggcggccctcgactggtctgagtgcacccccagctgcgggccgggcctccgccaccgcgtggtcctttgcaagagcgcagaccaccgcgccacgctgcccccggcgcactgctcacccgccgccaagccaccggccaccatgcgctgcaacttgcgccgctgccccccggcccgctgggtggctggcgagtggggtgagtgctctgcacagtgcggcgtcgggcagcggcagcgctcggtgcgctgcaccagccacacgggccaggcgtcgcacgagtgcacggaggccctgcggccgcccaccacgcagcagtgtgaggccaagtgcgacagcccaacccccggggacggccctgaagagtgcaaggatgtgaacaaggtcgcctactgccccctggtgctcaaatttcagttctgcagccgagcctacttccgccagatgtgctgcaaaacctgccatggccactagggggcgcgcggcacccggagccacagctggcggggtctccgccgccagccctgcagcgggccggccagagggggccccgggggggcgggaactgggagggaagggtgagacggagccggaagttatttattgggaacccctgcagggccctggctggggggatggagaggggctggctatccccccagagcccctcttcagcatccgccccttccagttcacatagtgagaccccccctccagggtgggtctggggaggggacagctgttcaccccagcaccctttgaacccacccttagggagtccccaacactccccccctcctttgatcggaatatgtactgtgaagagtaggggtggggaggtggtctgccggtgccctgccccccagcactgccctacccctccactccgagctgggggggaatctgtgtctgctatgggaggggggggggtagcaccacctccctgacaccctcccctgacctgactagggggaggatccaccccaacctctgccctgcccgccccaggggcaccccgacatccaggccaccccctcatggtgctacagaccctgccctggggcccacacactcctgccaggaagccctacatcaataaagttctgtcttgtgtagatttctacg

SEQ ID NO: 414 - DNA, 5673 bp, Homo sapiens
  source 1..5673: mol_type = unassigned DNA
atgcttctgctgggcatcctaaccctggctttcgccgggcgaaccgctggaggctctgagccagagcgggaggtagtcgttcccatccgactggacccggacattaacggccgccgctactactggcggggtcccgaggactccggggatcagggactcatttttcagatcacagcatttcaggaggacttttacctacacctgacgccggatgctcagttcttggctcccgccttctccactgagcatctgggcgtccccctccaggggctcaccgggggctcttcagacctgcgacgctgcttctattctggggacgtgaacgccgagccggactcgttcgctgctgtgagcctgtgcggggggctccgcggagcctttggctaccgaggcgccgagtatgtcattagcccgctgcccaatgctagcgcgccggcggcgcagcgcaacagccagggcgcacaccttctccagcgccggggtgttccgggcgggccttccggagaccccacctctcgctgcggggtggcctcgggctggaaccccgccatcctacgggccctggacccttacaagccgcggcgggcgggcttcggggagagtcgtagccggcgcaggtctgggcgcgccaagcgtttcgtgtctatcccgcggtacgtggagacgctggtggtcgcggacgagtcaatggtcaagttccacggcgcggacctggaacattatctgctgacgctgctggcaacggcggcgcgactctaccgccatcccagcatcctcaaccccatcaacatcgttgtggtcaaggtgctgcttcttagagatcgtgactccgggcccaaggtcaccggcaatgcggccctgacgctgcgcaacttctgtgcctggcagaagaagctgaacaaagtgagtgacaagcaccccgagtactgggacactgccatcctcttcaccaggcaggacctgtgtggagccaccacctgtgacaccctgggcatggctgatgtgggtaccatgtgtgaccccaagagaagctgctctgtcattgaggacgatgggcttccatcagccttcaccactgcccacgagctgggccacgtgttcaacatgccccatgacaatgtgaaagtctgtgaggaggtgtttgggaagctccgagccaaccacatgatgtccccgaccctcatccagatcgaccgtgccaacccctggtcagcctgcagtgctgccatcatcaccgacttcctggacagcgggcacggtgactgcctcctggaccaacccagcaagcccatctccctgcccgaggatctgccgggcgccagctacaccctgagccagcagtgcgagctggcttttggcgtgggctccaagccctgtccttacatgcagtactgcaccaagctgtggtgcaccgggaaggccaagggacagatggtgtgccagacccgccacttcccctgggccgatggcaccagctgtggcgagggcaagctctgcctcaaaggggcctgcgtggagagacacaacctcaacaagcacagggtggatggttcctgggccaaatgggatccctatggcccctgctcgcgcacatgtggtgggggcgtgcagctggccaggaggcagtgcaccaaccccacccctgccaacgggggcaagtactgcgagggagtgagggtgaaataccgatcctgcaatctggagccctgccccagctcagcctccggaaagagcttccgggaggagcagtgtgaggctttcaacggctacaaccacagcaccaaccggctcactctcgccgtggcatgggtgcccaagtactccggcgtgtctccccgggacaagtgcaagctcatctgccgagccaatggcactggctacttctatgtgctggcacccaaggtggtggacggcacgctgtgctctcctgactccacctccgtctgtgtccaaggcaagtgcatcaaggctggctgtgatgggaacctgggctccaagaagagattcgacaagtgtggggtgtgtgggggagacaataagagctgcaagaaggtgactggactcttcaccaagcccatgcatggctacaatttcgtggtggccatccccgcaggcgcctcaagcatcgacatccgccagcgcggttacaaagggctgatcggggatgacaactacctggctctgaagaacagccaaggcaagtacctgctcaacgggcatttcgtggtgtcggcggtggagcgggacctggtggtgaagggcagtctgctgcggtacagcggcacgggcacagcggtggagagcctgcaggcttcccggcccatcctggagccgctgaccgtggaggtcctctccgtggggaagatgacaccgccccgggtccgctactccttctatctgcccaaagagcctcgggaggacaagtcctctcatcccaaggacccccggggaccctctgtcttgcacaacagcgtcctcagcctctccaaccaggtggagcagccggacgacaggccccctgcacgctgggtggctggcagctgggggccgtgctccgcgagctgcggcagtggcctgcagaagcgggcggtggactgccggggctccgccgggcagcgcacggtccctgcctgtgatgcagcccatcggcccgtggagacacaagcctgcggggagccctgccccacctgggagctcagcgcctggtcaccctgctccaagagctgcggccggggatttcagaggcgctcactcaagtgtgtgggccacggaggccggctgctggcccgggaccagtgcaacttgcaccgcaagccccaggagctggacttctgcgtcctgaggccgtgctgagtggggtcatcgctttctccccctcactctccaccccactgatatgccagcgttctgccagctggagtagcgggcagaggacggtggccaggggctcacgccacgatgtcacccacatccggggacaaggaccatgggctggggcgagaggttccctcctcctccctggactgggcagagggaagcccaggaactcccgcacagtctacctcaggccccgctcctcgggccggttgcggggagaggctttgaggtgcagggcagaaggtgctgaggcccagtttccaaggaacttggaggatgggcaccttccaggcagaacttcagggaccccggcccccagaacggaggccacaggctgctggaagagccatgtcccagcagcttggcaccctcaggtggccccatgggctctgagccgtgtctgaacgaggcagggttttcacggtgcttttagcccactttcctttttgaactgacatggactaagcaataaaagctggctggggctgggcagaagccacggggagagtgagattagggcccctggagcctggcactccaccttggaagacgtggacgtgcacagggagtcccgaggtttctcatcctgcactcttggccctcctataaagaagcagcctctccttcctctgatgtgcagggtgtaggactagtggtagggctgccacggaagtgtcctctgaggctctgcaggtagcggggaaagccagtagggagtctgctgtcttcttcaagatggagccggccattacagaaagatgttgacatttgctaggggctatgcagtctgtggctgatgcagggagttttcagaaagttctggagggttctgctgtcactggactggggttggtgctgagctctgggcctggctttgggagatgtcaccctgggatagggaggaggaagctgcatttctaatggcttcctcctccagagaggcacgtatatgcaggctgacatccgagggtctgtgtcgcctcagacagccctgacagtggccacagtcccgtacccattgtgaggggctggggcatgcctaggagggctaggtgctgaacatctatgtgcctataaactcgtcttcgttccaaacagctactgctgtctgccctgggcacgtcacgttgcatcctaggccttagcttctccactgtttgctacctcagattatgccctctgggaacccagccgtatccctcccctaggacagtggtgacctggtccttccaccacactcagtctttggagagcgagctgtccagccacagaaatgagggtgtggtgcgtggcttcctgctccccacagcccagccccctgttggggctccaaagccgaagacagggcctcttcagactccttgggagtaggtttcaggaggcaccaagaatcaatgactgacccagggggcctggcagccactagtatgaactgctggagacctgtctgtcttatagacatgtcaggaaaatagaaacaggcattttctctagctccaagtggggagatattttggggtcacagcttctttggctaagcagggtgtttcttgaaggttcagatgccccactgtgtacatgggatattctgcttctgagtgtaggtgatgaatccaggtcctcagtggagaattttctggagctaagatcaaagcatgtgtcttcctgggagagaagagttccgttcttttatgtgggtttccctaatagtcagaatccacaaaccagccagccagccagccaagcctctgcgatgatgttctcatccggtctaacgctgggctggaaaccttggacagagttcatgcgggggcagagggggtgccagtctctgaggcagggctgcagtcacccctgaagaactaagtgaacaggaacccctctgtgccagtgaccactgtggggctaaagggacaaaaaggaccagggtaccaggcagaagcagatccttgatagctgacgacagcactgcgccctgtgcttggtgcactccctccttcaggaggagagggtggcatggggtctgtgcgggatggcagggggattgggtgggtgggaagagaggtgccatcggtaggaggctggcctccagtagaggagagcagcttttgccatcagtcactttacaaaccatttcaaggaaggacaacctctctggctcctgacacaagccaggcctcggtgcttttatctgttgtggtggtttttcttctttccctttttaaaagacgcatgaccaagacaacctagggagtttgtcttgcttgcctttgactatttccttaatccaaccatgctctcgagggctgagcagagactagactcaaggcacaggtttctggtgatggagtaaagttacagcggtatctcatgtctacacaagaagaggaacgttctgaaagctccaacaacttcttgagggggatggaccaatacagctttgggctcaggattccctagcctcctctgcccatcgcgtgcactgattggaggagtctggcccaaacactctcatatgaacctcgacatgctggagtggggtctggcaggagctgatgacagtttgagggacttgagtgtccctagcctggcagttggctcccggaagcactagacactgacactcattggtagaccctccctccccgccgttgtgtttggttcttttgcactccatgtactgcagaaggatggaaggacctgggtgctggctgggctgtgtatactgtgtatacaagggagctggctgctgaggtgaccacagccttctcctaataaagctgtaagtatttaaaa

SEQ ID NO: 415 - DNA, 2682 bp, Homo sapiens
  source 1..2682: mol_type = unassigned DNA
agtaataaccccggcgcggcggcggagtcgctgtggggaatcctcccgcgctctgcctgggtcgggtcctccctgcccgctcgcacgctgccggccggggaccctccggtggcccctagcccctcggagcgctcctggatgaagccccgcgcgcgcggatggcggggcttggcggcgctgtggatgctgttggcgcaggtggccgagcaggcacctgcgtgcgccatgggacccgcagcggcagcgcctgggagcccgagcgtcccgcgtcctcctccacccgcggagcggccgggctggatggaaaagggcgaatatgacctggtctctgcctacgaggttgaccacaggggcgattacgtgtcccatgaaatcatgcaccatcagcggcggagaagagcagtgcccgtgtccgaggttgagtctcttcaccttcggctgaaaggctccaggcacgacttccacatggatctgaggacttccagcagcctagtggctcctggctttattgtgcagacgttgggaaagacaggcactaagtctgtgcagactttaccgccagaggacttctgtttctatcaaggctctttgcgatcacacagaaactcctcagtggccctttcaacctgccaaggcttgtcaggcatgatacgaacagaagaggcagattacttcctaaggccacttccttcacacctctcatggaaactcggcagagctgcccaaggcagctcgccatcccacgtactgtacaagagatccacagagccccatgctcctggggccagtgaggtcctggtgacctcaaggacatgggagctggcacatcaacccctgcacagcagcgaccttcgcctgggactgccacaaaagcagcatttctgtggaagacgcaagaaatacatgccccagcctcccaaggaagacctcttcatcttgccagatgagtataagtcttgcttacggcataagcgctctcttctgaggtcccatagaaatgaagaactgaacgtggagaccttggtggtggtcgacaaaaagatgatgcaaaaccatggccatgaaaatatcaccacctacgtgctcacgatactcaacatggtatctgctttattcaaagatggaacaataggaggaaacatcaacattgcaattgtaggtctgattcttctagaagatgaacagccaggactggtgataagtcaccacgcagaccacaccttaagtagcttctgccagtggcagtctggattgatggggaaagatgggactcgtcatgaccacgccatcttactgactggtctggatatatgttcctggaagaatgagccctgtgacactttgggatttgcacccataagtggaatgtgtagtaaatatcgcagctgcacgattaatgaagatacaggtcttggactggccttcaccattgcccatgagtctggacacaactttggcatgattcatgatggagaagggaacatgtgcaaaaagtccgagggcaacatcatgtcccctacattggcaggacgcaatggagtcttctcctggtcaccctgcagccgccagtatctacacaaatttctaagcaccgctcaagctatctgccttgctgatcagccaaagcctgtgaaggaatacaagtatcctgagaaattgccaggagaattatatgatgcaaacacacagtgcaagtggcagttcggagagaaagccaagctctgcatgctggactttaaaaaggacatctgtaaagccctgtggtgccatcgtattggaaggaaatgtgagactaaatttatgccagcagcagaaggcacaatttgtgggcatgacatggtaagaagctaactgtaggtacagcatcgtattcagatgctagtctttcaacccatgcatctttgctcctcttgcataggtatttttaaaacatgtatttctcatatacatatgcatacccatgctcctatcaaacactgtgtttattttatattgataatgtgaagaggaatccttttctcacttttgtgaaaataaaattgatgagctacctggaattcatagacatagaaatcagacaacaggtgatgacagattcagtctattgaggggaaacattaagccattgaccaccatttatcatggaaaggaccagcattaaacagtgctgtgaaagccacagaacatcggtttgaagaccctggagcacatcattttcacctattgttgcctctgtgagaagagagagagctatggtagagaaaagaagaagtatacaagatgttgcagcaatgtggacgtagttggaggccattcattatcctaggcaaactaatgcaggaacagaaaaccaaatactgcatgttgttacttataagcaggagctaaacactgagtacacatggacacaaagatgggaaccatagaccccggggactacttaaggggggatggtgggagggggcaagggttgaaacactatcccatattgtgcttgctgcatgggtgatgaggttattcgaatgccaaactttagtgacacgtaatctacccatgtaacaaatctgcacatgtacccctgaacctaaaacaaaagtcggaaaaaaaagaaatatacaagataacaagtttattactaaatggtaaagaatgacaatttcattattaaaactttaaaaaatt

SEQ ID NO: 416 - DNA, 4979 bp, Homo sapiens
  source 1..4979: mol_type = unassigned DNA
agtaataaccccggcgcggcggcggagtcgctgtggggaatcctcccgcgctctgcctgggtcgggtcctccctgcccgctcgcacgctgccggccggggaccctccggtggcccctagcccctcggagcgctcctggatgaagccccgcgcgcgcggatggcggggcttggcggcgctgtggatgctgttggcgcaggtggccgagcaggcacctgcgtgcgccatgggacccgcagcggcagcgcctgggagcccgagcgtcccgcgtcctcctccacccgcggagcggccgggctggatggaaaagggcgaatatgacctggtctctgcctacgaggttgaccacaggggcgattacgtgtcccatgaaatcatgcaccatcagcggcggagaagagcagtgcccgtgtccgaggttgagtctcttcaccttcggctgaaaggctccaggcacgacttccacatggatctgaggacttccagcagcctagtggctcctggctttattgtgcagacgttgggaaagacaggcactaagtctgtgcagactttaccgccagaggacttctgtttctatcaaggctctttgcgatcacacagaaactcctcagtggccctttcaacctgccaaggcttgtcaggcatgatacgaacagaagaggcagattacttcctaaggccacttccttcacacctctcatggaaactcggcagagctgcccaaggcagctcgccatcccacgtactgtacaagagatccacagagccccatgctcctggggccagtgaggtcctggtgacctcaaggacatgggagctggcacatcaacccctgcacagcagcgaccttcgcctgggactgccacaaaagcagcatttctgtggaagacgcaagaaatacatgccccagcctcccaaggaagacctcttcatcttgccagatgagtataagtcttgcttacggcataagcgctctcttctgaggtcccatagaaatgaagaactgaacgtggagaccttggtggtggtcgacaaaaagatgatgcaaaaccatggccatgaaaatatcaccacctacgtgctcacgatactcaacatggtatctgctttattcaaagatggaacaataggaggaaacatcaacattgcaattgtaggtctgattcttctagaagatgaacagccaggactggtgataagtcaccacgcagaccacaccttaagtagcttctgccagtggcagtctggattgatggggaaagatgggactcgtcatgaccacgccatcttactgactggtctggatatatgttcctggaagaatgagccctgtgacactttgggatttgcacccataagtggaatgtgtagtaaatatcgcagctgcacgattaatgaagatacaggtcttggactggccttcaccattgcccatgagtctggacacaactttggcatgattcatgatggagaagggaacatgtgcaaaaagtccgagggcaacatcatgtcccctacattggcaggacgcaatggagtcttctcctggtcaccctgcagccgccagtatctacacaaatttctaagcaccgctcaagctatctgccttgctgatcagccaaagcctgtgaaggaatacaagtatcctgagaaattgccaggagaattatatgatgcaaacacacagtgcaagtggcagttcggagagaaagccaagctctgcatgctggactttaaaaaggacatctgtaaagccctgtggtgccatcgtattggaaggaaatgtgagactaaatttatgccagcagcagaaggcacaatttgtgggcatgacatgtggtgccggggaggacagtgtgtgaaatatggtgatgaaggccccaagcccacccatggccactggtcggactggtcttcttggtccccatgctccaggacctgcggagggggagtatctcataggagtcgcctctgcaccaaccccaagccatcgcatggagggaagttctgtgagggctccactcgcactctgaagctctgcaacagtcagaaatgtccccgggacagtgttgacttccgtgctgctcagtgtgccgagcacaacagcagacgattcagagggcggcactacaagtggaagccttacactcaagtagaagatcaggacttatgcaaactctactgtatcgcagaaggatttgatttcttcttttctttgtcaaataaagtcaaagatgggactccatgctcggaggatagccgtaatgtttgtatagatgggatatgtgagagagttggatgtgacaatgtccttggatctgatgctgttgaagacgtctgtggggtgtgtaacgggaataactcagcctgcacgattcacaggggtctctacaccaagcaccaccacaccaaccagtattatcacatggtcaccattccttctggagcccggagtatccgcatctatgaaatgaacgtctctacctcctacatttctgtgcgcaatgccctcagaaggtactacctgaatgggcactggaccgtggactggcccggccggtacaaattttcgggcactactttcgactacagacggtcctataatgagcccgagaacttaatcgctactggaccaaccaacgagacactgattgtggagctgctgtttcagggaaggaacccgggtgttgcctgggaatactccatgcctcgcttggggaccgagaagcagccccctgcccagcccagctacacttgggccatcgtgcgctctgagtgctccgtgtcctgcggagggggacagatgaccgtgagagagggctgctacagagacctgaagtttcaagtaaatatgtccttctgcaatcccaagacacgacctgtcacggggctggtgccttgcaaagtatctgcctgtcctcccagctggtccgtggggaactggagtgcctgcagtcggacgtgtggcgggggtgcccagagccgccccgtgcagtgcacacggcgggtgcactatgactcggagccagtcccggccagcctgtgccctcagcctgctccctccagcaggcaggcctgcaactctcagagctgcccacctgcatggagcgccgggccctgggcagagtgctcacacacctgtgggaaggggtggaggaagcgggcagtggcctgtaagagcaccaacccctcggccagagcgcagctgctgcccgacgctgtctgcacctccgagcccaagcccaggatgcatgaagcctgtctgcttcagcgctgccacaagcccaagaagctgcagtggctggtgtccgcctggtcccagtgctctgtgacatgtgaaagaggaacacagaaaagattcttaaaatgtgctgaaaagtatgtttctggaaagtatcgagagctggcctcaaagaagtgctcacatttgccgaagcccagcctggagctggaacgtgcctgcgccccgcttccatgccccaggcaccccccatttgctgctgcgggaccctcgaggggcagctggtttgcctcaccctggtctcagtgcacggccagctgtgggggaggcgttcagacgaggtccgtgcagtgcctggctgggggccggccggcctcaggctgcctcctgcaccagaagccttcggcctccctggcctgcaacactcacttctgccccattgcagagaagaaagatgccttctgcaaagactacttccactggtgctacctggtaccccagcacgggatgtgcagccacaagttctacggcaagcagtgctgcaagacttgctctaagtccaacttgtgagttgggaccgctctccgtagcagagaaagtgcctgcgtggcacagaaatttcccacaaatgagctgtgcaatctacgtcggaatacatccaaggaagagcaaagccaaaagaagaaaaccgtgttaggctctttgaccaggagtgtatgtatgtgtttcactgtgagcctgggtgcagacctgtgtccccatgcacacagtgtctcctgtcaggctgaaatgtggcaccctggcagacagagctgtggctcgtgaggcagaaggcaggcaccacaacgggagaggcagcactcacccctgcctgttgcagctaaatcaagtcaaaaagacaggcgaggctgaacttgctaaatgtctggtgccttagaaaaagaaggaaaggccatgaaataaggaaaacatacaaaatatgtaccccctagttcaccagcctcccctcccactaggagggcccctcgagccatcaggagtgaccaacttcctgggtggaggtcaggggagctccaggaggctgcccaggctcctcctcctcctccccagcggccgagcatctcttaccaggaacctggagccaccgccggagccagcgtcatctctagggtcactggccaggggactgcattctggtttgggactttgcctatggaaatgggaaaaatgaaattcctgctaaggtgcttctatctctttcagattcatgcattgaaggagagattttttatactttatgttttatctttctcagttatttgcaagtgagtgtccttttaaaaacacacttcttcatgcttttctttgtaaatgacagatcgaagtataggttacatcaaaaccctaccatcctgagaagagttatggttctattatagcagacgtcagccacacagcctatgtgacaataaccttagagtcctgtgttttgtttttgtgtgttgtgagattttaatcttttttttttcggtgagtctggccatttctataatgccaggtgggaagccaggctgcgggtgttagggtgggaatctgcccggcgtctctggcaccctccctgccatcctcagtgcggctgctgttctcctgtccggtgctgtggctccattccaaaggggcacctggatatttatatttgctgaagttttataataaagtttatatggtacagtgtg

SEQ ID NO: 417 - DNA, 3227 bp, Homo sapiens
  source 1..3227: mol_type = unassigned DNA
atgaagccccgcgcgcgcggatggcggggcttggcggcgctgtggatgctgttggcgcaggtggccgagcaggcacctgcgtgcgccatgggacccgcagcggcagcgcctgggagcccgagcgtcccgcgtcctcctccacccgcggagcggccgggctggatggaaaagggcgaatatgacctggtctctgcctacgaggttgaccacaggggcgattacgtgtcccatgaaatcatgcaccatcagcggcggagaagagcagtgcccgtgtccgaggttgagtctcttcaccttcggctgaaaggctccaggcacgacttccacatggatctgaggacttccagcagcctagtggctcctggctttattgtgcagacgttgggaaagacaggcactaagtctgtgcagactttaccgccagaggacttctgtttctatcaaggctctttgcgatcacacagaaactcctcagtggccctttcaacctgccaaggcttgtcaggcatgatacgaacagaagaggcagattacttcctaaggccacttccttcacacctctcatggaaactcggcagagctgcccaaggcagctcgccatcccacgtactgtacaagagatccacagagccccatgctcctggggccagtgaggtcctggtgacctcaaggacatgggagctggcacatcaacccctgcacagcagcgaccttcgcctgggactgccacaaaagcagcatttctgtggaagacgcaagaaatacatgccccagcctcccaaggaagacctcttcatcttgccagatgagtataagtcttgcttacggcataagcgctctcttctgaggtcccatagaaatgaagaactgaacgtggagaccttggtggtggtcgacaaaaagatgatgcaaaaccatggccatgaaaatatcaccacctacgtgctcacgatactcaacatggtatctgctttattcaaagatggaacaataggaggaaacatcaacattgcaattgtaggtctgattcttctagaagatgaacagccaggactggtgataagtcaccacgcagaccacaccttaagtagcttctgccagtggcagtctggattgatggggaaagatgggactcgtcatgaccacgccatcttactgactggtctggatatatgttcctggaagaatgagccctgtgacactttgggatttgcacccataagtggaatgtgtagtaaatatcgcagctgcacgattaatgaagatacaggtcttggactggccttcaccattgcccatgagtctggacacaactttggcatgattcatgatggagaagggaacatgtgcaaaaagtccgagggcaacatcatgtcccctacattggcaggacgcaatggagtcttctcctggtcaccctgcagccgccagtatctacacaaatttctaagcaccgctcaagctatctgccttgctgatcagccaaagcctgtgaaggaatacaagtatcctgagaaattgccaggagaattatatgatgcaaacacacagtgcaagtggcagttcggagagaaagccaagctctgcatgctggactttaaaaaggacatctgtaaagccctgtggtgccatcgtattggaaggaaatgtgagactaaatttatgccagcagcagaaggcacaatttgtgggcatgacatgtggtgccggggaggacagtgtgtgaaatatggtgatgaaggccccaagcccacccatggccactggtcggactggtcttcttggtccccatgctccaggacctgcggagggggagtatctcataggagtcgcctctgcaccaaccccaagccatcgcatggagggaagttctgtgagggctccactcgcactctgaagctctgcaacagtcagaaatgtccccgggacagtgttgacttccgtgctgctcagtgtgccgagcacaacagcagacgattcagagggcggcactacaagtggaagccttacactcaagtagaagatcaggacttatgcaaactctactgtatcgcagaaggatttgatttcttcttttctttgtcaaataaagtcaaagatgggactccatgctcggaggatagccgtaatgtttgtatagatgggatatgtgagagagttggatgtgacaatgtccttggatctgatgctgttgaagacgtctgtggggtgtgtaacgggaataactcagcctgcacgattcacaggggtctctacaccaagcaccaccacaccaaccagtattatcacatggtcaccattccttctggagcccggagtatccgcatctatgaaatgaacgtctctacctcctacatttctgtgcgcaatgccctcagaaggtactacctgaatgggcactggaccgtggactggcccggccggtacaaattttcgggcactactttcgactacagacggtcctataatgagcccgagaacttaatcgctactggaccaaccaacgagacactgattgtggagctgctgtttcagggaaggaacccgggtgttgcctgggaatactccatgcctcgcttggggaccgagaagcagccccctgcccagcccagctacacttgggccatcgtgcgctctgagtgctccgtgtcctgcggagggggacagatgaccgtgagagagggctgctacagagacctgaagtttcaagtaaatatgtccttctgcaatcccaagacacgacctgtcacggggctggtgccttgcaaagtatctgcctgtcctcccagctggtccgtggggaactggagtgcctgcagtcggacgtgtggcgggggtgcccagagccgccccgtgcagtgcacacggcgggtgcactatgactcggagccagtcccggccagcctgtgccctcagcctgctccctccagcaggcaggcctgcaactctcagagctgcccacctgcatggagcgccgggccctgggcagagtgctcacacacctgtgggaaggggtggaggaagcgggcagtggcctgtaagagcaccaacccctcggccagagcgcagctgctgcccgacgctgtctgcacctccgagcccaagcccaggatgcatgaagcctgtctgcttcagcgctgccacaagcccaagaagctgcagtggctggtgtccgcctggtcccaggtaggtgcactggtctcgcgggagcgaggttgactagctct

SEQ ID NO: 418 - DNA, 187 bp, Homo sapiens
  source 1..187: mol_type = unassigned DNA
gtgagggctccactcgcactctgaagctctgcaacagtcagaaatgtccccgggacagtgttgacttccgtgctgctcagtgtgccgagcacaacagcagacgattcagagggcggcactacaagtggaagccttacactcaagtagaagagagttggatgtgacaatgtccttggatctgatgctg

SEQ ID NO: 419 - DNA, 6207 bp, Homo sapiens
  source 1..6207: mol_type = unassigned DNA
aattactttttccaaaggctggagggcttcactccggctggcgccgccgcctagcgcgctcctgcttcgccgccacggtccgggggggctgccggtcccgggtaccatgtgtgacggcgccctgctgcctccgctcgtcctgcccgtgctgctgctgctggtttggggactggacccgggcacagctgtcggcgacgcggcggccgacgtggaggtggtgctcccgtggcgggtgcgccccgacgacgtgcacctgccgccgctgcccgcagcccccgggccccgacggcggcgacgcccccgcacgcccccagccgccccgcgcgcccggcccggagagcgcgccctgctgctgcacctgccggccttcgggcgcgacctgtaccttcagctgcgccgcgacctgcgcttcctgtcccgaggcttcgaggtggaggaggcgggcgcggcccggcgccgcggccgccccgccgagctgtgcttctactcgggccgtgtgctcggccaccccggctccctcgtctcgctcagcgcctgcggcgccgccggcggcctggttggcctcattcagcttgggcaggagcaggtgctaatccagcccctcaacaactcccagggcccattcagtggacgagaacatctgatcaggcgcaaatggtccttgacccccagcccttctgctgaggcccagagacctgagcagctctgcaaggttctaacagaaaagaagaagccgacgtggggcaggccttcgcgggactggcgggagcggaggaacgctatccggctcaccagcgagcacacggtggagaccctggtggtggccgacgccgacatggtgcagtaccacggggccgaggccgcccagaggttcatcctgaccgtcatgaacatggtatacaatatgtttcagcaccagagcctggggattaaaattaacattcaagtgaccaagcttgtcctgctacgacaacgtcccgctaagttgtccattgggcaccatggtgagcggtccctggagagcttctgtcactggcagaacgaggagtatggaggagcgcgatacctcggcaataaccaggttcccggcgggaaggacgacccgcccctggtggatgctgccgtgtttgtgaccaggacagatttctgtgtacacaaggatgaaccgtgtgacactgttggaattgcttacttaggaggtgtgtgcagtgctaagaggaagtgtgtgcttgccgaagacaatggtctcaatttggcctttaccatcgcccatgagctgggccacaacttgggcatgaaccacgacgatgaccactcatcttgcgctggcaggtcccacatcatgtcaggagagtgggtgaaaggccggaacccaagtgacctctcttggtcctcctgcagccgagatgaccttgaaaacttcctcaagtcaaaagtcagcacctgcttgctagtcacggaccccagaagccagcacacagtacgcctcccgcacaagctgccgggcatgcactacagtgccaacgagcagtgccagatcctgtttggcatgaatgccaccttctgcagaaacatggagcatctaatgtgtgctggactgtggtgcctggtagaaggagacacatcctgcaagaccaagctggaccctcccctggatggcaccgagtgtggggcagacaagtggtgccgcgcgggggagtgcgtgagcaagacgcccatcccggagcatgtggacggagactggagcccgtggggcgcctggagcatgtgcagccgaacatgtgggacgggagcccgcttcaggcagaggaaatgtgacaaccccccccctgggcctggaggcacacactgcccgggtgccagtgtagaacatgcggtctgcgagaacctgccctgccccaagggtctgcccagcttccgggaccagcagtgccaggcacacgaccggctgagccccaagaagaaaggcctgctgacagccgtggtggttgacgataagccatgtgaactctactgctcgcccctcgggaaggagtccccactgctggtggccgacagggtcctggacggtacaccctgcgggccctacgagactgatctctgcgtgcacggcaagtgccagaaaatcggctgtgacggcatcatcgggtctgcagccaaagaggacagatgcggggtctgcagcggggacggcaagacctgccacttggtgaagggcgacttcagccacgcccgggggacagctctcaaagactcgggtaaggggtccatcaacagtgactggaagatagagctccccggagagttccagattgcaggcacaactgttcgctatgtgagaagggggctgtgggagaagatctctgccaagggaccaaccaaactaccgctgcacttgatggtgttgttatttcacgaccaagattatggaattcattatgaatacactgttcctgtaaaccgcactgcggaaaatcaaagcgaaccagaaaaaccgcaggactctttgttcatctggacccacagcggctgggaagggtgcagtgtgcagtgcggcggaggggagcgcagaaccatcgtctcgtgtacacggattgtcaacaagaccacaactctggtgaacgacagtgactgccctcaagcaagccgcccagagccccaggtccgaaggtgcaacttgcacccctgccagtcacggtgggtggcaggcccgtggagcccctgctcggcgacctgtgagaaaggcttccagcaccgggaggtgacctgcgtgtaccagctgcagaacggcacacacgtcgctacgcggcccctctactgcccgggcccccggccggcggcagtgcagagctgtgaaggccaggactgcctgtccatctgggaggcgtctgagtggtcacagtgctctgccagctgtggtaaaggggtgtggaaacggaccgtggcgtgcaccaactcacaagggaaatgcgacgcatccacgaggccgagagccgaggaggcctgcgaggactactcaggctgctacgagtggaaaactggggactggtctacgtgctcgtcgacctgcgggaagggcctgcagtcccgggtggtgcagtgcatgcacaaggtcacagggcgccacggcagcgagtgccccgccctctcgaagcctgccccctacagacagtgctaccaggaggtctgcaacgacaggatcaacgccaacaccatcacctccccccgccttgctgctctgacctacaaatgcacacgagaccagtggacggtatattgccgggtcatccgagaaaagaacctctgccaggacatgcggtggtaccagcgctgctgccagacctgcagggacttctatgcaaacaagatgcgccagccaccgccgaactcgtgacacgcagtcccaagggtcgctcaaagctcagactcaggtctgaaacccacccacccgcaagcctaccagccttgtggccacgcccccacccggctgccacaagaatccaactacatagaacatgagcgtggacttggcgtttgccattagtgcttccgtacttaatatattgttaacagccactggctggctttctacagtgaggagaaagtaggcatgagtcacaaagtaacttcaatttctaggatttcaggtacctcgaagggaagcacctctggcagacaaccgtcaagagagagacatcatttagtgttcttgtcttgactcgcttttgacatttgaatttccagtgcttggtatatcatggaggaaacatccccaaaacgagacatgctagaaaaggctttattctgaaagccggcgacaccatggagggaggggcaggtgttggtgagcctctgcccgtggcttctctggggagggccgggctgcttagcacacgtttctctccatctaccttcttgaccacatgagaaccaggacgttgcctccatgcccgtctctgagaacatagtctctaaatcctaggtgttgccttggaagtctcgtgcgtggagtgtaaatctatatatgccagcgaggacagcagtgccacgcagttcataccacccgcatgggaagaatgttccaagagagtctgggtttggggaagcatctaattttcagagctctgctgtccaccgtgtagggaaacagaagggcctctcttcaaggtgctgtgacataagaaacggtaattgcggtgatggggttgcttcctaaggcaaaggtaagcttgggccagcttcactggggcggatgggcacctgccccgccttccgggaacatccactctggcctgcacttcctaaagctttgtaccttagagatgctgtaccacatcccagtggctttctaccgaccgtggccatttatctgaaggtaagacgacatttgggacctctgaggacacaagcccaggcctaggatctgtagagcaaggcctgactgctctatcctggcacggagcagcctgatgtgccaggaccaggggaggaacgccatctggctggcactgctgcacacccgccgagccttcctgtagccccagactttgtggtacccattatcatcacgcctgtcatcattgacccatcttcttggtggggcaaggatgatgcatgatgaaggaaggtccttcccccctgcagcccccttacgcctggcagcagacaagcagagtggcctctttgagagcacagaggatggtagcaccctacctgcaaggaggccgggcagggaccctagatgccaggaggcctgttttgctcaccaacttggtgggcatttcatgggtgcttatgttctaggactttaccgtaaataacacctcctccctgatttcagacggaaggtctcacttggacttccatgggatcatctccctgtgcttcttgatttattggtgctgtgtttctgtgttttgttttgttacatgtcacaaccgtagagttagcttaaatcagaaagaagcctctctgccttctccaccctgtcttacgagctgtgtttttgtttttactaccctagaggcagagaagcggtagggatgtcagggaatttactcacttccacttgaatcaacgagaagtgttgagaaacttccgtgggtgctctgtggaaagaaccgagggtgtcaggatggagcggcccaccctcgccccgcggcctgcgcagactgctgtcctccccttcaggcctggccaccagcagactcccatgaattcccattttcacaaagccctcaaaattttgggggcgctgaggttcaattttcttcatccccaaatgaactgttaattcactgaaagacatttagacttttgcagccaaggagcagagccgggcaagctcactaaggaagccttagcttggtctcctgcatgggccccggggcctccagatatgcccactgtcaccctggcaagggccccacaccctcagaatgaaaaggattgattgggttattgtcagatacccccattagttcccctaaagtctgcatctgcagagctcttttagctcatctttttgttgtcggtgttgttttttgagacagagtctccctctgttgcccaggctggagtgcagtggcgcgatctcagctcattgaaagctccgcctcccgggttcaggccattcttctgcctcaccctccccagtagctgggactacaggcgcccaccaccacgcccacctacttttttgtatttttactagagacggggtttcaccatgttagccaggatggtctcgatctcctgacctcatgatccacccgcctcagccttccaaagtgctgggattacaggagtgagccaccgcgcccggccttttagcttatcttgaaatccaccagcctaccttctgttcatggcacgagcagtgatttcagtgaaaccatcataaacattcttgttccactagatgctgatcacagcagtgatgtttctgtgttaataccctgtactgtccctcgagtactgtacctttgtgcttgcacacgtgtcactaacgcacgtgttaccagagtctcacgaccctacggtgctatttttattggtgcaaaattaaaccctctcagctgaccgttgctggataggatcagaatgcaggaaaagagcctctatggcaatacgattgtccttttttcgtttcagagtcaaatgtatctattttccattcgttaacttgcattacatactgtacccatg

SEQ ID NO: 420 - DNA, 1745 bp, Homo sapiens
  source 1..1745: mol_type = unassigned DNA
atcatcccagtcccttgacctcatgtcagccccactcaggctgtcctgtctctgcagtgctcgtcgacctgcgggaagggcctgcagtcccgggtggtgcagtgcatgcacaaggtcacagggcgccacggcagcgagtgccccgccctctcgaagcctgccccctacagacagtgctaccaggaggtctgcaacgacaggatcaacgccaacaccatcacctccccccgccttgctgctctgacctacaaatgcacacgagaccagtggacggtatattgccgggtcatccgagaaaagaacctctgccaggacatgcggtggtaccagcgctgctgccagacctgcagggacttctatgcaaacaagatgcgccagccaccgccgaactcgtgacacgcagtcccaagggtcgctcaaagctcagactcaggtctgaaacccacccacccgcaagcctaccagccttgtggccacgcccccacccggctgccacaagaatccaactacatagaacatgagcgtggacttggcgtttgccattagtgcttccgtacttaatatattgttaacagccactggctggctttctacagtgaggagaaagtaggcatgagtcacaaagtaacttcaatttctaggatttcaggtacctcgaagggaagcacctctggcagacaaccgtcaagagagagacatcatttagtgttcttgtcttgactcgcttttgacatttgaatttccagtgcttggtatatcatggaggaaacatccccaaaacgagacatgctagaaaaggctttattctgaaagccggcgacaccatggagggaggggcaggtgttggtgagcctctgcccgtggcttctctggggagggccgggctgcttagcacacgtttctctccatctaccttcttgaccacatgagaaccaggacgttgcctccatgcccgtctctgagaacatagtctctaaatcctaggtgttgccttggaagtctcgtgcgtggagtgtaaatctatatatgccagcgaggacagcagtgccacgcagttcataccacccgcatgggaagaatgttccaagagagtctgggtttggggaagcatctaattttcagagctctgctgtccaccgtgtagggaaacagaagggcctctcttcaaggtgctgtgacataagaaacggtaattgcggtgatggggttgcttcctaaggcaaagagatgctgtaccacatcccagtggctttctaccgaccgtggccatttatctgaaggtaagacgacatttgggacctctgaggacacaagcccaggcctaggatctgtagagcaaggcctgactgctctatcctggcacggagcagcctgatgtgccaggaccaggggaggaacgccatctggctggcactgctgcacacccgccgagccttcctgtagccccagactttgtggtacccattatcatcacgcctgtcatcattgacccatcttcttggtggggcaaggatgatgcatgatgaaggaaggtccttcccccctgcagcccccttacgcctggcagcagacaagcagagtggcctctttgagagcacagaggatggtagcaccctacctgcaaggaggccgggcagggaccctagatgccaggaggcctgttttgctcaccaacttggtgggcatttcatgggtgcttatgttctaggactttaccgtaaataacacctcctccctgatttcag

SEQ ID NO: 421 - DNA, 643 bp, Homo sapiens
  source 1..643: mol_type = unassigned DNA
gtgaactctactgctcgcccctcgggaaggagtccccactgctggtggccgacagggtcctggacggtacaccctgcgggccctacgagactgatctctgcgtgcacggcaagtgccagaaaatcggctgtgacggcatcatcgggtctgcagccaaagaggacagatgcggggtctgcagcggggacggcaagacctgccacttggtgaagggcgacttcagccacgcccgggggacaggttatatcgaagctgccgtcattcctgctggagctcggaggatccgtgtggtggaggataaacctgcccacagctttctggctctcaaagactcgggtaaggggtccatcaacagtgactggaagatagagctccccggagagttccagattgcaggcacaactgttcgctatgtgagaagggggctgtgggagaagatctctgccaagggaccaaccaaactaccgctgcacttgatggtgttgttatttcacgaccaagattatggaattcattatgaatacactgttcctgtaaaccgcactgcggaaaatcaaagcgaaccagaaaaaccgcaggactctttgttcatctggacccacagcggctgggaagggtgcagtgtgcagtgcggcggaggtga

SEQ ID NO: 422 - DNA, 1964 bp, Homo sapiens
  source 1..1964: mol_type = unassigned DNA
agtgtgtgccagtggcggttgtacctctaagacttcagcttttaaattcctgccggagcagacacttctgttgtttagtctgccttgttcatcccgttcgtgtgagctggacattggacacttccccctctgttggcctcattcagcttgggcaggagcaggtgctaatccagcccctcaacaactcccagggcccattcagtggacgagaacatctgatcaggcgcaaatggtccttgacccccagcccttctgctgaggcccagagacctgagcagctctgcaaggttctaacagaaaagaagaagccgacgtggggcaggccttcgcgggactggcgggagcggaggaacgctatccggctcaccagcgagcacacggtggagaccctggtggtggccgacgccgacatggtgcagtaccacggggccgaggccgcccagaggttcatcctgaccgtcatgaacatggtatacaatatgtttcagcaccagagcctggggattaaaattaacattcaagtgaccaagcttgtcctgctacgacaacgtcccgctaagttgtccattgggcaccatggtgagcggtccctggagagcttctgtcactggcagaacgaggagtatggaggagcgcgatacctcggcaataaccaggttcccggcgggaaggacgacccgcccctggtggatgctgccgtgtttgtgaccaggacagatttctgtgtacacaaggatgaaccgtgtgacactgttggaattgcttacttaggaggtgtgtgcagtgctaagaggaagtgtgtgcttgccgaagacaatggtctcaatttggcctttaccatcgcccatgagctgggccacaacttgggcatgaaccacgacgatgaccactcatcttgcgctggcaggtcccacatcatgtcaggagagtgggtgaaaggccggaacccaagtgacctctcttggtcctcctgcagccgagatgaccttgaaaacttcctcaagtcaaaagtcagcacctgcttgctagtcacggaccccagaagccagcacacagtacgcctcccgcacaagctgccgggcatgcactacagtgccaacgagcagtgccagatcctgtttggcatgaatgccaccttctgcagaaacatggagcatctaatgtgtgctggactgtggtgcctggtagaaggagacacatcctgcaagaccaagctggaccctcccctggatggcaccgagtgtggggcagacaagtggtgccgcgcgggggagtgcgtgagcaagacgcccatcccggagcatgtggacggagactggagcccgtggggcgcctggagcatgtgcagccgaacatgtgggacgggagcccgcttcaggcagaggaaatgtgacaaccccccccctgggcctggaggcacacactgcccgggtgccagtgtagaacatgcggtctgcgagaacctgccctgccccaagggtctgcccagcttccgggaccagcagtgccaggcacacgaccggctgagccccaagaagaaaggcctgctgacagccgtggtggttgacgataagccatgtgaactctactgctcgcccctcgggaaggagtccccactgctggtggccgacagggtcctggacggtacaccctgcgggccctacgagactgatctctgcgtgcacggcaagtgccagaaaatcggctgtgacggcatcatcgggtctgcagccaaagaggacagatgcggggtctgcagcggggacggcaagacctgccacttggtgaagggcgacttcagccacgcccgggggacaggttatatcgaagctgccgtcattcctgctggagctcggaggatccgtgtggtggaggataaacctgcccacagctttctgggtaaaacacaaatgacttgactcaccatttatgtgttgagaatcgattttgatgatcagtctggt

SEQ ID NO: 423 - DNA, 496 bp, Homo sapiens
  source 1..496: mol_type = unassigned DNA
ggtggatgctgccgtgtttgtgaccaggacagatttctgtgtacacaaggatgaaccgtgtgacactgttggaattgcttacttaggaggtgtgtgcagtgctaagaggaagtgtgtgcttgccgaagacaatggtctcaatttggcctttaccatcgcccatgagctgggccacaacactccgcaagaaacagatactgaagacttggagtggctgtagacttccctaaaactgaggaattgctctccacgtacacatgatttttgctacgcactgttagcagcaagttcctcctcgacacctggagggttgactgttagcctggggttttcatcttcaggagcttttagccatctttccatttcctgccctgtcccagccctgtgtctgcagcaccattagatgaattactctctaggctcagaagcagaaagcatattcttattctcaccaaatcgccctgtttccttcaacaaagttccatgataactgaca

SEQ ID NO: 424 - DNA, 847 bp, Homo sapiens
  source 1..847: mol_type = unassigned DNA
caagtgaccaagcttgtcctgctacgacaacgtcccgctaagttgtccattgggcaccatggtgagcggtccctggagagcttctgtcactggcagaacgaggagtatggaggagcgcgatacctcggcaataaccaggttcccggcgggaaggacgacccgcccctggtggatgctgccgtgtttgtgaccaggctgtggtcaagccggacagtgtattctccaagacgttccctgacaaacaggtggctaggtggctgccatggaggacgtgagcatgacatgtctagcaggagctgctgagccagaagcggttgaagctgggttttctgcagctgtgtctgggacttggaaggacccctgagtggactgggcctggggtcacacggagcccacacagaagccagggcttagggggcttcagcacctgggggggcttcaccttggcctccacatctgacccagaaagctgagaacgcagagaactcctccctgaagtcgagaactcctcctcgagcctgggcctgtgctctgggtgagagtgcctgggagacaccatagcagacacagctggcccgaagctgcaccaccaggatccctctggccagaccttcccctccagcataataccatctaactcctcggggcacccttccctttaccttctgccaggggaccctcttgccaggctttgcgcgtggtgaagcctcagcaagtatccatggaacttgatgttacgctcccaggcttcccacgctcgtgaggccatggctgctgggtagcttgcagggccccttgaaagggtctggaaacgtcagtcaattaataaacgaatgtattaagtccc

SEQ ID NO: 425 - DNA, 571 bp, Homo sapiens
  source 1..571: mol_type = unassigned DNA
aattactttttccaaaggctggagggcttcactccggctggcgccgccgcctagcgcgctcctgcttcgccgccacggtccgggggggctgccggtcccgggtaccatgtgtgacggcgccctgctgcctccgctcgtcctgcccgtgctgctgctgctggtttggggactggacccgggcacaggttggcctcattcagcttgggcaggagcaggtgctaatccagcccctcaacaactcccagggcccattcagtggacgagaacatctgatcaggcgcaaatggtccttgacccccagcccttctgctgaggcccagagacctgagcagctctgcaaggttctaacagaaaagaagaagccgacgtggggcaggccttcgcgggactggcgggagcggaggaacgctatccggctcaccagcgagcacacggtggagaccctggtggtggccgacgccgacatggtgcagtaccacggggccgaggccgcccagaggttcatcctgaccgtcatgaacatggtatacaatatgtttcagcaccagagcctggggattaaaattaacat

SEQ ID NO: 426 - DNA, 954 bp, Homo sapiens
  source 1..954: mol_type = unassigned DNA
gcggccgccccgccgagctgtgcttctactcgggccgtgtgctcggccaccccggctccctcgtctcgctcagcgcctgcggcgccgccggcggcctggttggcctcattcagcttgggcaggagcaggtgctaatccagcccctcaacaactcccagggcccattcagtggacgagaacatctgatcaggcgcaaatggtccttgacccccagcccttctgctgaggcccagagacctgagcagctctgcaaggttctaacagttccacagtgtctgggcctcacctgggaggacttgaaatctggaggctggagtgatctggaggtgcctcattcatgtgtctggcctggaggtggatgacttgaagacaaggacaacaacgtggagcgtctacctgtggcctctgcagcttggcgtccataccttggtggcagacatacttcttctatggccaccagggctcccaatgcaagagttcccgcaagcccagcaggagctgtgctgcctttgaggatcagcctcagaaatcctagagcatcactctgaaggtactctgttggctgaagcggttagaaacctacccaggttcaagggcagagagatagaccccaccgctcaatgtcaaagaatttgggggccttatttaaaacctcttcacacctctataactgtaggtaggtgacaccgctagtgacaaagggctactgtgcagagggatcagagacagctcgaggagagagcatattccatagttcagagacagcataccgggtatggggctcttcagcccagctttggacattggtgtgcatcaactgtgggcattgggcctagagaaggctttggtgtcagagctgtggtgtagtcactctgagtgtccttggtcagttaattgattatagctttacggagataaaattaacatgcaataaactgaatatattcaaatgta

SEQ ID NO: 427 - DNA, 220 bp, Homo sapiens
  source 1..220: mol_type = unassigned DNA
ctgtcccgaggcttcgaggtggaggaggcgggcgcggcccggcgccgcggccgccccgccgagctgtgcttctactcgggccgtgtgctcggccaccccggctccctcgtctcgctcagcgcctgcggcgccgccggcggcctggtactgcccgcgccacctccgggtcggcccgtccggttggcctcattcagcttgggcaggagcaggtgctaatcca

SEQ ID NO: 428 - DNA, 349 bp, Homo sapiens
  source 1..349: mol_type = unassigned DNA
agcaaggccggccttcctcaagttgtctgctccatcagaaacctccggtgctacgagcctgtaatacaaacttctgtccagctcctgaaaagagagattctgcaggaagccagttaccatgttgtgatggtcctcaagcagtccatgaagaaggactgaggtttcctgacaaccactgggctatgtgagaaagccttccagaagcagattccccagcccagccgagtattcagataactacagccccacctccaatctttcttgcagcctgatgagagacctcaagccagaaccacacagctaaccatttctgaatttccatgcaataaatgcataatgttataagcca

SEQ ID NO: 429 - DNA, 5913 bp, Homo sapiens
  source 1..5913: mol_type = unassigned DNA
aatcaccgcgcggtggagaggcgggcgctcggctccggcgcgctgggggagccagctggcgctgtcttccccatcgcctcagacgctcacaccgacacagacagacgcacagacgggcgggcagacaccgacagtctcccaaccgtttgcgctccagtcccggcccagggagccccccgtaccctctggggtgccgcaaactgcagctcggcaggcccgcgccgggagaagggagggcgcgcaggcggccggaggaggggaggtcccagcgcgcccccgctgcgatgtgaacggcggcggctctcacctggagccgcacctggggcgccgagctccggggccgcggaaagaatgcgcgccgcccgtgcgctccgcctgccgcgtctggccacccgcagccgccgcgtccgcacctgaccatggagtgcgccctcctgctcgcgtgtgccttcccggctgcgggttcgggcccgccgaggggcctggcgggactggggcgcgtggccaaggcgctccagctgtgctgcctctgctgtgcgtcggtcgccgcggccttagccagtgacagcagcagcggcgccagcggattaaatgatgattacgtctttgtcacgccagtagaagtagactcagccgggtcatatatttcacacgacattttgcacaacggcaggaaaaagcgatcggcgcagaatgccagaagctccctgcactaccgattttcagcatttggacaggaactgcacttagaacttaagccctcggcgattttgagcagtcactttattgtccaggtacttggaaaagatggtgcttcagagactcagaaacccgaggtgcagcaatgcttctatcagggatttatcagaaatgacagctcctcctctgtcgctgtgtctacgtgtgctggcttgtcaggtttaataaggacacgaaaaaatgaattcctcatctcgccattacctcagcttctggcccaggaacacaactacagctcccctgcgggtcaccatcctcacgtactgtacaaaaggacagcagaggagaagatccagcggtaccgtggctaccccggctctggccggaattatcctggttactccccaagtcacattccccatgcatctcagagtcgagagacagagtatcaccatcgaaggttgcaaaagcagcatttttgtggacgacgcaagaaatatgctcccaagcctcccacagaggacacctatctaaggtttgatgaatatgggagctctgggcgacccagaagatcagctggaaaatcacaaaagggcctcaatgtggaaaccctcgtggtggcagacaagaaaatggtggaaaagcatggcaagggaaatgtcaccacatacattctcacagtaatgaacatggtttctggcctatttaaagatgggactattggaagtgacataaacgtggttgtggtgagcctaattcttctggaacaagaacctggaggattattgatcaaccatcatgcagaccagtctctgaatagtttttgtcaatggcagtctgccctcattggaaagaatggcaagagacatgatcatgccatcttactaacaggatttgatatttgttcttggaagaatgaaccatgtgacactctagggtttgcccccatcagtggaatgtgctctaagtaccgaagttgtaccatcaatgaggacacaggacttggccttgccttcaccatcgctcatgagtcagggcacaactttggtatgattcacgatggagaagggaatccctgcagaaaggctgaaggcaatatcatgtctcccacactgaccggaaacaatggagtgttttcatggtcttcctgcagccgccagtatctcaagaaattcctcagcacacctcaggcggggtgtctagtggatgagcccaagcaagcaggacagtataaatatccggacaaactaccaggacagatttatgatgctgacacacagtgtaaatggcaatttggagcaaaagccaagttatgcagccttggttttgtgaaggatatttgcaaatcactttggtgccaccgagtaggccacaggtgtgagaccaagtttatgcccgcagcagaagggaccgtttgtggcttgagtatgtggtgtcggcaaggccagtgcgtaaagtttggggagctcgggccccggcccatccacggccagtggtccgcctggtcgaagtggtcagaatgttcccggacatgtggtggaggagtcaagttccaggagagacactgcaataaccccaagcctcagtatggtggcttattctgtccaggttctagccgtatttatcagctgtgcaatattaacccttgcaatgaaaatagcttggattttcgggctcaacagtgtgcagaatataacagcaaacctttccgtggatggttctaccagtggaaaccctatacaaaagtggaagaggaagatcgatgcaaactgtactgcaaggctgagaactttgaatttttttttgcaatgtccggcaaagtgaaagatggaactccctgctccccaaacaaaaatgatgtttgtattgacggggtttgtgaactagtgggatgtgatcatgaactaggctctaaagcagtttcagatgcttgtggcgtttgcaaaggtgataattcaacttgcaagttttataaaggcctgtacctcaaccagcataaagcaaatgaatattatccggtggtcctcattccagctggcgcccgaagcatcgaaatccaggagctgcaggtttcctccagttacctcgcagttcgaagcctcagtcaaaagtattacctcaccgggggctggagcatcgactggcctggggagttccccttcgctgggaccacgtttgaataccagcgctctttcaaccgcccggaacgtctgtacgcgccagggcccacaaatgagacgctggtctttgaaattctgatgcaaggcaaaaatccagggatagcttggaagtatgcacttcccaaggtcatgaatggaactccaccagccacaaaaagacctgcctatacctggagtatcgtgcagtcagagtgctccgtctcctgtggtggaggttacataaatgtaaaggccatttgcttgcgagatcaaaatactcaagtcaattcctcattctgcagtgcaaaaaccaagccagtaactgagcccaaaatctgcaacgctttctcctgcccggcttactggatgccaggtgaatggagtacatgcagcaaggcctgtgctggaggccagcagagccgaaagatccagtgtgtgcaaaagaagcccttccaaaaggaggaagcagtgttgcattctctctgtccagtgagcacacccactcaggtccaagcctgcaacagccatgcctgccctccacaatggagccttggaccctggtctcagtgttccaagacctgtggacgaggggtgaggaagcgtgaactcctctgcaagggctctgccgcagaaaccctccccgagagccagtgtaccagtctccccagacctgagctgcaggagggctgtgtgcttggacgatgccccaagaacagccggctacagtgggtcgcttcttcgtggagcgagtgttctgcaacctgtggtttgggtgtgaggaagagggagatgaagtgcagcgagaagggcttccagggaaagctgataactttcccagagcgaagatgccgtaatattaagaaaccaaatctggacttggaagagacctgcaaccgacgggcttgcccagcccatccagtgtacaacatggtagctggatggtattcattgccgtggcagcagtgcacagtcacctgtgggggaggggtccagacccggtcagtccactgtgttcagcaaggccggccttcctcaagttgtctgctccatcagaaacctccggtgctacgagcctgtaatacaaacttctgtccagctcctgaaaagagagaggatccatcctgcgtagatttcttcaactggtgtcacctagttcctcagcatggtgtctgcaaccacaagttttacggaaaacaatgctgcaagtcatgcacaaggaagatctgatcttggtgtcctccccagcaccttagggccaggggcttacctttcaacctctagagagaccagctgcctttgagaccaggagctgagcaccgagaaccatctgtgagctgccgctgtgatgaaggagcctgctctgaggaacagacaggttgccagtaggcttctagctcaattccctgaagcacgtggtactctgaagcacttgaaaatgggaagcgatgacaaatctgactttaaaaaaaatctttgatttgcactgttatatgcaagaagtggtgaatcacactgagatacgtcgatttggggagagacccccttttgaacttcaaagggttcaagggcaaagacatctgttttaaaaaggtcctttatgacttcaggtcaaagactgagactcagaactttcaaatctggatggaataccttgcctaactgttgcgtggagttcacagttcgactaaccctgtgaacacccaagccaggagttctatgagaagccaaatggtgctcgcaattgtgcttgctgctggactggcaagcttcatgttatgtttatttggtgtgcgtgtgtctttattattttgtgtaaactatattctgcttatagagagtctctgagactaaaattgacaacttgaaaagtattccaaggaatattatgaaaatagggcaacatggactgtttaagatctccatgtaattgaaattcatgcaaggaaacaactcatagaaaagataaatatggatgcccttcacatgttatcaacctcgtaacttttggtgcttgctgaatcagtccatgaaaagctacagcccgctctttgggaatgctacatacccatttctggtatttaaaaaatatctaggaggagctaaatgacaaaacacagcagtgttttgagggagaaaggaccatcatttataatgctctgtacatactaccagagctgcttggaaaattaaaggccacttgtggctttttcctaccaactgatacgtttaaatttgccctaggattgagctaacagcaaaaaaaaaaaaaaaaaaaagagagaaagaaaggagtaaacagtggtaataaaaaaatccatctgtcttcttgctatgttaatattaataaatcataatatgacaagaccctcactgaataagagtattttcagtcatcagaagccagctgttggtaggcattaatgagtttaaaattgttctcaattgaaaaaacatcacactattttgccaaaaccaaagtaattataatactgtgtcctcctgtaattttttgagaagtggttataaagggcatatttacataaattctactttattcctcaacttctttgatgaatgtaacccaattttacttctttaaaaagtctcaattcaagctggattagccagctcagcataatcaactagacagtggtttgttaaatttagcagcatacttcgttcccattctaattaaagtcatgagttcttgaatcccagagaaataatgcttaggaacttctctcaatctgcttggcttggcctagagaagtggccattttatcaacaggaaaaaaaaaaattttctctactacaaccccgttgccttctgaaaaacagcaagttatttctttatataattatcattttattattttatggaaaattaatttattaattaatagcctattatgtgttctcacttgcttctctaagtaatattttgagataaaatgttgaataaaaccatggattatagagaaaagtcaaaatatatgtgtaatatttaattattttataagttttataataaagtattccatttctttatctttga

SEQ ID NO: 430 - DNA, 669 bp, Homo sapiens
  source 1..669: mol_type = unassigned DNA
gataattcaacttgcaagttttataaaggcctgtacctcaaccagcataaagcaaatgaatattatccggtggtcctcattccagctggcgcccgaagcatcgaaatccaggagctgcaggtttcctccagttacctcgcagttcgaagcctcagtcaaaagtattacctcaccgggggctggagcatcgactggcctggggagttccccttcgctgggaccacgtttgaataccagcgctctttcaaccgcccggaacgtctgtacgcgccagggcccacaaatgagacgctggtctttgaaattctgatgcaaggcaaaaatccagggatagcttggaagtatgcacttcccaaggtcatgaatggaactccaccagccacaaaaagacctgcctatacctggagtatcgtgcagtcagagtgctccgtctcctgtggtggaggtagatgattttctcattctgtctccaaagtctgtctctcttaaaacaggttctttcactccaggcgtctttaacataatatggtttaaataagccacccaagaactgtcttttatgagaaccatcaccataaaagcaaatattatggcattagttaagggttttcctatgtggtaaggaatcaactctcacaaagctcaaatcaaccacaaccaaggctcaaa

SEQ ID NO: 431 - DNA, 1632 bp, Homo sapiens
  source 1..1632: mol_type = unassigned DNA
agacgctcacaccgacacagacagacgcacagacgggcgggcagacaccgacagtctcccaaccgtttgcgctccagtcccggcccagggagccccccgtaccctctggggtgccgcaaactgcagctcggcaggcccgcgccgggagaagggagggcgcgcaggcggccggaggaggggaggtcccagcgcgcccccgctgcgatgtgaacggcggcggctctcacctggagccgcacctggggcgccgagctccggggccgcggaaagaatgcgcgccgcccgtgcgctccgcctgccgcgtctggccacccgcagccgccgcgtccgcacctgaccatggagtgcgccctcctgctcgcgtgtgccttcccggctgcgggttcgggcccgccgaggggcctggcgggactggggcgcgtggccaaggcgctccagctgtgctgcctctgctgtgcgtcggtcgccgcggccttagccagtgacagcagcagcggcgccagcggattaaatgatgattacgtctttgtcacgccagtagaagtagactcagccgggtcatatatttcacacgacattttgcacaacggcaggaaaaagcgatcggcgcagaatgccagaagctccctgcactaccgattttcagcatttggacaggaactgcacttagaacttaagccctcggcgattttgagcagtcactttattgtccaggtacttggaaaagatggtgcttcagagactcagaaacccgaggtgcagcaatgcttctatcagggatttatcagaaatgacagctcctcctctgtcgctgtgtctacgtgtgctggcttgtcaggtttaataaggacacgaaaaaatgaattcctcatctcgccattacctcagcttctggcccaggaacacaactacagctcccctgcgggtcaccatcctcacgtactgtacaaaaggacagcagaggagaagatccagcggtaccgtggctaccccggctctggccggaattatcctggttactccccaagtcacattccccatgcatctcagagtcgagagacagagtatcaccatcgaaggttgcaaaagcagcatttttgtggacgacgcaagaaatgtatatgctcccaagcctcccacagaggacacctatctaaggtttgatgaatatgggagctctgggcgacccagaagatcagctggaaaatcacaaaagggcctcaatgtggaaaccctcgtggtggcagacaagaaaatggtggaaaagcatggcaagggaaatgtcaccacatacattctcacagtaatgaacatggtttctggcctatttaaagatgggactattggaagtgacataaacgtggttgtggtgagcctaattcttctggaacaagaacctggtttgcccccatcagtggaatgtgctctaagtaccgaagttgtaccatcaatgaggacacaggacttggccttgccttcaccatcgctcatgagtcagggcacaactttggtatgattcacgatggagaagggaatccctgcagaaaggctgaaggcaatatcatgtctcccacactgaccggaaacaatggagtgttttcatggtcttcctgcagccgccagtatctcaag

SEQ ID NO: 432 - DNA, 556 bp, Homo sapiens
  source 1..556: mol_type = unassigned DNA
aagtagactcagccgggtcatatatttcacacgacattttgcacaacggcaggaaaaagcgatcggcgcagaatgccagaagctccctgcactaccgattttcagcatttggacaggaactgcacttagaacttaagccctcggcgattttgagcagtcactttattgtccaggtacttggaaaagatggtgcttcagagactcagaaacccgaggtgcagcaatgcttctatcagggatttatcagaaatgacagctcctcctctgtcgctgtgtctacgtgtgctggcttgcttctggcccaggaacacaactacagctcccctgcgggtcaccatcctcacgtactgtacaaaaggacagcagaggagaagatccagcggtaccgtggctaccccggctctggccggaattatcctggttactccccaagtcacattccccatgcatctcagagtcgagagacagagtatcaccatcgaaggttgcaaaagcagcatttttgtggacgacgcaagaaatgtatatgctcccaagcctcccacagaggacacct

SEQ ID NO: 433 - DNA, 626 bp, Homo sapiens
  source 1..626: mol_type = unassigned DNA
agctgaacttttcccattgcagattacgtctttgtcacgccagtagaagtagactcagccgggtcatatatttcacacgacattttgcacaacggcaggaaaaagcgatcggcgcagaatgccagaagctccctgcactaccgattttcagcatttggacaggaactgcacttagaacttaagccctcggcgattttgagcagtcactttattgtccaggtacttggaaaagatggtgcttcagagactcagaaacccgaggtgcagcaatgcttctatcagggatttatcagaaatgacagctcctcctctgtcgctgtgtctacgtgtgctggcttgtcaggtttaataaggacacgaaaaaatgaattcctcatctcgccattacctcagcttctggcccaggaacacaactacagctcccctgcgggtcaccatcctcacgtactgtacaaaaggacagcagaggagaagatccagcggtaccgtggctaccccggctctggccggaattatcctggttactccccaagtcacattccccatgcatctcagagtcgagagacagagtatcaccatcgaaggttgcaaaagcagcatttttgtggacgacgcaagaaatgtat

SEQ ID NO: 434 - DNA, 593 bp, Homo sapiens
  source 1..593: mol_type = unassigned DNA
agcaattagtactgctctagggagcagtggtgaagattacgtctttgtcacgccagtagaagtagactcagccgggtcatatatttcacacgacattttgcacaacggcaggaaaaagcgatcggcgcagaatgccagaagctccctgcactaccgattttcagcatttggacaggaactgcacttagaacttaagccctcggcgattttgagcagtcactttattgtccaggtacttggaaaagatggtgcttcagagactcagaaacccgaggtgcagcaatgcttctatcagggatttatcagaaatgacagctcctcctctgtcgctgtgtctacgtgtgctggcttgtcaggtttaataaggacacgaaaaaatgaattcctcatctcgccattacctcagcttctggcccaggaacacaactacagctcccctgcgggtcaccatcctcacgtactgtacaaaaggacagcagaggagaagatccagcggtaccgtggctaccccggctctggccggaattatcctggttactccccaagtcacattccccatgcatctcagagtcgagagacagagtatcaccatc

SEQ ID NO: 435 - DNA, 574 bp, Homo sapiens
  source 1..574: mol_type = unassigned DNA
accttttctcttgcaggcgctccagctgtgctgcctctgctgtgcgtcggtcgccgcggccttagccagtgacagcagcagcggcgccagcggattaaatgatgattacgtctttgtcacgccagtagaagtagactcagccgggtcatatatttcacacgacattttgcacaacggcaggaaaaagcgatcggcgcagaatgccagaagctccctgcactaccgattttcagcatttggacaggaactgcacttagaacttaagccctcggcgattttgagcagtcactttattgtccaggtacttggaaaagatggtgcttcagagactcagaaacccgaggtgcagcaatgcttctatcagggatttatcagaaatgacagctcctcctctgtcgctgtgtctacgtgtgctggcttgtcaggtttaataaggacacgaaaaaatgaattcctcatctcgccattacctcagcttctggcccaggaacacaactacagctcccctgcgggtcaccatcctcacgtactgtacaaaaggacagcagaggagaagatccagcggtaccgtggc

SEQ ID NO: 436 - DNA, 660 bp, Homo sapiens
  source 1..660: mol_type = unassigned DNA
atatttgatctaggtgcaaggcaataggaacaaagatatctttgagctttgtgttgctctttgccagcttgctggaaagagaccatttggaattgtgggctctgggtgctgacagctgaacttttcccattgcagattacgtctttgtcacgccagtagaagtagactcagccgggtcatatatttcacacgacattttgcacaacggcaggaaaaagcgatcggcgcagaatgccagaagctccctgcactaccgattttcagcatttggacaggaactgcacttagaacttaagccctcggcgattttgagcagtcactttattgtccaggtacttggaaaagatggtgcttcagagactcagaaacccgaggtgcagcaatgcttctatcagggatttatcagaaatgacagctcctcctctgtcgctgtgtctacgtgtgctggcttggtcttcaaaccttgcttagttctttcattgtttttctcaataaactgaaagaatatttatgctacttcccagaatttcaagtccaactgaaggggaaagtttaataaggacacgaaaaaatgaattcctcatctcgccattacctcagcttctggcccaggaacacaactacagctcccctgcgggtcaccatcctcacgtactgtac

SEQ ID NO: 437 - DNA, 6754 bp, Homo sapiens
  source 1..6754: mol_type = unassigned DNA
agctgcgggcggctccagctgcccccagatgtgggctgggcggctcgcggggaactttcgcgccggctgcgagtgcggggccccggctgcagtccggctgccatggatccgccggcgggagccgctcgccgcctgctctgccccgcgctgctgctgctgctgctgctgctgccgccgccgctcctgccgccgccgccgccgcccgcgaacgccaggctcgccgccgccgccgaccccccaggcgggcccctggggcacggagcggagcgcatcctggcggtgcccgtgcgcactgacgcccagggccgcttggtgtcccacgtggtgtcggcagctacgtccagagcaggggtacgagcccgcagggccgccccggtccggaccccgagcttccccggaggcaacgaggaggagcctggcagtcacctcttctacaatgtcacggtctttggccgagacctgcacctgcggctgcggcccaacgcccgcctcgtggcgcccggggccactatggagtggcagggcgagaagggcaccacccgcgtggagcccctgctcgggagctgtctctacgtcggagacgtggccggcctagccgaagcctcctctgtggcgctcagcaactgcgatgggctggctggtctgatccggatggaggaggaggagttcttcatcgaacccttggagaaggggctggcggcgcaggaggctgagcaaggccgtgtgcatgtggtgtatcgccggccacccacgtcccctcctctcggggggccacaggccctggacacaggggcctccctggacagcctggacagcctcagccgcgccctgggcgtcctagaggagcacgccaacagctcgaggcggagggcacgcaggcatgctgcggacgatgactacaacatcgaggtcctgctgggcgtggatgactctgtggtgcagttccacgggaaggagcacgtacagaagtacctgctgacactcatgaacattgtcaatgaaatctaccatgacgagtccttgggtgcccacatcaacgtggtcctggtgcggatcatcctcctgagctatggaaagtccatgagcctcatcgagatcgggaacccctctcagagcctggagaatgtctgccgctgggcctacctccagcagaagccagacacgggccacgatgaataccacgatcacgccatcttcctcacacggcaggactttgggccttccggcatgcaaggctatgctcctgtcaccggcatgtgccatccggtccgcagctgcaccctgaaccatgaggacggcttctcctcagcgtttgtggtggcccatgagactggccacgtgctgggcatggagcacgacgggcagggcaaccgctgtggcgacgaggtgcggctgggcagcatcatggcgcccctggtgcaggccgccttccaccgcttccactggtcccgctgcagccagcaggagctgagccgctacctgcactcctatgactgcctgctggatgaccccttcgcccacgactggccggcgctgccccagctcccgggactgcactactccatgaacgagcaatgccgctttgacttcggcctgggctacatgatgtgcacggcgttccggacctttgacccctgcaagcagctgtggtgcagccatcctgacaacccctacttttgcaagaccaagaaggggccccccttggacgggactatgtgtgcacctggcaagcattgttttaaaggacactgcatctggctgacacctgacatcctcaaacgggacggcagctggggcgcttggagtccgtttggctcctgctcacgtacctgtggcacgggcgtgaagttcaggacccgccagtgtgacaacccacacccggccaacgggggccgcacctgctcgggccttgcctacgacttccagctctgcagccgccaggactgccccgactccctggctgacttccgcgaggagcagtgccgccagtgggacctgtacttcgagcacggcgacgcccagcaccactggctgccccacgagcaccgggatgccaaggagagatgccacctgtactgcgagtccagggagaccggggaggtggtgtccatgaagcgcatggtgcatgacgggacgcgctgctcctacaaggacgccttcagcctctgtgtgcgcggggactgcaggaaggtgggctgtgacggtgtgatcggctccagcaagcaggaagacaagtgtggcgtgtgcggaggggacaacagccactgcaaagtggtcaagggcacgttcacacggtcacccaagaagcatggttacatcaagatgtttgagatccctgcaggagccagacacctgctcattcaggaggtagacgccaccagccaccatctggccgtcaagaacctggagacaggcaagttcatcttaaatgaagagaatgacgtggatgccagttccaaaaccttcattgccatgggcgtggagtgggagtacagagacgaggacggccgggagacgctgcagaccatgggccccctccacggcaccatcaccgttctggtcatcccggtgggagacacccgggtctcactgacgtacaaatacatgatccatgaggactcactgaatgtcgacgacaacaacgtcctggaagaggactctgtggtctacgagtgggccctgaagaagtggtctccgtgctccaagccctgtggcggagggtcccagttcaccaagtatggctgccgccggaggctggaccacaagatggtacaccgtggcttctgtgccgccctctcgaagcccaaagccatccgcagagcgtgcaacccacaggaatgctcccagccagtgtgggtcacaggcgaatgggagccatgtagccagacctgtgggcggacaggcatgcaggtgcgctccgtgcgctgcattcagccgctacacgacaacaccacccgctccgtgcacgccaagcactgcaatgacgcccggcccgagagccgccgggcctgcagccgcgagctctgccctggtcgttggcgagccgggccctggtcccagtgctcagtaacctgtggcaacggcacccaggagcggccagtgctctgccgcaccgcggacgacagcttcggcatctgccaggaggagcgtcctgagacagcgaggacctgcaggcttggcccctgtccccgaaacatctcagatccctccaagaagagctacgtagttcagtggctgtcccgcccggaccccgactcgcccatccggaagatctcgtcaaagggccactgccaaggcgacaagtcaatattctgtaggatggaagtcttgtcccgctattgctccatcccaggctacaacaagctgtgctgcaagtcctgtaacctgtacaacaacctcaccaacgtggagggcaggatagagccaccgcctgggaagcacaacgacattgacgtgttcatgcctaccctcccagtgcccactgtagccatggaggtgcggccatcaccaagcacccccctggaggtccctctcaatgcctccagcaccaatgccacagaggatcacccagaaaccaatgccgtagatgaaccctacaaaatccatggcctggaagatgaagtccagccacccaacctaatccctcgacgaccgagcccctatgaaaagaccagaaaccaaagaatccaagagctcattgatgagatgcggaagaaagagatgctcggaaagttctaataaaatggaaagatagcatccctagcatttttttcttgcttatagagatattccatgggatagcaaatcctgtgtcatggagatgaagtcaaaattcctgattccaaaaggttttgagaaaacaaagagggggaatgacgtaagaaagataggcatgagcatgtggtaactaggttagcacgtgtgcttcccagcccaggagcgaccaaatactgtggtggcgtcaggtgtgcagtggagaggaatatagaggctgtatggcctccctcagtgagggcagggcaagagggatcactctgagagaacaaaaataggccccaagttgctaagcagtgattgggaaccttcctttccttggcggagatgcatgacattccctaccgatccccagacacagcctgtgggactcttaggagaaatggtgatttactgaataactgacccgttgccgagatgagtacaatgaagtggaggtgatgaactcaaatcgtcttccagggccaggcggctgaccggggtgagcgtagtggcccgctggggaccatggccgccctgacagccacacccacctggagctgacttggttctggctgttgctgccactgtgaaatctgtatctctctccatctctgctctactatccccggccttgccagacagtgttctttttcggaagaagtctagatttttgcatgaaaaaaactcaatctttaaaggtcgactcagaacattttaaggaggcctccacttggtctgatgcagtcttgctaattaagaactaaaggccttctgaccttcttggtgctcatgctgtacggcatctgaatgtctcgaccgagtctgagccgtgcagctgtcctccacctgcgaaagtaatgagaatcctatcacgggacataaggataggtctaaacagggtccatgccaagaaaacagtggggtgctctcccaggcctctcccctgtccactaaccctggccttgccggctgccttccaggctctgggggaagagctcctgcattcttccctggccaccttggctccagggctccccagagagcctcttccctccccaagtacctgagaaagatgagagaggcacgtgctctgctgggaaggtccagtgagcggttcaagggcctggaatctccctacggccaagtctaagggttctgggattctgggctttgtgggctttgcttgcttgctgggaatgggctttccctgtcccgccctgccccacctcgcctctgtctctcagaagctccagaacccagcagtgacctgcaaaatgtggcctctgatgggggcttagggtgggagatggggagagcctacattgtcttttgctccttgaaaactttaatagctcctattttccagagaatggtgctttgtgagcaacatgcgagtaagagagaaataggaggaagggggagtaggggcggatgggagaagagtggctcatttttacctctcactgccttgacattttgtgaacgtgaagcttaaactttctgggcttacaagacccaggggcacgtcagctccttagatgggctcagcctgacacataattcttaaacctttcctgtttaagaaacttctagaggctgtgtactctcaccaatcctcttcgagaatttgttcatgtgtatttccccattatatggatgaggctcaggataacagcatagtggctaccttctactgagttttgaggtgctaataagtatgtttgtctgaggctgcacatgtgggtggctctgtgtgtatgatccaagggacaaaatgacgatgtaggaaccagcaagaacggaatctgggctgatgcttcagtctccacctgggtgatggctagcctcccgccctccaccaccgcatcccacacgtgctgcgcactgtccccgtgtctcctggagaaccaaactggagaaaacctttctgagtatctctcatagtaccccttccttaagaagatgtggtttagagcatgtgtgcaatcctgcctctgtaattaggaaacggagcccgaggctttccattgttggttgaacccaggacagctggtgctattcacaggctgaagaactgggcagttcttacttgggtctgtcctaggatgtggaggaagttcaggactaacgctaggcagagagtatgactcggtttacccagcctaggggcctctggatgggaacactccattccaagatctcagcagagcagggcttcctggcttgaggctggaagcctttgggaagaggcccagctgggacattccctgggcacctgtcttccgctgaagggagcaaggtgccctctgggactgacagccatgaccctctgtgccatcctcaatccttgagccatatatcaagagtcctctagagccggatggtcctcaaaagtctgtccaaggaatgccaacgttcaccgggctctgagaaacgacgcaaatctctgagctggggaccacttggagaaccggcttagtaacagtcctgatcttcgcaagccagcttcttctgcatctgaggggctcctggcgcccagaggaggcagacagatgtcttctagctgagtttctaaccgcatgatgagactcagaccttccgctgcactagaaaatctgcaacagtgtccctgagtcacttctccttagtgggcagactcgtgttagatttgtggaacccagctctctgatttactccttttggaaaacccatggaatttcatgtataaggctttcatttgtattttaaggtttttctgtttgttttgagtatatacatggtgctcaatagcaacatcttagcagatgaagcagtttatgattccactccctcctgtatgacaggtagccactatactgaatcaaggtgctgaactcaaatcacaaaattctggcttaccgatacaacaaccaatacatctttgttctgtaatgtaaaatttgactccttacttttataacttattaaagttaaaatgtctgtgtttttgcaaatcatg

SEQ ID NO: 438 - DNA, 455 bp, Homo sapiens
  source 1..455: mol_type = unassigned DNA
gaatgacgcttccccaggaccccgggagacccggagcctctctgcctggggtgggggccccagcctggtgccctgcggccgcagcccctctctcctccctctaggaaacatctcagatccctccaagaagagctacgtagttcagtggctgtcccgcccggaccccgactcgcccatccggaagatctcgtcaaagggccactgccaaggcgacaagtcaatattctgtaggatggaagtcttgtcccgctattgctccatcccaggctacaacaagctgtgctgcaagtcctgtaacctgtacaacaacctcaccaacgtggagggcaggatagagccaccgcctgggaagcacaacgacattgacgtgttcatgcctaccctcccagtgcccactgtagccatggaggtgcggccatcaccaagcacccccctggaggtccctctcaatgcct

SEQ ID NO: 439 - DNA, 322 bp, Homo sapiens
  source 1..322: mol_type = unassigned DNA
ctccagctctgccagtgcgggccctgtgtgggaggtgaaccctgcctggcgactctccccctgcagtgctcagtaacctgtggcaacggcacccaggagcggccagtgctctgccgcaccgcggacgacagcttcggcatctgccaggaggagcgtcctgagacagcgaggacctgcaggcttggcccctgtccccgaaacatctcagatccctccaagaagagctacgtagttcagtggctgtcccgcccggaccccgactcgcccatccggaagatctcgtcaaagggccactgccaaggcgacaagtcaatattctgta

SEQ ID NO: 440 - DNA, 1703 bp, Homo sapiens
  source 1..1703: mol_type = unassigned DNA
gtaacctgtggcaacggcacccaggagcggccagtgctctgccgcaccgcggacgacagcttcggcatctgccaggaggagcgtcctgagacagcgaggacctgcaggcttggcccctgtccccgaaacatctcagatccctccaagaagagctacgtagttcagtggctgtcccgcccggaccccgactcgcccatccggaagatctcgtcaagtaaccgacccgtttataactctgcctctgccctccagtgcatgccctgcgccctgtggagcttgccttgggcccccctcctctctgtctatggaaagctcccctgactctgcgggcgcgctctggggtgaccgttttctcccgggcctctgagctcggcgtccgctccgggccgcgctgcctgctggcgggggctcgggcctctgctggggccgaacctggttggtgatggcttgtaaaggggcaaagatctgtcgtggttgcaggaggggccggtggccaaagggcgaccctccgggccgagcccgtcccggcccgggggggttcgcggtctcgcggcgtcgtgcggggaccccaccccgagtttccggcactgccaggtgcttcccggctgccaccgccgtcgctgctgccgccgaccctttgctgagcgtgtccttctgactcgtggaactatggcccgcttccgcccggccttcgcgcagctcacagccccgcgcggccctgtcctgcgggggtccggtcgcggaggcggcggaggggcgcggggacactccccacctccactgtccgcccgtcggccccggtggccttttctcgcctcgcgcacagctcccccgccgcagggctgagagagagagtggccgtctggtgcgcgcgtgcctcgcccacgcgtgtgaaccactacagaattacctcaatttttattgcttttttgcttagaaaaactatgtagaagatgccttaaagttgaaaggtaacgggattggctgccaactccagcttcagagggggaacgtgggccagtagaaggcagggaaggtgtaggggagccggtgcgttcatccaccttttgccaaggttgaggtttccaagtgcagacggcttctctccttgggctgagcggtgcgcaccgtccgtctccgcggactggagtctgccctgatgccccactggccagtcggcgctgactgttgcatggagcccccgagggtgctccacagcgcggccttacacccagggggcgaccccctgggccctgagccgcgatccatgtagcactcctccccgcccctccaccccagccaccgcctctgttcacaccgcacccctgccgggcggccggcccctactcccgcggctctgaccgccgttctgtaaataactggtgtgcacctgcgtactaatctcacgactgttaacttccaactttgacgaggccatgcgagcgacacgcgcgactggggaaggtgcaatactgtcctgggcatatgcactttggtttatcagggatattttattagtgttttgtatgtatttaatgacgtattctataggttccattgtcgttgcttttctggttttttttatgagacgttagcgtgtgccaaagtgactgtgaaaatgacctttcattcttactaatgatggaaagacctcctgtcatgcatcccacaaataaactcaataaaagttccatgaaactggg

SEQ ID NO: 441 - DNA, 2044 bp, Homo sapiens
  source 1..2044: mol_type = unassigned DNA
agctgcgggcggctccagctgcccccagatgtgggctgggcggctcgcggggaactttcgcgccggctgcgagtgcggggccccggctgcagtccggctgccatggatccgccggcgggagccgctcgccgcctgctctgccccgcgctgctgctgctgctgctgctgctgccgccgccgctcctgccgccgccgccgccgcccgcgaacgccaggctcgccgccgccgccgaccccccaggcgggcccctggggcacggagcggagcgcatcctggcggtgcccgtgcgcactgacgcccagggccgcttggtgtcccacgtggtgtcggcagctacgtccagagcaggggtacgagcccgcagggccgccccggtccggaccccgagcttccccggaggcaacgaggaggagcctggcagtcacctcttctacaatgtcacggtctttggccgagacctgcacctgcggctgcggcccaacgcccgcctcgtggcgcccggggccactatggagtggcagggcgagaagggcaccacccgcgtggagcccctgctcgggagctgtctctacgtcggagacgtggccggcctagccgaagcctcctctgtggcgctcagcaactgcgatgggctggctggtctgatccggatggaggaggaggagttcttcatcgaacccttggagaaggggctggcggcgcaggaggctgagcaaggccgtgtgcatgtggtgtatcgccggccacccacgtcccctcctctcggggggccacaggccctggacacaggggcctccctggacagcctggacagcctcagccgcgccctgggcgtcctagaggagcacgccaacagctcgaggcggagggcacgcaggcatgctgcggacgatgactacaacatcgaggtcctgctgggcgtggatgactctgtggtgcagttccacgggaaggagcacgtacagaagtacctgctgacactcatgaacattgtcaatgaaatctaccatgacgagtccttgggtgcccacatcaacgtggtcctggtgcggatcatcctcctgagctatggaaagtccatgagcctcatcgagatcgggaacccctctcagagcctggagaatgtctgccgctgggcctacctccagcagaagccagacacgggccacgatgaataccacgatcacgccatcttcctcacacggcaggactttgggccttccggcatgcaaggctatgctcctgtcaccggcatgtgccatccggtccgcagctgcaccctgaaccatgaggacggcttctcctcagcgtttgtggtggcccatgagactggccacgtgctgggcatggagcacgacgggcagggcaaccgctgtggcgacgaggtgcggctgggcagcatcatggcgcccctggtgcaggccgccttccaccgcttccactggtcccgctgcagccagcaggagctgagccgctacctgcactcctatgactgcctgctggatgaccccttcgcccacgactggccggcgctgccccagctcccgggactgcactactccatgaacgagcaatgccgctttgacttcggcctgggctacatgatgtgcacggcgttccggacctttgacccctgcaagcagctgtggtgcagccatcctgacaacccctacttttgcaagaccaagaaggggccccccttggacgggactatgtgtgcacctggcaagttcaggccgggcgcggtggctcatgcctgttatcccagcactttgggaggccaaggtaggtggatcgcctgaggtcagaagttcaagacaagtctggttaacatggcaaaatcccgtctctactaaaaatacaaaaattagctgggcgcggtggtgggtgcctgtaatcccagctactccggaggctgaggcatgaaaatcgtttgagcccaggaggcggaggttgcggtgagccaagatcgcgtcgctgctctccagtctggatcacacagcaagaccctgtctcaaaaaataaaaataaaagtgaagtgca

SEQ ID NO: 442 - DNA, 6754 bp, Homo sapiens; identical to SEQ ID NO: 437
  source 1..6754: mol_type = unassigned DNA

SEQ ID NO: 443 - DNA, 455 bp, Homo sapiens; identical to SEQ ID NO: 438
  source 1..455: mol_type = unassigned DNA

SEQ ID NO: 444 - DNA, 322 bp, Homo sapiens; identical to SEQ ID NO: 439
  source 1..322: mol_type = unassigned DNA

SEQ ID NO: 445 - DNA, 1703 bp, Homo sapiens; identical to SEQ ID NO: 440
  source 1..1703: mol_type = unassigned DNA

SEQ ID NO: 446 - DNA, 2044 bp, Homo sapiens; identical to SEQ ID NO: 441
  source 1..2044: mol_type = unassigned DNA

SEQ ID NO: 447 - DNA, 7311 bp, Homo sapiens
  source 1..7311: mol_type = unassigned DNA
agtgtgctctgcctccgaggaaaagctgccaaaattttctcctgctgcaattcaagttggctgggggccggtagtgagatctagggctacttcaacaaaactttgctgcccttcctgctcctcttgtcttcttttctcctgataccttttgatgctctgcacatgttatttgcatagcaaaggcactaagctttccaggaagagagggcaccacttccacccccaataagtcttttttcccgtcttttctttcttttcctttccttttttggggggtggggagggagagaaagggggtttgcaaaggcagcatctcagagtgatagcctagatgtattgaaggcatctcttattctgccaaatcggaaagtcagttctctaaagcccgggttagccagaccatagggttttattctggctgcagaataactggctggtgtggctttgcaaaggggggcaaaaaataaaaaaataaaaaaaattaaaaaaagttagagaggagagggagtacgtgagtcgtccagtgcaatctctattgtctgaaacttactttttatcagaatttgaagatgaaaacggttaaaaaatggccatactttagtaactaatcagcctaatgctttgcttatgaaaacttttaccatcattatttttttcattttggattgagaaaatgaatccagatatagaagaaagtgcaggatgttggataaaagtggctcttaaacagtggaacatccaataactaatttgcaagaagttttaaagaaataaaattgttatgcttcgattttggtatggtattgactctttagcacataggtagccctcaaaaaaatcatccagttttctaaattatggaaattttgtggaagacgttgacctggattttgagcctcatcatggcttcatcggaatttcatagtgaccacaggctttcatacagttctcaagaggaattcctgacttatcttgaacactaccagctaactattccaataagggttgatcaaaatggagcatttctcagctttactgtgaaaaatgataaacactcaaggagaagacggagtatggaccctattgatccacagcaggcagtatctaagttattttttaaactttcagcctatggcaagcactttcatctaaacttgactctcaacacagattttgtgtccaaacattttacagtagaatattgggggaaagatggaccccagtggaaacatgattttttagacaactgtcattacacaggatatttgcaagatcaacgtagtacaactaaagtggctttaagcaactgtgttgggttgcatggtgttattgctacagaagatgaagagtattttatcgaacctttaaagaataccacagaggattccaagcattttagttatgaaaatggccaccctcatgttatttacaaaaagtctgcccttcaacaacgacatctgtatgatcactctcattgtggggtttcggatttcacaagaagtggcaaaccttggtggctgaatgacacatccactgtttcttattcactaccaattaacaacacacatatccaccacagacagaagagatcagtgagcattgaacggtttgtggagacattggtagtggcagacaaaatgatggtgggctaccatggccgcaaagacattgaacattacattttgagtgtgatgaatattgttgccaaactttaccgtgattccagcctaggaaacgttgtgaatattatagtggcccgcttaattgttctcacagaagatcagccaaacttggagataaaccaccatgcagacaagtccctcgatagcttctgtaaatggcagaaatccattctctcccaccaaagtgatggaaacaccattccagaaaatgggattgcccaccacgataatgcagttcttattactagatatgatatctgcacttataaaaataagccctgtggaacactgggcttggcctctgtggctggaatgtgtgagcctgaaaggagctgcagcattaatgaagacattggcctgggttcagcttttaccattgcacatgagattggtcacaattttggtatgaaccatgatggaattggaaattcttgtgggacgaaaggtcatgaagcagcaaaacttatggcagctcacattactgcgaataccaatcctttttcctggtctgcttgcagtcgagactacatcaccagctttctagattcaggccgtggtacttgccttgataatgagcctcccaagcgtgactttctttatccagctgtggccccaggtcaggtgtatgatgctgatgagcaatgtcgtttccagtatggagcaacctcccgccaatgtaaatatggggaagtgtgtagagagctctggtgtctcagcaaaagcaaccgctgtgtcaccaacagtattccagcagctgaggggacactgtgtcaaactgggaatattgaaaaagggtggtgttatcagggagattgtgttccttttggcacttggccccagagcatagatgggggctggggtccctggtcactatggggagagtgcagcaggacctgcgggggaggcgtctcctcatccctaagacactgtgacagtccagcaccttcaggaggtggaaaatattgccttggggaaaggaaacggtatcgctcctgtaacacagatccatgccctttgggttcccgagattttcgagagaaacagtgtgcagactttgacaatatgcctttccgaggaaagtattataactggaaaccctatactggaggtggggtaaaaccttgtgcattaaactgcttggctgaaggttataatttctacactgaacgtgctcctgcggtgatcgatgggacccagtgcaatgcggattcactggatatctgcatcaatggagaatgcaagcacgtaggctgtgataatattttgggatctgatgctagggaagatagatgtcgagtctgtggaggggacggaagcacatgtgatgccattgaagggttcttcaatgattcactgcccaggggaggctacatggaagtggtgcagataccaagaggctctgttcacattgaagttagagaagttgccatgtcaaagaactatattgctttaaaatctgaaggagatgattactatattaatggtgcctggactattgactggcctaggaaatttgatgttgctgggacagcttttcattacaagagaccaactgatgaaccagaatccttggaagctctaggtcctacctcagaaaatctcatcgtcatggttctgcttcaagaacagaatttgggaattaggtataagttcaatgttcccatcactcgaactggcagtggagataatgaagttggctttacatggaatcatcagccttggtcagaatgctcagctacttgtgctggaggtgtccaaagacaggaggtggtctgtaaaaggttggatgacaactccattgtccagaacaattactgtgatcctgacagtaagccacctgaaaatcaaagagcctgcaacactgagccctgcccacctgagtggttcattggggattggttggaatgcagcaagacttgtgatggtgggatgcgcacaagggcagtgctctgcatcaggaagatcggaccttctgaggaggagacgctggactacagtggttgtttaacacaccggcctgtcgaaaaagagccctgcaacaaccagtcatgtccaccacagtgggtggctttggactggtctgagtgtactccaaaatgtggtccaggattcaagcatcggattgttctgtgcaagagcagtgacctttctaagacattcccagctgcacaatgtccagaggaaagcaaacctcctgtccgcatccgctgcagtttgggccgctgccctcctcctcgctgggtcacaggagactggggccagtgttctgctcagtgtggccttggacagcagatgagaactgtgcagtgtctctcctacaccggacaggcatctagtgactgtctagaaactgttcggcctccatcaatgcagcagtgtgaaagcaaatgtgacagtacccccatttctaatactgaagagtgcaaagatgtgaataaagtggcttattgcccactggtgctgaagttcaagttctgcagtcgagcatacttcagacagatgtgttgtaagacctgccaaggacactgacccacagaaagccagagagagtgccttgtcatttcatcatggaaatgcatccatcaaagagagccacccagaggaagaggattgatgtccttgcaaatgcattaccctgtggaaaacgtaaccactggtcagccctagctgacaaaatttcaatattattttagcttctgtgaagtgggatttattgatccaaagtgctggacacggtattaggagggaatgccagattggagagatccaaacaacacagggagacttgcttactgtggagcgtttgtgttctttcgagtaaatccaatagcctgtttacctccttggaccattaagataatttttattatggacttagcaatgacactgaatccatttgtatttaaaactgtttaaaatgtagctgttatgacttggtcaactatggaagtgaagaaggttcagaattcttaagtcatagcttaaaaatatttactgtactttatctcactacaacagcaccacaatttaaattataaaacgggctttgaactataatttaaggagcaattataaatcaaaagtaatgaaagtttgtattatttttcttcattccacttaatttccttaggaataatcccctggttctgaacactgctgtgagccatatataaaactatattaaactgaacaataatgaggggcatagtttaaagcagtgcatcagttactgcagctgtgcaagtctataaactcagtgctgaaagactgtggccaacttgccattgtgcaagtaaagctgagatttccattaaaactttaagagaaaaacatttcaatttcatgcagaaaccagacctggggtatggtacagaccaaaggaccaggccctttgctgccaccacacaggatgccttagttcttatttgagtccctccaactcacttgtgtttacatcctccccagccacagcacggcttctgccctttggattgctgcacgtgtgttgagcttactgagatgataccatgcaaaagatagactggctcggtaaccaggcagacccttttgcagtttgttgacaattacgatgagttccagatgtcccttctttgatatggtagaagggcatttatttatatgagagcaaatgtgtgtgtgtgtttgcgggcgcttttaagtgtgtggatagatgagtgtgcttgcacataatgtgctatttctgtgagttttaaagtaggcaagggataataaccaaagaagaaaatttcatgaagactagacatcataaagcataattttaatagtcactcaaccaagtattttttattttttatggatactctgaatggcaattaaatgtgaaacccagtttcttgggcaagtcaaattctggaatcacatccacctaaattaaaatgactagctcgtattttccccatcttcaagtttcacatcctggtcatcaaaagactcgacagcaagacttagaatgaaaaagggtacttgtttatattaatattttttacttgaacacgtgtagcttgcagcaggttcttgatgaatgtgctttgtgtccaaaatgcctccccattgtacacaggtgtacaccatgcatgcaccaacacctaaaactcaaaactaaatggctattttgtaaggttaatactttcagttaaacagcatgtttgacttgattccatcatggtgctcttaaattacatgtcagtgcatcacatatatcatgatctaatgcagatgactaggctttttccaaaaggaagacagaccctcagacaccaaaagccaatctaaacaactcccaggtttgctgtggacaatcagcatggaatgttttctgcactctcagtcatgaccatctgtatcttgttacctgctttctctctcaacaccacagttctcaaccctgagccttccagagagagctattgatgatacaagaggaatcaccagggcccggatctaagatgcccttagaagaccagcccaagtgccgtcttagccattcagtgaagggcaaacagcccatgggtagtatggcccgagcactgaattcccttgcgccttttcaaagaacagttaacttggtgctaatgtgccctggtgaaataaataaaagatgggcagtttctgtggcattttaggcataggtttgcaatccagatctgattttctccaacataaatatcagctcatgttcttatttcaaaaagatttcttattaccgactaaaagctattttttacctcacctggaaactaccattgtgagggccatcccccaggcactgcacagcaccttggctgatgctggaagaggagggcagtcagtgtcacttctgggatgtgccccagcactgagaacaaaatgcaggcatcccccggggcagcatcagagtgcctttctagagggagccacgcacagaatgtaacaggatgaaacagtttcaagtaagccttgaattgaaacctgagtaggttaaaacaattctatttcatagcacatcacaatactgctgctactctgtagccacccccatggctacatgatgccctattcctaaataataacaatagcattgtcagtggaggctgggccaccatggcagaccttccaaaagtagtgagctacatagactacttagggaaccccagggaaactggtaccctacacctgggagcagtatctgccactgggataaagtcctactaaaaaaggaacggtaaatgtaccctaatgattaaaccccgtgagatacatatgatttccaaatagtccatttcattaggaacttttttgtttgaatgaatgtcacataggtatcctcagtaacacagaacgaaattacctttgtattattgtgattagttgttgcttattattttatactcagtaataatgtggtacactgttaatttttttgcttttgtaaattatattctaatttattgccatgtttcctaacacttgtcctacattcattctcctgcttgtaatgaaaatgaaaaaatcattgtaacacttgatggagtgaaattccacgccaggcacagaatttttttgacatagataatttagtaaaataaaaattcagcttataataatgata

SEQ ID NO: 448 - DNA, 6956 bp, Homo sapiens
  source 1..6956: mol_type = unassigned DNA
gggagtacgtgagtcgtccagtgcaatctctattgtctgaaacttactttttatcagaatttgaagatgaaaacggttaaaaaatggccatactttagtaactaatcagcctaatgctttgcttatgaaaacttttaccatcattatttttttcattttggattgagaaaatgaatccagatatagaagaaagtgcaggatgttggataaaagtggctcttaaacagtggaacatccaataactaatttgcaagaagttttaaagaaataaaattgttatgcttcgattttggtatggtattgactctttagcacataggtagccctcaaaaaaatcatccagttttctaaattatggaaattttgtggaagacgttgacctggattttgagcctcatcatggcttcatcggaatttcatagtgaccacaggctttcatacagttctcaagaggaattcctgacttatcttgaacactaccagctaactattccaataagggttgatcaaaatggagcatttctcagctttactgtgaaaaatgataaacactcaaggagaagacggagtatggaccctattgatccacagcaggcagtatctaagttattttttaaactttcagcctatggcaagcactttcatctaaacttgactctcaacacagattttgtgtccaaacattttacagtagaatattgggggaaagatggaccccagtggaaacatgattttttagacaactgtcattacacaggatatttgcaagatcaacgtagtacaactaaagtggctttaagcaactgtgttgggttgcatggtgttattgctacagaagatgaagagtattttatcgaacctttaaagaataccacagaggattccaagcattttagttatgaaaatggccaccctcatgttatttacaaaaagtctgcccttcaacaacgacatctgtatgatcactctcattgtggggtttcggatttcacaagaagtggcaaaccttggtggctgaatgacacatccactgtttcttattcactaccaattaacaacacacatatccaccacagacagaagagatcagtgagcattgaacggtttgtggagacattggtagtggcagacaaaatgatggtgggctaccatggccgcaaagacattgaacattacattttgagtgtgatgaatattgtcaggttgccaaactttaccgtgattccagcctaggaaacgttgtgaatattatagtggcccgcttaattgttctcacagaagatcagccaaacttggagataaaccaccatgcagacaagtccctcgatagcttctgtaaatggcagaaatccattctctcccaccaaagtgatggaaacaccattccagaaaatgggattgcccaccacgataatgcagttcttattactagatatgatatctgcacttataaaaataagccctgtggaacactgggcttggcctctgtggctggaatgtgtgagcctgaaaggagctgcagcattaatgaagacattggcctgggttcagcttttaccattgcacatgagattggtcacaattttggtatgaaccatgatggaattggaaattcttgtgggacgaaaggtcatgaagcagcaaaacttatggcagctcacattactgcgaataccaatcctttttcctggtctgcttgcagtcgagactacatcaccagctttctagaatttcttaaactcggtgattcaataagtggttcatgaatcgcccagaagccgtcctgattaaataataaagaacccatttccgttaaaatggacgtgttatgccagcttctgatgttttccggcgacggctttgcagttcaggccgtggtacttgccttgataatgagcctcccaagcgtgactttctttatccagctgtggccccaggtcaggtgtatgatgctgatgagcaatgtcgtttccagtatggagcaacctcccgccaatgtaaatatgggtgtgtagagagctctggtgtctcagcaaaagcaaccgctgtgtcaccaacagtattccagcagctgaggggacactgtgtcaaactgggaatattgaaaaagggtggtgttatcagggagattgtgttccttttggcacttggccccagagcatagatgggggctggggtccctggtcactatggggagagtgcagcaggacctgcgggggaggcgtctcctcatccctaagacactgtgacagtccagcgtaagtagctaaaaccttcaggaggtggaaaatattgccttggggaaaggaaacggtatcgctcctgtaacacagatccatgccctttgggttcccgagattttcgagagaaacagtgtgcagactttgacaatatgcctttccgaggaaagtattataactggaaaccctatactggaggtggggtaaaaccttgtgcattaaactgcttggctgaaggttataatttctacactgaacgtgctcctgcggtgatcgatgggacccagtgcaatgcggattcactggatatctgcatcaatggagaatgcaagcacgtaggctgtgataatattttgggatctgatgctagggaagatagatgtcgagtctgtggaggggacggaagcacatgtgatgccattgaagggttcttcaatgattcactgcccaggggaggctacatggaagtggtgcagataccaagaggctctgttcacattgaagttagagaagttgccatgtcaaagaactatattgctttaaaatctgaaggagatgattactatattaatggtgcctggactattgactggcctaggaaatttgatgttgctgggacagcttttcattacaagagaccaactgatgaaccagaatccttggaagctctaggtcctacctcagaaaatctcatcgtcatggttctgcttcaagaacagaatttgggaattaggtataagttcaatgttcccatcactcgaactggcagtggagataatgaagttggctttacatggaatcatcagccttggtcagaatgctcagctacttgtgctggaggtgtccaaagacaggaggtggtctgtaaaaggttggatgacaactccattgtccagaacaattactgtgatcctgacagtaagccacctgaaaatcaaagagcctgcaacactgagccctgcccacctgagtggttcattggggattggttggaatgcagcaagacttgtgatggtgggatgcgcacaagggcagtgctctgcatcaggaagatcggaccttctgaggaggagacgctggactacagtggttgtttaacacaccggcctgtcgaaaaagagccctgcaacaaccagtcatgtccaccacagtgggtggctttggactggtctgagtgtactccaaaatgtggtccaggattcaagcatcggattgttctgtgcaagagcagtgacctttctaagacattcccagctgcacaatgtccagaggaaagcaaacctcctgtccgcatccgctgcagtttgggccgctgccctcctcctcgctgggtcacaggagactggggccagtgttctgctcagtgtggccttggacagcagatgagaactgtgcagtgtctctcctacaccggacaggcatctagtgactgtctagaaactgttcggcctccatcaatgcagcagtgtgaaagcaaatgtgacagtacccccatttctaatactgaagagtgcaaagatgtgaataaagtggcttattgcccactggtgctgaagttcaagttctgcagtcgagcatacttcagacagatgtgttgtaagacctgccaaggacactgacccacagaaagccagagagagtgccttgtcatttcatcatggaaatgcatccatcaaagagagccacccagaggaagaggattgatgtccttgcaaatgcattaccctgtggaaaacgtaaccactggtcagccctagctgacaaaatttcaatattattttagcttctgtgaagtgggatttattgatccaaagtgctggacacggtattaggagggaatgccagattggagagatccaaacaacacagggagacttgcttactgtggagcgtttgtgttctttcgagtaaatccaatagcctgtttacctccttggaccattaagataatttttattatggacttagcaatgacactgaatccatttgtatttaaaactgtttaaaatgtagctgttatgacttggtcaactatggaagtgaagaaggttcagaattcttaagtcatagcttaaaaatatttactgtactttatctcactacaacagcaccacaatttaaattataaaacgggctttgaactataatttaaggagcaattataaatcaaaagtaatgaaagtttgtattatttttcttcattccacttaatttccttaggaataatcccctggttctgaacactgctgtgagccatatataaaactatattaaactgaacaataatgaggggcatagtttaaagcagtgcatcagttactgcagctgtgcaagtctataaactcagtgctgaaagactgtggccaacttgccattgtgcaagtaaagctgagatttccattaaaactttaagagaaaaacatttcaatttcatgcagaaaccagacctggggtatggtacagaccaaaggaccaggccctttgctgccaccacacaggatgccttagttcttatttgagtccctccaactcacttgtgtttacatcctccccagccacagcacggcttctgccctttggattgctgcacgtgtgttgagcttactgagatgataccatgcaaaagatagactggctcggtaaccaggcagacccttttgcagtttgttgacaattacgatgagttccagatgtcccttctttgatatggtagaagggcatttatttatatgagagcaaatgtgtgtgtgtgtttgcgggcgcttttaagtgtgtggatagatgagtgtgcttgcacataatgtgctatttctgtgagttttaaagtaggcaagggataataaccaaagaagaaaatttcatgaagactagacatcataaagcataattttaatagtcactcaaccaagtattttttattttttatggatactctgaatggcaattaaatgtgaaacccagtttcttgggcaagtcaaattctggaatcacatccacctaaattaaaatgactagctcgtattttccccatcttcaagtttcacatcctggtcatcaaaagactcgacagcaagacttagaatgaaaaagggtacttgtttatattaatattttttacttgaacacgtgtagcttgcagcaggttcttgatgaatgtgctttgtgtccaaaatgcctccccattgtacacaggtgtacaccatgcatgcaccaacacctaaaactcaaaactaaatggctattttgtaaggttaatactttcagttaaacagcatgtttgacttgattccatcatggtgctcttaaattacatgtcagtgcatcacatatatcatgatctaatgcagatgactaggctttttccaaaaggaagacagaccctcagacaccaaaagccaatctaaacaactcccaggtttgctgtggacaatcagcatggaatgttttctgcactctcagtcatgaccatctgtatcttgttacctgctttctctctcaacaccacagttctcaaccctgagccttccagagagagctattgatgatacaagaggaatcaccagggcccggatctaagatgcccttagaagaccagcccaagtgccgtcttagccattcagtgaagggcaaacagcccatgggtagtatggcccgagcactgaattcccttgcgccttttcaaagaacagttaacttggtgctaatgtgccctggtgaaataaataaaagatgggcagtttctgtggcattttaggcataggtttgcaatccagatctgattttctccaacataaatatcagctcatgttcttatttcaaaaagatttcttattaccgactaaaagctattttttacctcacctggaaactaccattgtgagggccatcccccaggcactgcacagcaccttggctgatgctggaagaggagggcagtcagtgtcacttctgggatgtgccccagcactgagaacaaaatgcaggcatcccccggggcagcatcagagtgcctttctagagggagccacgcacagaatgtaacaggatgaaacagtttcaagtaagccttgaattgaaacctgagtaggttaaaacaattctatttcatagcacatcacaatactgctgctactctgtagccacccccatggctacatgatgccctattcctaaataataacaatagcattgtcagtggaggctgggccaccatggcagaccttccaaaagtagtgagctacatagactacttagggaaccccagggaaactggtaccctacacctgggagcagtatctgccactgggataaagtcctactaaaaaaggaacggtaaatgtaccctaatgattaaaccccgtgagatacatatgatttccaaatagtccatttcattaggaacttttttgtttgaatgaatgtcacataggtatcctcagtaacacagaacgaaattacctttgtattattgtgattagttgttgcttattattttatactcagtaataatgtggtacactgttaatttttttgcttttgtaaattatattctaatttattgccatgtttcctaacacttgtcctacattcattctcctgcttgtaatgaaaatgaaaaaatcattgtaacacttgatggagtgaaattccacgccaggcacagaatttttttgacatagataatttagtaaaataaaaattcagcttataataatg

SEQ ID NO: 449 - DNA, 1322 bp, Homo sapiens
  source 1..1322: mol_type = unassigned DNA
atactctaggacattttgccagtaagttgtttgactatgtttaagacccctaagtttaggaaaacataaaaaatggttgcagaaggtgatcagcaagagccctgggtcagtgcaagcaataaaaaagactaactgctcaccactgtcatggaagctacaggatttaagtgtcatgagcttggtggatttaatagtttgccctgtcagtctttaaatttaaagggcttagttaaaggtgtccaaagacaggaggtggtctgtaaaaggttggatgacaactccattgtccagaacaattactgtgatcctgacagtaagccacctgaaaatcaaagagcctgcaacactgagccctgcccacctgagtggttcattggggattggttggaatgcagcaagacttgtgatggtgggatgcgcacaagggcagtgctctgcatcaggaagatcggaccttctgaggaggagacgctggactacagtggttgtttaacacaccggcctgtcgaaaaagagccctgcaacaaccagtcatgtccaccacagtgggtggctttggactggtctgagtgtactccaaaatgtggtccaggattcaagcatcggattgttctgtgcaagagcagtgacctttctaagacattcccagctgcacaatgtccagaggaaagcaaacctcctgtccgcatccgctgcagtttgggccgctgccctcctcctcgctgggtcacaggagactggggccagtgttctgctcagtgtggccttggacagcagatgagaactgtgcagtgtctctcctacaccggacaggcatctagtgactgtctagaaactgttcggcctccatcaatgcagcagtgtgaaagcaaatgtgacagtacccccatttctaatactgaagagtgcaaagatgtgaataaagtggcttattgcccactggtgctgaagttcaagttctgcagtcgagcatacttcagacagatgtgttgtaagacctgccaaggacactgacccacagaaagccagagagagtgccttgtcatttcatcatggaaatgcatccatcaaagagagccacccagaggaagaggattgatgtccttgcaaatgcattaccctgtggaaaacgtaaccactggtcagccctagctgacaaaatttcaatattattttagcttctgtgaagtgggatttattgatccaaagtgctggacacggtattaggagggaatgccagattggagagatccaaacaacacagggagacttgcttactgtggagcgtttgtgttctttcgagtaaatccaatagcctgttt

SEQ ID NO: 450 - DNA, 550 bp, Homo sapiens
  source 1..550: mol_type = unassigned DNA
ttttcatgggtgccttttccctacaatttactctattcctaatcctcctccctctagtggccaccaatgcaattctttacctctggctgggagagcaggacagttggcttccttcaaagccaacacccttgctgctgcatggactggtgtccaaagacaggaggtggtctgtaaaaggttggatgacaactccattgtccagaacaattactgtgatcctgacagtaagccacctgaaaatcaaagagcctgcaacactgagccctgcccacctgagtggttcattggggattggttggaatgcagcaagacttgtgatggtgggatgcgcacaagggcagtgctctgcatcaggaagatcggaccttctgaggaggagacgctggactacagtggttgtttaacacaccggcctgtcgaaaaagagccctgcaacaaccagtcatgtccaccacagtgggtggctttggactggtctgagtgtactccaaaatgtggtccaggattcaagcatcggattgttctgtgcaagagcagtgacctttctaag

SEQ ID NO: 451 - DNA, 2850 bp, Homo sapiens
  source 1..2850: mol_type = unassigned DNA
aatcatccagttttctaaattatggaaattttgtggaagacgttgacctggattttgagcctcatcatggcttcatcggaatttcatagtgaccacaggctttcatacagttctcaagaggaattcctgacttatcttgaacactaccagctaactattccaataagggttgatcaaaatggagcatttctcagctttactgtgaaaaatgataaacactcaaggagaagacggagtatggaccctattgatccacagcaggcagtatctaagttattttttaaactttcagcctatggcaagcactttcatctaaacttgactctcaacacagattttgtgtccaaacattttacagtagaatattgggggaaagatggaccccagtggaaacatgattttttagacaactgtcattacacaggatatttgcaagatcaacgtagtacaactaaagtggctttaagcaactgtgttgggttgcatggtgttattgctacagaagatgaagagtattttatcgaacctttaaagaataccacagaggattccaagcattttagttatgaaaatggccaccctcatgttatttacaaaaagtctgcccttcaacaacgacatctgtatgatcactctcattgtggggtttcggatttcacaagaagtggcaaaccttggtggctgaatgacacatccactgtttcttattcactaccaattaacaacacacatatccaccacagacagaagagatcagtgagcattgaacggtttgtggagacattggtagtggcagacaaaatgatggtgggctaccatggccgcaaagacattgaacattacattttgagtgtgatgaatattgttgccaaactttaccgtgattccagcctaggaaacgttgtgaatattatagtggcccgcttaattgttctcacagaagatcagccaaacttggagataaaccaccatgcagacaagtccctcgatagcttctgtaaatggcagaaatccattctctcccaccaaagtgatggaaacaccattccagaaaatgggattgcccaccacgataatgcagttcttattactagatatgatatctgcacttataaaaataagccctgtggaacactgggcttggcctctgtggctggaatgtgtgagcctgaaaggagctgcagcattaatgaagacattggcctgggttcagcttttaccattgcacatgagattggtcacaattttggtatgaaccatgatggaattggaaattcttgtgggacgaaaggtcatgaagcagcaaaacttatggcagctcacattactgcgaataccaatcctttttcctggtctgcttgcagtcgagactacatcaccagctttctagagaagtgtgtagagagctctggtgtctcagcaaaagcaaccgctgtgtcaccaacagtattccagcagctgaggggacactgtgtcaaactgggaatattgaaaaagggtggtgttatcagggagattgtgttccttttggcacttggccccagagcatagatgggggctggggtccctggtcactatggggagagtgcagcaggacctgcgggggaggcgtctcctcatccctaagacactgtgacagtccagcaccttcaggaggtggaaaatattgccttggggaaaggaaacggtatcgctcctgtaacacagatccatgccctttgggttcccgagattttcgagagaaacagtgtgcagactttgacaatatgcctttccgaggaaagtattataactggaaaccctatactggaggtggggtaaaaccttgtgcattaaactgcttggctgaaggttataatttctacactgaacgtgctcctgcggtgatcgatgggacccagtgcaatgcggattcactggatatctgcatcaatggagaatgcaagcacgtaggctgtgataatattttgggatctgatgctagggaagatagatgtcgagtctgtggaggggacggaagcacatgtgatgccattgaagggttcttcaatgattcactgcccaggggaggctacatggaagtggtgcagataccaagaggctctgttcacattgaagttagagaagttgccatgtcaaagaactatattgctttaaaatctgaaggagatgattactatattaatggtgcctggactattgactggcctaggaaatttgatgttgctgggacagcttttcattacaagagaccaactgatgaaccagaatccttggaagctctaggtcctacctcagaaaatctcatcgtcatggttctgcttcaagaacagaatttgggaattaggtataagttcaatgttcccatcactcgaactggcagtggagataatgaagttggctttacatggaatcatcagccttggtcagaatgctcagctacttgtgctggaggtaagatgcccactaggcagcccacccagagggcaagatggagaacaaaacacattctgagctatgctttgtgtttgttaaaaaagctaattggaaacatttcttgcaggtttgcttcaagctgtaatttagcaaaagaaactttgctttaattatattatattccatttgttttcaacctcatgtaatttgtgcagatttgttggtaaaatacatcttggcacaatgagtgtctctgctggtgcttctcccaagactatcttgaaggtgggctgtttgcctttcgtgaacacattcttggtaaagaacatcaaaagttttaaaaaagaaaatgagcaagaatcagacatcacagatgcaacttcttgtaatgggagatgagaatgtacggctgtg

SEQ ID NO: 452 - DNA, 2742 bp, Homo sapiens
  source 1..2742: mol_type = unassigned DNA
catccagttttctaaattatggaaattttgtggaagacgttgacctggattttgagcctcatcatggcttcatcggaatttcatagtgaccacaggctttcatacagttctcaagaggaattcctgacttatcttgaacactaccagctaactattccaataagggttgatcaaaatggagcatttctcagctttactgtgaaaaatgataaacactcaaggagaagacggagtatggaccctattgatccacagcaggcagtatctaagttattttttaaactttcagcctatggcaagcactttcatctaaacttgactctcaacacagattttgtgtccaaacattttacagtagaatattgggggaaagatggaccccagtggaaacatgattttttagacaactgtcattacacaggatatttgcaagatcaacgtagtacaactaaagtggctttaagcaactgtgttgggttgcatggtgttattgctacagaagatgaagagtattttatcgaacctttaaagaataccacagaggattccaagcattttagttatgaaaatggccaccctcatgttatttacaaaaagtctgcccttcaacaacgacatctgtatgatcactctcattgtggggtttcggatttcacaagaagtggcaaaccttggtggctgaatgacacatccactgtttcttattcactaccaattaacaacacacatatccaccacagacagaagagatcagtgagcattgaacggtttgtggagacattggtagtggcagacaaaatgatggtgggctaccatggccgcaaagacattgaacattacattttgagtgtgatgaatattgttgccaaactttaccgtgattccagcctaggaaacgttgtgaatattatagtggcccgcttaattgttctcacagaagatcagccaaacttggagataaaccaccatgcagacaagtccctcgatagcttctgtaaatggcagaaatccattctctcccaccaaagtgatggaaacaccattccagaaaatgggattgcccaccacgataatgcagttcttattactagatatgatatctgcacttataaaaataagccctgtggaacactgggcttggcctctgtggctggaatgtgtgagcctgaaaggagctgcagcattaatgaagacattggcctgggttcagcttttaccattgcacatgagattggtcacaattttggtatgaaccatgatggaattggaaattcttgtgggacgaaaggtcatgaagcagcaaaacttatggcagctcacattactgcgaataccaatcctttttcctggtctgcttgcagtcgagactacatcaccagctttctagattcaggccgtggtacttgccttgataatgagcctcccaagcgtgactttctttatccagctgtggccccaggtcaggtgtatgatgctgatgagcaatgtcgtttccagtatggagcaacctcccgccaatgtaaatatggggaagtgtgtagagagctctggtgtctcagcaaaagcaaccgctgtgtcaccaacagtattccagcagctgaggggacactgtgtcaaactgggaatattgaaaaagggtggtgttatcagggagattgtgttccttttggcacttggccccagagcatagatgggggctggggtccctggtcactatggggagagtgcagcaggacctgcgggggaggcgtctcctcatccctaagacactgtgacagtccagcaccttcaggaggtggaaaatattgccttggggaaaggaaacggtatcgctcctgtaacacagatccatgccctttgggttcccgagattttcgagagaaacagtgtgcagactttgacaatatgcctttccgaggaaagtattataactggaaaccctatactggaggtggggtaaaaccttgtgcattaaactgcttggctgaaggttataatttctacactgaacgtgctcctgcggtgatcgatgggacccagtgcaatgcggattcactggatatctgcatcaatggagaatgcaagcacgtaggctgtgataatattttgggatctgatgctagggaagatagatgtcgagtctgtggaggggacggaagcacatgtgatgccattgaagggttcttcaatgattcactgcccaggggaggctacatggaagtggtgcagataccaagaggctctgttcacattgaagttagagaagttgccatgtcaaagaactatattgctttaaaatctgaaggagatgattactatattaatggtgcctggactattgactggcctaggaaatttgatgttgctgggacagcttttcattacaagagaccaactgatgaaccagaatccttggaagctctaggtcctacctcagaaaatctcatcgtcatggttctgcttcaagaacagaatttgggaattaggtataagttcaatgttcccatcactcgaactggcagtggagataatgaagttggctttacatggaatcatcagccttggtcagaatgctcagctacttgtgctggaggtaagatgcccactaggcagcccacccagagggcaagatggagaacaaaacacattctgagctatgctttgtgtttgttaaaaaagctaattggaaacatttcttgcaggtttgcttcaagctgtaatttagcaaaagaaactttgctt

SEQ ID NO: 453 - DNA, 350 bp, Homo sapiens
  source 1..350: mol_type = unassigned DNA
cttttggcacttggccccagagcatagatgggggctggggtccctggtcactatggggagagtgcagcaggacctgcgggggaggcgtctcctcatccctaagacactgtgacagtccagcaccttcaggaggtggaaaatattgccttggggaaaggaaacggtatcgctcctgtaacacagatcagattataaggagatacagttaacataactatattatggatacatatatatttatgttttcttcattaatattgactctactagctcagaacttgaggcaattctgctgtcatactaaaatgtattttcatgctatccaagttaataaagttgtctgaatgtaa

SEQ ID NO: 454 - DNA, 1237 bp, Homo sapiens
  source 1..1237: mol_type = unassigned DNA
atggaaattttgtggaagacgttgacctggattttgagcctcatcatggcttcatcggaatttcatagtgaccacaggctttcatacagttctcaagaggaattcctgacttatcttgaacactaccagctaactattccaataagggttgatcaaaatggagcatttctcagctttactgtgaaaaatgataaacactcaaggagaagacggagtatggaccctattgatccacagcaggcagtatctaagttattttttaaactttcagcctatggcaagcactttcatctaaacttgactctcaacacagattttgtgtccaaacattttacagtagaatattgggggaaagatggaccccagtggaaacatgattttttagacaactgtcattacacaggatatttgcaagatcaacgtagtacaactaaagtggctttaagcaactgtgttgggttgcatggtgttattgctacagaagatgaagagtattttatcgaacctttaaagaataccacagaggattccaagcattttagttatgaaaatggccaccctcatgttatttacaaaaagtctgcccttcaacaacgacatctgtatgatcactctcattgtggggtttcggatttcacaagaagtggcaaaccttggtggctgaatgacacatccactgtttcttattcactaccaattaacaacacacatatccaccacagacagaagagatcagtgagcattgaacggtttgtggagacattggtagtggcagacaaaatgatggtgggctaccatggccgcaaagacattgaacattacattttgagtgtgatgaatattgtcaggttgccaaactttaccgtgattccagcctaggaaacgttgtgaatattatagtggcccgcttaattgttctcacagaagatcagccaaacttggagataaaccaccatgcagacaagtccctcgatagcttctgtaaatggcagaaatccattctctcccaccaaagtgatggaaacaccattccagaaaatgggattgcccaccacgataatgcagttcttattactaggtatggtttgttgcaagtatttttccattgattgttgtgtttattcactattgtaataaatttggttctatgtaaagcctcattcagataatgagtatagagaaagcaaaatggtaatttatttttcactactgagaaagaatgtattacactattatt

SEQ ID NO: 455 - DNA, 5490 bp, Homo sapiens
  source 1..5490: mol_type = unassigned DNA
cttttctttgcctctgcagcggccaagggggcgggccctgcagcctttgttgcccgcggaccgagcgcagccgaacggagtcggggccgggtcgccgggagctgcacgccggccgggcatgtcctgagccggacctgggaccaggcagcgaccggacgggacggacgagagcgtgcgcgcggggtcacccggcggccgcccggttcctgccatgcccggcggccccagtccccgcagccccgcgcctttgctgcgccccctcctcctgctcctctgcgctctggctcccggcgcccccggacccgcaccaggacgtgcaaccgagggccgggcggcactggacatcgtgcacccggttcgagtcgacgcggggggctccttcctgtcctacgagctgtggccccgcgcactgcgcaagcgggatgtatctgtgcgccgagacgcgcccgccttctacgagctacaataccgcgggcgcgagctgcgcttcaacctgaccgccaatcagcacctgctggcgcccggctttgtgagcgagacgcggcggcgcggcggcctgggccgcgcgcacatccgggcccacaccccggcctgccacctgcttggcgaggtgcaggaccctgagctcgagggtggcctggcggccatcagcgcctgcgacggcctgaaaggtgtgttccagctctccaacgaggactacttcattgagcccctggacagtgccccggcccggcctggccacgcccagccccatgtggtgtacaagcgtcaggccccggagaggctggcacagcggggtgattccagtgctccaagcacctgtggagtgcaagtgtacccagagctggagtctcgacgggagcgttgggagcagcggcagcagtggcggcggccacggctgaggcgtctacaccagcggtcggtcagcaaagagaagtgggtggagaccctggtagtagctgatgccaaaatggtggagtaccacggacagccgcaggttgagagctatgtgctgaccatcatgaacatggtggctggcctgtttcatgaccccagcattgggaaccccatccacatcaccattgtgcgcctggtcctgctggaagatgaggaggaggacctaaagatcacgcaccatgcagacaacaccctgaagagcttctgcaagtggcagaaaagcatcaacatgaagggggatgcccatcccctgcaccatgacactgccatcctgctcaccagaaaggacctgtgtgcagccatgaaccggccctgtgagaccctgggactgtcccatgtggcgggcatgtgccagccgcaccgcagctgcagcatcaacgaggacacgggcctgccgctggccttcactgtagcccacgagctcgggcacagttttggcattcagcatgacggaagcggcaatgactgtgagcccgttgggaaacgacctttcatcatgtctccacagctcctgtacgacgccgctcccctcacctggtcccgctgcagccgccagtatatcaccaggttccttgaccgtgggtggggcctgtgcctggacgaccctcctgccaaggacattatcgacttcccctcggtgccacctggcgtcctctatgatgtaagccaccagtgccgcctccagtacggggcctactctgccttctgcgaggacatggataatgtctgccacacactctggtgctctgtggggaccacctgtcactccaagctggatgcagctgtggacggcacccggtgtggggagaataagtggtgtctcagtggggagtgcgtacccgtgggcttccggcccgaggccgtggatggtggctggtctggctggagcgcctggtccatctgctcacggagctgtggcatgggcgtacagagcgccgagcggcagtgcacgcagcctacgcccaaatacaaaggcagatactgtgtgggtgagcgcaagcgcttccgcctctgcaacctgcaggcctgccctgctggccgcccctccttccgccacgtccagtgcagccactttgacgctatgctctacaagggccagctgcacacatgggtgcccgtggtcaatgacgtgaacccctgcgagctgcactgccggcccgcgaatgagtactttgccgagaagctgcgggacgccgtggtcgatggcaccccctgctaccaggtccgagccagccgggacctctgcatcaacggcatctgtaagaacgtgggctgtgacttcgagattgactccggtgctatggaggaccgctgtggtgtgtgccacggcaacggctccacctgccacaccgtgagcgggaccttcgaggaggccgagggcctggggtatgtggatgtggggctgatcccagcgggcgcacgcgagatccgcatccaagaggttgccgaggctgccaacttcctggcactgcggagcgaggacccggagaagtacttcctcaatggtggctggaccatccagtggaacggggactaccaggtggcagggaccaccttcacatacgcacgcaggggcaactgggagaacctcacgtccccgggtcccaccaaggagcctgtctggatccagctgctgttccaggagagcaaccctggggtgcactacgagtacaccatccacagggaggcaggtggccacgacgaggtcccgccgcccgtgttctcctggcattatgggccctggaccaagtgcacagtcacctgcggcagaggtgtgcagaggcagaatgtgtactgcttggagcggcaggcagggcccgtggacgaggagcactgtgaccccctgggccggcctgatgaccaacagaggaagtgcagcgagcagccctgccctgccaggtggtgggcaggtgagtggcagctgtgctccagctcctgcgggcctgggggcctctcccgccgggccgtgctctgcatccgcagcgtggggctggatgagcagagcgccctggagccacccgcctgtgaacaccttccccggccccctactgaaaccccttgcaaccgccatgtaccctgtccggccacctgggctgtggggaactggtctcagtgctcagtgacatgtggggagggcactcagcgccgaaatgtcctctgcaccaatgacaccggtgtcccctgtgacgaggcccagcagccagccagcgaagtcacctgctctctgccactctgtcggtggcccctgggcacactgggccctgaaggctcaggcagcggctcctccagccacgagctcttcaacgaggctgacttcatcccgcaccacctggccccacgcccttcacccgcctcatcacccaagccaggcaccatgggcaacgccattgaggaggaggctccagagctggacctgccggggcccgtgtttgtggacgacttctactacgactacaatttcatcaatttccacgaggatctgtcctacgggccctctgaggagcccgatctagacctggcggggacaggggaccggacacccccaccacacagccatcctgctgcgccctccacgggtagccccgtgcctgccacagagcctcctgcagccaaggaggagggggtactgggaccttggtccccgagcccttggcctagccaggccggccgctccccacccccaccctcagagcagacccctgggaaccctttgatcaatttcctgcctgaggaagacacccccataggggccccagatcttgggctccccagcctgtcctggcccagggtttccactgatggcctgcagacacctgccacccctgagagccaaaatgatttcccagttggcaaggacagccagagccagctgccccctccatggcgggacaggaccaatgaggttttcaaggatgatgaggaacccaagggccgaggagcaccccacctgcccccgagacccagctccacgctgccccctttgtcccctgttggcagcacccactcctctcctagtcctgacgtggcggagctgtggacaggaggcacagtggcctgggagccagctctggagggtggcctggggcctgtggacagtgaactgtggcccactgttggggtggcttctctccttcctcctcccatagcccctctgccagagatgaaggtcagggacagttccctggagccggggactccctccttcccaaccccaggaccaggctcatgggacctgcagactgtggcagtgtgggggaccttcctccccacaaccctgactggcctcgggcacatgcctgagcctgccctgaacccaggacccaagggtcagcctgagtccctcagccctgaggtgcccctgagctctaggctgctgtccacaccagcttgggacagccccgccaacagccacagagtccctgagacccagccgctggctcccagcctggctgaagcggggccccccgcggacccgttggttgtcaggaacgccggctggcaagcgggaaactggagcgagtgctctaccacctgtggcctgggtgcggtctggaggccggtgcgctgtagctccggccgggatgaggactgcgcccccgctggccggccccagcctgcccgccgctgccacctgcggccctgtgccacctggcactcaggcaactggagtaagtgctcccgcagctgcggcggaggttcctcagtgcgggacgtgcagtgtgtggacacacgggacctccggccactgcggcccttccattgtcagcccgggcctgccaagccgcctgcgcaccggccctgcggggcccagccctgcctcagctggtacacatcttcctggagggagtgctccgaggcctgtggcggtggtgagcagcagcgtctagtgacctgcccggagccaggcctctgcgaggaggcgctgagacccaacaccacccggccctgcaacacccacccctgcacgcagtgggtggtggggccctggggccagtgctcaggcccctgtggtggtggtgtccagcggcgcctggtcaagtgtgtcaacacccagacagggctgcccgaggaagacagtgaccagtgtggccacgaggcctggcctgagagctcccggccgtgtggcaccgaggattgtgagcccgtcgagcctccccgctgtgagcgggaccgcctgtccttcgggttctgcgagacgctgcgcctactgggccgctgccagctgcccaccatccgcacccagtgctgccgctcgtgctctccgcccagccacggcgccccctcccgaggccatcagcgggttgcccgccgctgactgcgccaggatgcacagaccgaccgacagacctcagtgcccaccacgggctgtggcggagctcccgccccctgcgccctaatggtgctaaccccctctcactacccagcagcaggctggggacctcctccccctcaaaaaaggtatttttttattctaacagtttgtgtaacatttattatgattttacataaatgagcatctaccattccaaagca

SEQ ID NO: 456 - DNA, 708 bp, Homo sapiens
  source 1..708: mol_type = unassigned DNA
gcccacagggcttgttttgcgcagggatacccagcgatttggctgctggtaccaggacccagccttccttccctggtgcctctgggaagcgacgaggctggtcaagatagctggtcggggtgcccacagggtcccctccccccacctctgcaccaatgacactggaacacaggccctttgtcccatgtgagcagggacggctggttgctgaggggatttgacttttcattctcacggtcttcctgggaggtgggtgaaggagcctattttgcaaataaggaaactgaggcccagaagagggcccctgtcttgctgaggtctcgctagcctaggtgggtagtttcctggctgtggaggcctggcggggatgggatctgcctggctttcacgggtctctgccccgcagtgctctaccacctgtggcctgggtgcggtctggaggccggtgcgctgtagctccggccgggatgaggactgcgcccccgctggccggccccagcctgcccgccgctgccacctgcggccctgtgccacctggcactcaggcaactggagtaagtgctcccgcagctgcggcggaggttcctcagtgcgggacgtgcagtgtgtggacacacgggacctccggccactgcggcccttccattgtcagcccgggcctgccaagccgcctgcgcaccggccctgcggggcccagccctgcctcag

SEQ ID NO: 457 - DNA, 1655 bp, Homo sapiens
  source 1..1655: mol_type = unassigned DNA
cgaccggacgggacggacgagagcgtgcgcgcggggtcacccggcggccgcccggttcctgccatgcccggcggccccagtccccgcagccccgcgcctttgctgcgccccctcctcctgctcctctgcgctctggctcccggcgcccccggacccgcaccaggacgtgcaaccgagggccgggcggcactggacatcgtgcacccggttcgagtcgacgcggggggctccttcctgtcctacgagctgtggccccgcgcactgcgcaagcgggatgtatctgtgcgccgagacgcgcccgccttctacgagctacaataccgcgggcgcgagctgcgcttcaacctgaccgccaatcagcacctgctggcgcccggctttgtgagcgagacgcggcggcgcggcggcctgggccgcgcgcacatccgggcccacaccccggcctgccacctgcttggcgaggtgcaggaccctgagctcgagggtggcctggcggccatcagcgcctgcgacggcctgaaaggtgtgttccagctctccaacgaggactacttcattgagcccctggacagtgccccggcccggcctggccacgcccagccccatgtggtgtacaagcgtcaggccccggagaggctggcacagcggggtgattccagtgctccaagcacctgtggagtgcaagtgtacccagagctggagtctcgacgggagcgttgggagcagcggcagcagtggcggcggccacggctgaggcgtctacaccagcggtcggtcagcaaagagaagtgggtggagaccctggtagtagctgatgccaaaatggtggagtaccacggacagccgcaggttgagagctatgtgctgaccatcatgaacatggtggctggcctgtttcatgaccccagcattgggaaccccatccacatcaccattgtgcgcctggtcctgctggaagatgaggaggaggacctaaagatcacgcaccatgcagacaacaccctgaagagcttctgcaagtggcagaaaagcatcaacatgaagggggatgcccatcccctgcaccatgacactgccatcctgctcaccagaaaggacctgtgtgcagccatgaaccggccctgtgagaccctgggactgtcccatgtggcgggcatgtgccagccgcaccgcagctgcagcatcaacgaggacacgggcctgccgctggccttcactgtagcccacgagctcgggcacagctcctgtacgacgccgctcccctcacctggtcccgctgcagccgccagtatatcaccaggttccttgagtgtgcagaggcagaatgtgtactgcttggagcggcaggcagggcccgtggacgaggagcactgtgaccccctgggccggcctgatgaccaacagaggaagtgcagcgagcagccctgccctgccagtgctcagtgacatgtggggagggcactcagcgccgaaatgtcctctgcaccaatgacaccggtgtcccctgtgacgaggcccagcagccagccagcgaagtcacctgctctctgccactctgtcggtggcccctgggcacactgggccctgaaggctcaggcagcggctcctccagccacgagctcttcaacgaggctgacttcatcccgcaccacctg

SEQ ID NO: 458 - DNA, 4249 bp, Homo sapiens
  source 1..4249: mol_type = unassigned DNA
gtgcaaccgagggccgggcggcactggacatcgtgcacccggttcgagtcgacgcggggggctccttcctgtcctacgagctgtggccccgcgcactgcgcaagcgggatgtatctgtgcgccgagacgcgcccgccttctacgagctacaataccgcgggcgcgagctgcgcttcaacctgaccgccaatcagcacctgctggcgcccggctttgtgagcgagacgcggcggcgcggcggcctgggccgcgcgcacatccgggcccacaccccggcctgccacctgcttggcgaggtgcaggaccctgagctcgagggtggcctggcggccatcagcgcctgcgacggcctgaaaggtgtgttccagctctccaacgaggactacttcattgagcccctggacagtgccccggcccggcctggccacgcccagccccatgtggtgtacaagcgtcaggccccggagaggctggcacagcggggtgattccagtgctccaagcacctgtggagtgcaagtgtacccagagctggagtctcgacgggagcgttgggagcagcggcagcagtggcggcggccacggctgaggcgtctacaccagcggtcggtcagcaaagagaagtgggtggagaccctggtagtagctgatgccaaaatggtggagtaccacggacagccgcaggttgagagctatgtgctgaccatcatgaacatggtggctggcctgtttcatgaccccagcattgggaaccccatccacatcaccattgtgcgcctggtcctgctggaagatgaggaggaggacctaaagatcacgcaccatgcagacaacaccctgaagagcttctgcaagtggcagaaaagcatcaacatgaagggggatgcccatcccctgcaccatgacactgccatcctgctcaccagaaaggacctgtgtgcagccatgaaccggccctgtgagaccctgggactgtcccatgtggcgggcatgtgccagccgcaccgcagctgcagcatcaacgaggacacgggcctgccgctggccttcactgtagcccacgagctcgggcacagttttggcattcagcatgacggaagcggcaatgactgtgagcccgttgggaaacgacctttcatcatgtctccacagctcctgtacgacgccgctcccctcacctggtcccgctgcagccgccagtatatcaccaggttccttgaccgtgggtggggcctgtgcctggacgaccctcctgccaaggacattatcgacttcccctcggtgccacctggcgtcctctatgatgtaagccaccagtgccgcctccagtacggggcctactctgccttctgcgaggacatggatgtgagtggggccggtgtgggtgtgggggtgtggggacccggcaggagggctcagggggcagctctcaccagcccgtggatgccagcctgggagcaacctctcctggcctgggctgcgcccctgagtgacactgtgagacgtcaagtggcctgtgggagaggccagggatgggcggccacagacccagctctgaattctgggtcaaccatggaccaactgtgacccttcggacaagtcccttcgcctctctggagctggcttataagagggaaaaggaacccctgtggagagggtctgtttatcctggcgaagatcgcctgaagtgatcttctaacaggagtgtttccagaggaggggctgggccgggagaggtgtggacagctggggaccgctctgagcagcgcagccccgggcgccccacaccaccacatggtccggggaggaaggtgggagcaggcacacaagaaggaacctctgggggtctgtgggcccctgccatgtggaggggtgcccaggggacccttggggacagggaggggggcagggtgggtggcggcactggggagggtgtgagggtatggcccatgccctcctcctcgcagaatgtctgccacacactctggtgctctgtggggaccacctgtcactccaagctggatgcagctgtggacggcacccggtgtggggagaataaggtaggggatgtccccagtcccggcagtgggtgtgtgagaggccagacttcctgctgtgaccaggccctggggtcagccccggctcacagtcttgcttgtgctcctagcagagccccacgctctctgcagcccaagcccccatctgcaaagtggaggcattggggccagggcttgattccatgattccccagggtgtcttcagctgagtcagcatgtgggctgttttactccccgctcagctcctccatgtggcctgggtcacagatgattgtgatgattgtgagggtgcctctctcaccttccatccttcccctctgtgcctttcgcagccttcccacccaccttgttctcactagggtgaggatgactgatagacttgggggtggggtggctctacctccgtctgtctcagtagtggtgtctcagtggggagtgcgtacccgtgggcttccggcccgaggccgtggatggtggctggtctggctggagcgcctggtccatctgctcacggagctgtggcatgggcgtacagagcgccgagcggcagtgcacgcagcctacgcccaaatacaaaggcagatactgtgtgggtgagcgcaagcgcttccgcctctgcaacctgcaggcctgccctgctggccgcccctccttccgccacgtccagtgcagccactttgacgctatgctctacaagggccagctgcacacatgggtgcccgtggtcaatgacgtgaacccctgcgagctgcactgccggcccgcgaatgagtactttgccgagaagctgcgggacgccgtggtcgatggcaccccctgctaccaggtccgagccagccgggacctctgcatcaacggcatctgtaagaacgtgggctgtgacttcgagattgactccggtgctatggaggaccgctgtggtgtgtgccacggcaacggctccacctgccacaccgtgagcgggaccttcgaggaggccgagggcctggggtatgtggatgtggggctgatcccagcgggcgcacgcgagatccgcatccaagaggttgccgaggctgccaacttcctggcactgcggagcgaggacccggagaagtacttcctcaatggtggctggaccatccagtggaacggggactaccaggtggcagggaccaccttcacatacgcacgcaggggcaactgggagaacctcacgtccccgggtcccaccaaggagcctgtctggatccaggtgcctgcctcccgtggcccaggcggggggagcagaggcggagtccccaggcccagcaccctccatggcaggtctcgtcctggaggagtgagccctggttcagtcacagagcctggctctgagccaggccctcctgctgcggcctctacctcagtttccccatctttaaaatggcccaatcttgtagctgcagttcacagaggtggctggggtcagctcctttaggactgggtggatggagaagacaccttgtgctcatgggcccccgcctgcccacccagctgctgttccaggagagcaaccctggggtgcactacgagtacaccatccacagggaggcaggtggccacgacgaggtcccgccgcccgtgttctcctggcattatgggccctggaccaagtgcacagtcacctgcggcagaggtgagaagtggggcaggcacagccccacctgcaggggcttagtgtctggacagggacactggcttcagctcccagctcactgctgggccaccacgggtttggaagtttgcttctctgagcctcagttctccatctgtgagatgaggctagcgattgccctgtgtcccaggcccgctgggagggtacatggatgaggcaggtgggtgctggctcgcggcgcatgttcagtgtgctccagctcttggcgttctccctccaggggacacagctccccctcgatagaccagtccagtggcccctcaccacactgacttatttccctaaactatttataaaaagtagggcaatttcattaactctgactcttcctccccaaatttccctctctccccatgctcctcagtcccctctctctctgtctcctccccactgctcctcagtctcccctctggccctctgtctcctcccatactcctcagtctccccgcatgcctctcagtctcccccatacccctcggtctccccccatacccctc

SEQ ID NO: 459 - DNA, 3178 bp, Homo sapiens
  source 1..3178: mol_type = unassigned DNA
ccggttcctgccatgcccggcggccccagtccccgcagccccgcgcctttgctgcgccccctcctcctgctcctctgcgctctggctcccggcgcccccggacccgcaccaggacgtgcaaccgagggccgggcggcactggacatcgtgcacccggttcgagtcgacgcggggggctccttcctgtcctacgagctgtggccccgcgcactgcgcaagcgggatgtatctgtgcgccgagacgcgcccgccttctacgagctacaataccgcgggcgcgagctgcgcttcaacctgaccgccaatcagcacctgctggcgcccggctttgtgagcgagacgcggcggcgcggcggcctgggccgcgcgcacatccgggcccacaccccggcctgccacctgcttggcgaggtgcaggaccctgagctcgagggtggcctggcggccatcagcgcctgcgacggcctgaaaggtgtgttccagctctccaacgaggactacttcattgagcccctggacagtgccccggcccggcctggccacgcccagccccatgtggtgtacaagcgtcaggccccggagaggctggcacagcggggtgattccagtgctccaagcacctgtggagtgcaagtgtacccagagctggagtctcgacgggagcgttgggagcagcggcagcagtggcggcggccacggctgaggcgtctacaccagcggtcggtcagcaaagagaagtgggtggagaccctggtagtagctgatgccaaaatggtggagtaccacggacagccgcaggttgagagctatgtgctgaccatcatgaacatggtggctggcctgtttcatgaccccagcattgggaaccccatccacatcaccattgtgcgcctggtcctgctggaagatgaggaggaggacctaaagatcacgcaccatgcagacaacaccctgaagagcttctgcaagtggcagaaaagcatcaacatgaagggggatgcccatcccctgcaccatgacactgccatcctgctcaccagaaaggacctgtgtgcagccatgaaccggccctgtgagaccctgggactgtcccatgtggcgggcatgtgccagccgcaccgcagctgcagcatcaacgaggacacgggcctgccgctggccttcactgtagcccacgagctcgggcacagttttggcattcagcatgacggaagcggcaatgactgtgagcccgttgggaaacgacctttcatcatgtctccacagctcctgtacgacgccgctcccctcacctggtcccgctgcagccgccagtatatcaccaggttccttgaccgtgggtggggcctgtgcctggacgaccctcctgccaaggacattatcgacttcccctcggtgccacctggcgtcctctatgatgtaagccaccagtgccgcctccagtacggggcctactctgccttctgcgaggacatggataatgtctgccacacactctggtgctctgtggggaccacctgtcactccaagctggatgcagctgtggacggcacccggtgtggggagaataagtggtgtctcagtggggagtgcgtacccgtgggcttccggcccgaggccgtggatggtggctggtctggctggagcgcctggtccatctgctcacggagctgtggcatgggcgtacagagcgccgagcggcagtgcacgcagcctacgcccaaatacaaaggcagatactgtgtgggtgagcgcaagcgcttccgcctctgcaacctgcaggcctgccctgctggccgcccctccttccgccacgtccagtgcagccactttgacgctatgctctacaagggccagctgcacacatgggtgcccgtggtcaatgacgtgaacccctgcgagctgcactgccggcccgcgaatgagtactttgccgagaagctgcgggacgccgtggtcgatggcaccccctgctaccaggtccgagccagccgggacctctgcatcaacggcatctgtaagaacgtgggctgtgacttcgagattgactccggtgctatggaggaccgctgtggtgtgtgccacggcaacggctccacctgccacaccgtgagcgggaccttcgaggaggccgagggcctggggtatgtggatgtggggctgatcccagcgggcgcacgcgagatccgcatccaagaggttgccgaggctgccaacttcctggcactgcggagcgaggacccggagaagtacttcctcaatggtggctggaccatccagtggaacggggactaccaggtggcagggaccaccttcacatacgcacgcaggggcaactgggagaacctcacgtccccgggtcccaccaaggagcctgtctggatccaggtgcctgcctcccgtggcccaggcggggggagcagaggcggagtccccaggcccagcaccctccatggcaggtctcgtcctggaggagtgagccctggttcagtcacagagcctggctctgagccaggccctcctgctgcggcctctacctcagtttccccatctttaaaatggcccaatcttgtagctgcagttcacagaggtggctggggtcagctcctttaggactgggtggatggagaagacaccttgtgctcatgggcccccgcctgcccacccagctgctgttccaggagagcaaccctggggtgcactacgagtacaccatccacagggaggcaggtggccacgacgaggtcccgccgcccgtgttctcctggcattatgggccctggaccaagtgcacagtcacctgcggcagaggtgagaagtggggcaggcacagccccacctgcaggggcttagtgtctggacagggacactggcttcagctcccagctcactgctgggccaccacgggtttggaagtttgcttctctgagcctcagttctccatctgtgagatgaggctagcgattgccctgtgtcccaggcccgctgggagggtacatggatgaggcaggtgggtgctggctcgcggcgcatgttcagtgtgctccagctcttggcgttctccctccaggggacacagctccccctcgatagaccagtccagtggcccctcaccacactgacttatttccctaaactatttataaaaagtagggcaatttcattaactctgactctt

SEQ ID NO: 460 - DNA, 7624 bp, Homo sapiens
  source 1..7624: mol_type = unassigned DNA
acagggcgcccggcgcgcctcggagcgcaagttcctcgccttctcctgcccgctcgctgggcattatgcggccaagcagccgagccccagtcctcctcctcctcctgctcctccggctcctcctgcggcccgagcggctcagctctcggcaggcggcggcgttgctcagccgagcgcagacgggaccctcgcagcgagacctcagcgactcctaaagtcaaaagttggcggcgggcgccgggctccgcgcgctctccacggccgctgcctcgcgtcgccgccgcagccaaggagggcaggagggaggggggtgggggcagcggagggaggggtgggaagcaccatgcagtttgtatcctgggccacactgctaacgctcctggtgcgggacctggccgagatggggagcccagacgccgcggcggccgtgcgcaaggacaggctgcacccgaggcaagtgaaattattagagaccctgagcgaatacgaaatcgtgtctcccatccgagtgaacgctctcggagaaccctttcccacgaacgtccacttcaaaagaacgcgacggagcattaactctgccactgacccctggcctgccttcgcctcctcctcttcctcctctacctcctcccaggcgcattaccgcctctctgccttcggccagcagtttctatttaatctcaccgccaatgccggatttatcgctccactgttcactgtcaccctcctcgggacgcccggggtgaatcagaccaagttttattccgaagaggaagcggaactcaagcactgtttctacaaaggctatgtcaataccaactccgagcacacggccgtcatcagcctctgctcaggaatgctgggcacattccggtctcatgatggggattattttattgaaccactacagtctatggatgaacaagaagatgaagaggaacaaaacaaaccccacatcatttataggcgcagcgccccccagagagagccctcaacaggaaggcatgcatgtgacacctcagaacacaaaaataggcacagtaaagacaagaagaaaaccagagcaagaaaatggggagaaaggattaacctggctggtgacgtagcagcattaaacagcggcttagcaacagaggcattttctgcttatggtaataagacggacaacacaagagaaaagaggacccacagaaggacaaaacgttttttatcctatccacggtttgtagaagtcttggtggtggcagacaacagaatggtttcataccatggagaaaaccttcaacactatattttaactttaatgtcaattgtagcctctatctataaagacccaagtattggaaatttaattaatattgttattgtgaacttaattgtgattcataatgaacaggatgggccttccatatcttttaatgctcagacaacattaaaaaacttttgccagtggcagcattcgaagaacagtccaggtggaatccatcatgatactgctgttctcttaacaagacaggatatctgcagagctcacgacaaatgtgataccttaggcctggctgaactgggaaccatttgtgatccctatagaagctgttctattagtgaagatagtggattgagtacagcttttacgatcgcccatgagctgggccatgtgtttaacatgcctcatgatgacaacaacaaatgtaaagaagaaggagttaagagtccccagcatgtcatggctccaacactgaacttctacaccaacccctggatgtggtcaaagtgtagtcgaaaatatatcactgagtttttagacactggttatggcgagtgtttgcttaacgaacctgaatccagaccctaccctttgcctgtccaactgccaggcatcctttacaacgtgaataaacaatgtgaattgatttttggaccaggttctcaggtgtgcccatatatgatgcagtgcagacggctctggtgcaataacgtcaatggagtacacaaaggctgccggactcagcacacaccctgggccgatgggacggagtgcgagcctggaaagcactgcaagtatggattttgtgttcccaaagaaatggatgtccccgtgacagatggatcctggggaagttggagtccctttggaacctgctccagaacatgtggagggggcatcaaaacagccattcgagagtgcaacagaccagaaccaaaaaatggtggaaaatactgtgtaggacgtagaatgaaatttaagtcctgcaacacggagccatgtctcaagcagaagcgagacttccgagatgaacagtgtgctcactttgacgggaagcattttaacatcaacggtctgcttcccaatgtgcgctgggtccctaaatacagtggaattctgatgaaggaccggtgcaagttgttctgcagagtggcagggaacacagcctactatcagcttcgagacagagtgatagatggaactccttgtggccaggacacaaatgatatctgtgtccagggcctttgccggcaagctggatgcgatcatgttttaaactcaaaagcccggagagataaatgtggggtttgtggtggcgataattcttcatgcaaaacagtggcaggaacatttaatacagtacattatggttacaatactgtggtccgaattccagctggtgctaccaatattgatgtgcggcagcacagtttctcaggggaaacagacgatgacaactacttagctttatcaagcagtaaaggtgaattcttgctaaatggaaactttgttgtcacaatggccaaaagggaaattcgcattgggaatgctgtggtagagtacagtgggtccgagactgccgtagaaagaattaactcaacagatcgcattgagcaagaacttttgcttcaggttttgtcggtgggaaagttgtacaaccccgatgtacgctattctttcaatattccaattgaagataaacctcagcagttttactggaacagtcatgggccatggcaagcatgcagtaaaccctgccaaggggaacggaaacgaaaacttgtttgcaccagggaatctgatcagcttactgtttctgatcaaagatgcgatcggctgccccagcctggacacattactgaaccctgtggtacagactgtgacctgaggtggcatgttgccagcaggagtgaatgtagtgcccagtgtggcttgggttaccgcacattggacatctactgtgccaaatatagcaggctggatgggaagactgagaaggttgatgatggtttttgcagcagccatcccaaaccaagcaaccgtgaaaaatgctcaggggaatgtaacacgggtggctggcgctattctgcctggactgaatgttcaaaaagctgtgacggtgggacccagaggagaagggctatttgtgtcaatacccgaaatgatgtactggatgacagcaaatgcacacatcaagagaaagttaccattcagaggtgcagtgagttcccttgtccacagtggaaatctggagactggtcagagtgcttggtcacctgtggaaaagggcataagcaccgccaggtctggtgtcagtttggtgaagatcgattaaatgatagaatgtgtgaccctgagaccaagccaacatctatgcagacttgtcagcagccggaatgtgcatcctggcaggcgggtccctggggacagtgcagtgtcacttgtggacagggataccagctaagagcagtgaaatgcatcattgggacttatatgtcagtggtagatgacaatgactgtaatgcagcaactagaccaactgatacccaggactgtgaattaccatcatgtcatcctcccccagctgccccggaaacgaggagaagcacatacagtgcaccaagaacccagtggcgatttgggtcttggaccccatgctcagccacttgtgggaaaggtacccggatgagatacgtcagctgccgagatgagaatggctctgtggctgacgagagtgcctgtgctaccctgcctagaccagtggcaaaggaagaatgttctgtgacaccctgtgggcaatggaaggccttggactggagctcttgctctgtgacctgtgggcaaggtagggcaacccggcaagtgatgtgtgtcaactacagtgaccacgtgatcgatcggagtgagtgtgaccaggattatatcccagaaactgaccaggactgttccatgtcaccatgccctcaaaggaccccagacagtggcttagctcagcaccccttccaaaatgaggactatcgtccccggagcgccagccccagccgcacccatgtgctcggtggaaaccagtggagaactggcccctggggagcatgttccagtacctgtgctggcggatcccagcggcgtgttgttgtatgtcaggatgaaaatggatacaccgcaaacgactgtgtggagagaataaaacctgatgagcaaagagcctgtgaatccggcccttgtcctcagtgggcttatggcaactggggagagtgcactaagctgtgtggtggaggcataagaacaagactggtggtctgtcagcggtccaacggtgaacggtttccagatttgagctgtgaaattcttgataaacctcccgatcgtgagcagtgtaacacacatgcttgtccacacgacgctgcatggagtactggcccttggagctcgtgttctgtctcttgtggtcgagggcataaacaacgaaatgtttactgcatggcaaaagatggaagccatttagaaagtgattactgtaagcacctggctaagccacatgggcacagaaagtgccgaggaggaagatgccccaaatggaaagctggcgcttggagtcagtgctctgtgtcctgtggccgaggcgtacagcagaggcatgtgggctgtcagatcggaacacacaaaatagccagagagaccgagtgcaacccatacaccagaccggagtcggaacgcgactgccaaggcccacggtgtcccctctacacttggagggcagaggaatggcaagaatgcaccaagacctgcggcgaaggctccaggtaccgcaaggtggtgtgtgtggatgacaacaaaaacgaggtgcatggggcacgctgtgacgtgagcaagcggccggtggaccgtgaaagctgtagtttgcaaccctgcgagtatgtctggatcacaggagaatggtcagagtgctcagtgacctgtggaaaaggctacaaacaaaggcttgtctcgtgcagcgagatttacaccgggaaggagaattatgaatacagctaccaaaccaccatcaactgcccaggcacgcagccccccagtgttcacccctgttacctgagggactgccctgtctcggccacctggagagttggcaactgggggagctgctcagtgtcttgtggtgttggagtgatgcagagatctgtgcaatgtttaaccaatgaggaccaacccagccacttatgccacactgatctgaagccagaagaacgaaaaacctgccgtaatgtctataactgtgagttaccccagaattgcaaggaggtaaaaagacttaaaggtgccagtgaagatggtgaatatttcctgatgattagaggaaagcttctgaagatattctgtgcggggatgcactctgaccaccccaaagagtacgtgacactggtgcatggagactctgagaatttctccgaggtttatgggcacaggttacacaacccaacagaatgtccctataacgggagccggcgcgatgactgccaatgtcggaaggattacacggccgctgggttttccagttttcagaaaatcagaatagacctgaccagcatgcagataatcaccactgacttacagtttgcaaggacaagcgaaggacatcccgtcccttttgccacagccggggattgctacagcgctgccaagtgcccacagggtcgttttagcatcaacctttatggaaccggcttgtctttaactgaatctgccagatggatatcacaagggaattatgctgtctctgacatcaagaagtcgccggatggtacccgagtcgtagggaaatgcggtggttactgtggaaaatgcactccatcctctggtactggcctggaggtgcgagttttatagctaaggtgctttgaagaggaagccattatggatggatgaaggatagtaatgcaatacctccaccttaatttgggtgcatgtgtatgtgtgtgtgtgtttgtgtgtgacttgtatgcttgtgtgtgtaaatgtgtgtacatatacatatatacatatctacacatacatatatacacatatatgtgtgtatgtagatatgtagactatcctaatgatgtaaagtttaatatttatgtttgaaattatttattgtgatgtaatatttttgtacgtaaaatgattctattatgactgcctttgcatgtagtaatatgacaaagtgatccttcattatcacggtacactattgtttacttttcatctgtaaatgttttattgttacttttttaaaatgaatttttttaaaacaatctagccatcatcaaggtgctataagagttgtataaaagatatttttggcatttctaggcaagtatcagccaataagtatgttagtgatatcacagattgtaccaactattaactatgttaaataagtattcagtttcatgtgatctctgggaaaaaaatatgctgccttggtgctaatattgtatgtatttaaatgatcatccgactcagaaatataaacacttttaatgaaagggaggaacggaaggacaatttccagtgcacagaatcacttggatgaaataagaccagctctttacccttatttttggatatgccttttttggaagagacttagactttatccttattgttgttagtgttgttaatattcgttgcttcagcccacggtgccttggtctctccacaatcaaatggaggatcccccaagcagcttcattacagagtgatattgggaaagtgagatcctctcaccattttgccaagatactctaaaatgacatccaagtttaccagtagaaagacacaggatgcacagaatgggcatgaccttcagctcacgagcacacctggagaaattcagaaccaggttctgaatcatcacgattgccttttgcatgaaaacatcggctggtgatgtgacttctcttcaggccatgagcctaacaccctgccggttttcatgcccgctgcagtaatggacgtttgtgtgaagaaatgaactgtggagtacaaaatgctttgagtctttccgattgctcattaattcacttttttgttacttctttccaaaatggaagtgctgaagccatggtctttctgcccctccaagctgatgaagggaagcctttgccaatggcccatggaagacacttggtttgagaaaccctgcccacttccaaagaccaaagagattaggaaaagcctggcagtattctccaactccaaacaagctctagagtgctccaggaaaagttatattcagtatatgaataagtgttattctccattattaatgtgttctgaaaatatattatgaataaatacatcaccacacccaaa

SEQ ID NO: 461 - DNA, 1811 bp, Homo sapiens
  source 1..1811: mol_type = unassigned DNA
tttctcaattatttaaaaatataaaaatcatccttagcttgcaagccatacagaaacaggtggtgggctggatttggctcacaggctgaagtttgccagcccctgctttagaccatggtgagtatgttgggcttcacatcagttcagaaggcctgtttactgtgtgtataagaacgttttcccaaaaagccagtgcaggccctgaaagcattaaccaagcaggcaggctaacatgatgcatctccttgcaggatggtacccgagtcgtagggaaatgcggtggttactgtggaaaatgcactccatcctctggtactggcctggaggtgcgagttttatagctaaggtgctttgaagaggaagccattatggatggatgaaggatagtaatgcaatacctccaccttaatttgggtgcatgtgtatgtgtgtgtgtgtttgtgtgtgacttgtatgcttgtgtgtgtaaatgtgtgtacatatacatatatacatatctacacatacatatatacacatatatgtgtgtatgtagatatgtagactatcctaatgatgtaaagtttaatatttatgtttgaaattatttattgtgatgtaatatttttgtacgtaaaatgattctattatgactgcctttgcatgtagtaatatgacaaagtgatccttcattatcacggtacactattgtttacttttcatctgtaaatgttttattgttacttttttaaaatgaatttttttaaaacaatctagccatcatcaaggtgctataagagttgtataaaagatatttttggcatttctaggcaagtatcagccaataagtatgttagtgatatcacagattgtaccaactattaactatgttaaataagtattcagtttcatgtgatctctgggaaaaaaatatgctgccttggtgctaatattgtatgtatttaaatgatcatccgactcagaaatataaacacttttaatgaaagggaggaacggaaggacaatttccagtgcacagaatcacttggatgaaataagaccagctctttacccttatttttggatatgccttttttggaagagacttagactttatccttattgttgttagtgttgttaatattcgttgcttcagcccacggtgccttggtctctccacaatcaaatggaggatcccccaagcagcttcattacagagtgatattgggaaagtgagatcctctcaccattttgccaagatactctaaaatgacatccaagtttaccagtagaaagacacaggatgcacagaatgggcatgaccttcagctcacgagcacacctggagaaattcagaaccaggttctgaatcatcacgattgccttttgcatgaaaacatcggctggtgatgtgacttctcttcaggccatgagcctaacaccctgccggttttcatgcccgctgcagtaatggacgtttgtgtgaagaaatgaactgtggagtacaaaatgctttgagtctttccgattgctcattaattcacttttttgttacttctttccaaaatggaagtgctgaagccatggtctttctgcccctccaagctgatgaagggaagcctttgccaatggcccatggaagacacttggtttgagaaaccctgcccacttccaaagaccaaagagattaggaaaagcctggcagtattctccaactccaaacaagctctagagtgctccaggaaaagttatattcagtatatgaataagtgttattctccattattaatgtgttctgaaaatatattatgaataaatacatcaccacaccc

SEQ ID NO: 462 - DNA, 7060 bp, Homo sapiens
  source 1..7060: mol_type = unassigned DNA
ggagggaggggtgggaagcaccatgcagtttgtatcctgggccacactgctaacgctcctggtgcgggacctggccgagatggggagcccagacgccgcggcggccgtgcgcaaggacaggctgcacccgaggcaagtgaaattattagagaccctgagcgaatacgaaatcgtgtctcccatccgagtgaacgctctcggagaaccctttcccacgaacgtccacttcaaaagaacgcgacggagcattaactctgccactgacccctggcctgccttcgcctcctcctcttcctcctctacctcctcccaggcgcattaccgcctctctgccttcggccagcagtttctatttaatctcaccgccaatgccggatttatcgctccactgttcactgtcaccctcctcgggacgcccggggtgaatcagaccaagttttattccgaagaggaagcggaactcaagcactgtttctacaaaggctatgtcaataccaactccgagcacacggccgtcatcagcctctgctcaggaatgctgggcacattccggtctcatgatggggattattttattgaaccactacagtctatggatgaacaagaagatgaagaggaacaaaacaaaccccacatcatttataggcgcagcgccccccagagagagccctcaacaggaaggcatgcatgtgacacctcagaacacaaaaataggcacagtaaagacaagaagaaaaccagagcaagaaaatggggagaaaggattaacctggctggtgacgtagcagcattaaacagcggcttagcaacagaggcattttctgcttatggtaataagacggacaacacaagagaaaagaggacccacagaaggacaaaacgttttttatcctatccacggtttgtagaagtcttggtggtggcagacaacagaatggtttcataccatggagaaaaccttcaacactatattttaactttaatgtcaattgatgggccttccatatcttttaatgctcagacaacattaaaaaacttttgccagtggcagcattcgaagaacagtccaggtggaatccatcatgatactgctgttctcttaacaagacaggatatctgcagagctcacgacaaatgtgataccttaggcctggctgaactgggaaccatttgtgatccctatagaagctgttctattagtgaagatagtggattgagtacagcttttacgatcgcccatgagctgggccatgtgtttaacatgcctcatgatgacaacaacaaatgtaaagaagaaggagttaagagtccccagcatgtcatggctccaacactgaacttctacaccaacccctggatgtggtcaaagtgtagtcgaaaatatatcactgagtttttagacactggttatggcgagtgtttgcttaacgaacctgaatccagaccctaccctttgcctgtccaactgccaggcatcctttacaacgtgaataaacaatgtgaattgatttttggaccaggttctcaggtgtgcccatatatgatgcagtgcagacggctctggtgcaataacgtcaatggagtacacaaaggctgccggactcagcacacaccctgggccgatgggacggagtgcgagcctggaaagcactgcaagtatggattttgtgttcccaaagaaatggatgtccccgtgacagatggatcctggggaagttggagtccctttggaacctgctccagaacatgtggagggggcatcaaaacagccattcgagagtgcaacagaccagaaccaaaaaatggtggaaaatactgtgtaggacgtagaatgaaatttaagtcctgcaacacggagccatgtctcaagcagaagcgagacttccgagatgaacagtgtgctcactttgacgggaagcattttaacatcaacggtctgcttcccaatgtgcgctgggtccctaaatacagtggaattctgatgaaggaccggtgcaagttgttctgcagagtggcagggaacacagcctactatcagcttcgagacagagtgatagatggaactccttgtggccaggacacaaatgatatctgtgtccagggcctttgccggcaagctggatgcgatcatgttttaaactcaaaagcccggagagataaatgtggggtttgtggtggcgataattcttcatgcaaaacagtggcaggaacatttaatacagtacattatggttacaatactgtggtccgaattccagctggtgctaccaatattgatgtgcggcagcacagtttctcaggggaaacagacgatgacaactacttagctttatcaagcagtaaaggtgaattcttgctaaatggaaactttgttgtcacaatggccaaaagggaaattcgcattgggaatgctgtggtagagtacagtgggtccgagactgccgtagaaagaattaactcaacagatcgcattgagcaagaacttttgcttcaggttttgtcggtgggaaagttgtacaaccccgatgtacgctattctttcaatattccaattgaagataaacctcagcagttttactggaacagtcatgggccatggcaagcatgcagtaaaccctgccaaggggaacggaaacgaaaacttgtttgcaccagggaatctgatcagcttactgtttctgatcaaagatgcgatcggctgccccagcctggacacattactgaaccctgtggtacagactgtgacctgaggtggcatgttgccagcaggagtgaatgtagtgcccagtgtggcttgggttaccgcacattggacatctactgtgccaaatatagcaggctggatgggaagactgagaaggttgatgatggtttttgcagcagccatcccaaaccaagcaaccgtgaaaaatgctcaggggaatgtaacacgggtggctggcgctattctgcctggactgaatgttcaaaaagctgtgacggtgggacccagaggagaagggctatttgtgtcaatacccgaaatgatgtactggatgacagcaaatgcacacatcaagagaaagttaccattcagaggtgcagtgagttcccttgtccacagtggaaatctggagactggtcagagtgcttggtcacctgtggaaaagggcataagcaccgccaggtctggtgtcagtttggtgaagatcgattaaatgatagaatgtgtgaccctgagaccaagccaacatctatgcagacttgtcagcagccggaatgtgcatcctggcaggcgggtccctggggacagtgcagtgtcacttgtggacagggataccagctaagagcagtgaaatgcatcattgggacttatatgtcagtggtagatgacaatgactgtaatgcagcaactagaccaactgatacccaggactgtgaattaccatcatgtcatcctcccccagctgccccggaaacgaggagaagcacatacagtgcaccaagaacccagtggcgatttgggtcttggaccccatgctcagccacttgtgggaaaggtacccggatgagatacgtcagctgccgagatgagaatggctctgtggctgacgagagtgcctgtgctaccctgcctagaccagtggcaaaggaagaatgttctgtgacaccctgtgggcaatggaaggccttggactggagctcttgctctgtgacctgtgggcaaggtagggcaacccggcaagtgatgtgtgtcaactacagtgaccacgtgatcgatcggagtgagtgtgaccaggattatatcccagaaactgaccaggactgttccatgtcaccatgccctcaaaggaccccagacagtggcttagctcagcaccccttccaaaatgaggactatcgtccccggagcgccagccccagccgcacccatgtgctcggtggaaaccagtggagaactggcccctggggagcatgttccagtacctgtgctggcggatcccagcggcgtgttgttgtatgtcaggatgaaaatggatacaccgcaaacgactgtgtggagagaataaaacctgatgagcaaagagcctgtgaatccggcccttgtcctcagtgggcttatggcaactggggagagtgcactaagctgtgtggtggaggcataagaacaagactggtggtctgtcagcggtccaacggtgaacggtttccagatttgagctgtgaaattcttgataaacctcccgatcgtgagcagtgtaacacacatgcttgtccacacgacgctgcatggagtactggcccttggagctcgtgttctgtctcttgtggtcgagggcataaacaacgaaatgtttactgcatggcaaaagatggaagccatttagaaagtgattactgtaagcacctggctaagccacatgggcacagaaagtgccgaggaggaagatgccccaaatggaaagctggcgcttggagtcagtgctctgtgtcctgtggccgaggcgtacagcagaggcatgtgggctgtcagatcggaacacacaaaatagccagagagaccgagtgcaacccatacaccagaccggagtcggaacgcgactgccaaggcccacggtgtcccctctacacttggagggcagaggaatggcaagaatgcaccaagacctgcggcgaaggctccaggtaccgcaaggtggtgtgtgtggatgacaacaaaaacgaggtgcatggggcacgctgtgacgtgagcaagcggccggtggaccgtgaaagctgtagtttgcaaccctgcgagtatgtctggatcacaggagaatggtcagagtgctcagtgacctgtggaaaaggctacaaacaaaggcttgtctcgtgcagcgagatttacaccgggaaggagaattatgaatacagctaccaaaccaccatcaactgcccaggcacgcagccccccagtgttcacccctgttacctgagggactgccctgtctcggccacctggagagttggcaactgggggagctgctcagtgtcttgtggtgttggagtgatgcagagatctgtgcaatgtttaaccaatgaggaccaacccagccacttatgccacactgatctgaagccagaagaacgaaaaacctgccgtaatgtctataactgtgagttaccccagaattgcaaggaggtaaaaagacttaaaggtgccagtgaagatggtgaatatttcctgatgattagaggaaagcttctgaagatattctgtgcggggatgcactctgaccaccccaaagagtacgtgacactggtgcatggagactctgagaatttctccgaggtttatgggcacaggttacacaacccaacagaatgtccctataacgggagccggcgcgatgactgccaatgtcggaaggattacacggccgctgggttttccagttttcagaaaatcagaatagacctgaccagcatgcagataatcaccactgacttacagtttgcaaggacaagcgaaggacatcccgtcccttttgccacagccggggattgctacagcgctgccaagtgcccacagggtcgttttagcatcaacctttatggaaccggcttgtctttaactgaatctgccagatggatatcacaagggaattatgctgtctctgacatcaagaagtcgccggatggtacccgagtcgtagggaaatgcggtggttactgtggaaaatgcactccatcctctggtactggcctggaggtgcgagttttatagctaaggtgctttgaagaggaagccattatggatggatgaaggatagtaatgcaatacctccaccttaatttgggtgcatgtgtatgtgtgtgtgtgtttgtgtgtgacttgtatgcttgtgtgtgtaaatgtgtgtacatatacatatatacatatctacacatacatatatacacatatatgtgtgtatgtagatatgtagactatcctaatgatgtaaagtttaatatttatgtttgaaattatttattgtgatgtaatatttttgtacgtaaaatgattctattatgactgcctttgcatgtagtaatatgacaaagtgatccttcattatcacggtacactattgtttacttttcatctgtaaatgttttattgttacttttttaaaatgaatttttttaaaacaatctagccatcatcaaggtgctataagagttgtataaaagatatttttggcatttctaggcaagtatcagccaataagtatgttagtgatatcacagattgtaccaactattaactatgttaaataagtattcagtttcatgtgatctctgggaaaaaaatatgctgccttggtgctaatattgtatgtatttaaatgatcatccgactcagaaatataaacacttttaatgaaagggaggaacggaaggacaatttccagtgcacagaatcacttggatgaaataagaccagctctttacccttatttttggatatgccttttttggaagagacttagactttatccttattgttgttagtgttgttaatattcgttgcttcagcccacggtgccttggtctctccacaatcaaatggaggatcccccaagcagcttcattacagagtgatattgggaaagtgagatcctctcaccattttgccaagatactctaaaatgacatccaagtttaccagtagaaagacacaggatgcacagaatgggcatgaccttcagctcacgagcacacctggagaaattcagaaccaggttctgaatcatcacgattgccttttgcatgaaaacatcggctggtgatgtgacttctcttcaggccatgagcctaacaccctgccggttttcatgcccgctgcagtaatggacgtttgtgtgaagaaatgaactgtggagtacaaaatgctttgagtctttccgattgctcattaattcacttttttgttacttctttccaaaatggaagtgctgaagccatggtctttctgcccctccaagctgatgaagggaagcctttgccaatggcccatggaagacacttggtttgagaaaccctgcccacttccaaa

SEQ ID NO: 463 - DNA, 597 bp, Homo sapiens
  source 1..597: mol_type = unassigned DNA
gccaagtgcccacagggtcgttttagcatcaacctttatggaaccggcttgtctttaactgaatctgccagatggatatcacaagggaattatgctgtctctgacatcaagaagtcgccggatggtacccgagtcgtagggaaatgcggtggttactgtggaaaatgcactccatcctctggtactggcctggaggtgcgagttttatagctaaggaaaattgcctccagctgcatccatattgctgcaaaggacatgatttcattattttttatggctgcatagtatttcatcatgtatacagaccacatttttaaaatccagtccaccattaatcggtacctaggttgattccacgtttgctattgtgaatagtgctgcaataaacatgtgctttgaagaggaagccattatggatggatgaaggatagtaatgcaatacctccaccttaatttgggtgcatgtgtatgtgtgtgtgtgtttgtgtgtgacttgtatgcttgtgtgtgtaaatgtgtgtacatatacatatatacatatctacacatacatatatacacatatatgtgtgtatgtagatatgtagactatcctaa

SEQ ID NO: 464 - DNA, 3168 bp, Homo sapiens
  source 1..3168: mol_type = unassigned DNA
gtgaatgtagtgcccagtgtggcttgggttaccgcacattggacatctactgtgccaaatatagcaggctggatgggaagactgagaaggttgatgatggtttttgcagcagccatcccaaaccaagcaaccgtgaaaaatgctcaggggaatgtaacacgggtggctggcgctattctgcctggactgaatgttcaaaaagctgtgacggtgggacccagaggagaagggctatttgtgtcaatacccgaaatgatgtactggatgacagcaaatgcacacatcaagagaaagttaccattcagaggtgcagtgagttcccttgtccacagtggaaatctggagactggtcagagtgcttggtcacctgtggaaaagggcataagcaccgccaggtctggtgtcagtttggtgaagatcgattaaatgatagaatgtgtgaccctgagaccaagccaacatctatgcagacttgtcagcagccggaatgtgcatcctggcaggcgggtccctggggacagtgcagtgtcacttgtggacagggataccagctaagagcagtgaaatgcatcattgggacttatatgtcagtggtagatgacaatgactgtaatgcagcaactagaccaactgatacccaggactgtgaattaccatcatgtcatcctcccccagctgccccggaaacgaggagaagcacatacagtgcaccaagaacccagtggcgatttgggtcttggaccccatgctcagccacttgtgggaaaggtacccggatgagatacgtcagctgccgagatgagaatggctctgtggctgacgagagtgcctgtgctaccctgcctagaccagtggcaaaggaagaatgttctgtgacaccctgtgggcaatggaaggccttggactggagctcttgctctgtgacctgtgggcaaggtagggcaacccggcaagtgatgtgtgtcaactacagtgaccacgtgatcgatcggagtgagtgtgaccaggattatatcccagaaactgaccaggactgttccatgtcaccatgccctcaaaggaccccagacagtggcttagctcagcaccccttccaaaatgaggactatcgtccccggagcgccagccccagccgcacccatgtgctcggtggaaaccagtggagaactggcccctggggagcatgttccagtacctgtgctggcggatcccagcggcgtgttgttgtatgtcaggatgaaaatggatacaccgcaaacgactgtgtggagagaataaaacctgatgagcaaagagcctgtgaatccggcccttgtcctcagtgggcttatggcaactggggagagtgcactaagctgtgtggtggaggcataagaacaagactggtggtctgtcagcggtccaacggtgaacggtttccagatttgagctgtgaaattcttgataaacctcccgatcgtgagcagtgtaacacacatgcttgtccacacgacgctgcatggagtactggcccttggagctcgtgttctgtctcttgtggtcgagggcataaacaacgaaatgtttactgcatggcaaaagatggaagccatttagaaagtgattactgtaagcacctggctaagccacatgggcacagaaagtgccgaggaggaagatgccccaaatggaaagctggcgcttggagtcagtgctctgtgtcctgtggccgaggcgtacagcagaggcatgtgggctgtcagatcggaacacacaaaatagccagagagaccgagtgcaacccatacaccagaccggagtcggaacgcgactgccaaggcccacggtgtcccctctacacttggagggcagaggaatggcaagaatgcaccaagacctgcggcgaaggctccaggtaccgcaaggtggtgtgtgtggatgacaacaaaaacgaggtgcatggggcacgctgtgacgtgagcaagcggccggtggaccgtgaaagctgtagtttgcaaccctgcgagtatgtctggatcacaggagaatggtcagagtgctcagtgacctgtggaaaaggctacaaacaaaggcttgtctcgtgcagcgagatttacaccgggaaggagaattatgaatacagctaccaaaccaccatcaactgcccaggcacgcagccccccagtgttcacccctgttacctgagggactgccctgtctcggccacctggagagttggcaactgggggagctgctcagtgtcttgtggtgttggagtgatgcagagatctgtgcaatgtttaaccaatgaggaccaacccagccacttatgccacactgatctgaagccagaagaacgaaaaacctgccgtaatgtctataactgtgagttaccccagaattgcaaggaggtaaaaagacttaaaggtgccagtgaagatggtgaatatttcctgatgattagaggaaagcttctgaagatattctgtgcggggatgcactctgaccaccccaaagagtacgtgacactggtgcatggagactctgagaatttctccgaggtttatgggcacaggttacacaacccaacagaatgtccctataacgggagccggcgcgatgactgccaatgtcggaaggattacacggccgctgggttttccagttttcagaaaatcagaatagacctgaccagcatgcagataatcaccactgacttacagtttgcaaggacaagcgaaggacatcccgtcccttttgccacagccggggattgctacagcgctgccaagtgcccacagggtcgttttagcatcaacctttatggaaccggcttgtctttaactgaatctgccagatggatatcacaagggaattatgctgtctctgacatcaagaagtcgccggatggtacccgagtcgtagggaaatgcggtggttactgtggaaaatgcactccatcctctggtactggcctggaggtgcgagttttatagctaaggaaaattgcctccagctgcatccatattgctgcaaaggacatgatttcattattttttatggctgcatagtatttcatcatgtatacagaccacatttttaaaatccagtccaccattaatcggtacctaggttgattccacgtttgctattgtgaatagtgctgcaataaacatgtgagtgcaggtg

SEQ ID NO: 465 - DNA, 5139 bp, Homo sapiens
  source 1..5139: mol_type = unassigned DNA
caactccgagcacacggccgtcatcagcctctgctcaggaatgctgggcacattccggtctcatgatggggattattttattgaaccactacagtctatggatgaacaagaagatgaagaggaacaaaacaaaccccacatcatttataggcgcagcgccccccagagagagccctcaacaggaaggcatgcatgtgacacctcagaacacaaaaataggcacagtaaagacaagaagaaaaccagagcaagaaaatggggagaaaggattaacctggctggtgacgtagcagcattaaacagcggcttagcaacagaggcattttctgcttatggtaataagacggacaacacaagagaaaagaggacccacagaaggacaaaacgttttttatcctatccacggtttgtagaagtcttggtggtggcagacaacagaatggtttcataccatggagaaaaccttcaacactatattttaactttaatgtcaattgtagcctctatctataaagacccaagtattggaaatttaattaatattgttattgtgaacttaattgtgattcataatgaacaggatgggccttccatatcttttaatgctcagacaacattaaaaaacttttgccagtggcagcattcgaagaacagtccaggtggaatccatcatgatactgctgttctcttaacaagacaggatatctgcagagctcacgacaaatgtgataccttaggcctggctgaactgggaaccatttgtgatccctatagaagctgttctattagtgaagatagtggattgagtacagcttttacgatcgcccatgagctgggccatgtgtttaacatgcctcatgatgacaacaacaaatgtaaagaagaaggagttaagagtccccagcatgtcatggctccaacactgaacttctacaccaacccctggatgtggtcaaagtgtagtcgaaaatatatcactgagtttttagacactggttatggcgagtgtttgcttaacgaacctgaatccagaccctaccctttgcctgtccaactgccaggcatcctttacaacgtgaataaacaatgtgaattgatttttggaccaggttctcaggtgtgcccatatatgatgcagtgcagacggctctggtgcaataacgtcaatggagtacacaaaggctgccggactcagcacacaccctgggccgatgggacggagtgcgagcctggaaagcactgcaagtatggattttgtgttcccaaagaaatggatgtccccgtgacagatggatcctggggaagttggagtccctttggaacctgctccagaacatgtggagggggcatcaaaacagccattcgagagtgcaacagaccagaaccaaaaaatggtggaaaatactgtgtaggacgtagaatgaaatttaagtcctgcaacacggagccatgtctcaagcagaagcgagacttccgagatgaacagtgtgctcactttgacgggaagcattttaacatcaacggtctgcttcccaatgtgcgctgggtccctaaatacagtggaattctgatgaaggaccggtgcaagttgttctgcagagtggcagggaacacagcctactatcagcttcgagacagagtgatagatggaactccttgtggccaggacacaaatgatatctgtgtccagggcctttgccggcaagctggatgcgatcatgttttaaactcaaaagcccggagagataaatgtggggtttgtggtggcgataattcttcatgcaaaacagtggcaggaacatttaatacagtacattatggttacaatactgtggtccgaattccagctggtgctaccaatattgatgtgcggcagcacagtttctcaggggaaacagacgatgacaactacttagctttatcaagcagtaaaggtgaattcttgctaaatggaaactttgttgtcacaatggccaaaagggaaattcgcattgggaatgctgtggtagagtacagtgggtccgagactgccgtagaaagaattaactcaacagatcgcattgagcaagaacttttgcttcaggttttgtcggtgggaaagttgtacaaccccgatgtacgctattctttcaatattccaattgaagataaacctcagcagttttactggaacagtcatgggccatggcaagcatgcagtaaaccctgccaaggggaacggaaacgaaaacttgtttgcaccagggaatctgatcagcttactgtttctgatcaaagatgcgatcggctgccccagcctggacacattactgaaccctgtggtacagactgtgacctgaggtggcatgttgccagcaggagtgaatgtagtgcccagtgtggcttgggttaccgcacattggacatctactgtgccaaatatagcaggctggatgggaagactgagaaggttgatgatggtttttgcagcagccatcccaaaccaagcaaccgtgaaaaatgctcaggggaatgtaacacgggtggctggcgctattctgcctggactgaatgttcaaaaagctgtgacggtgggacccagaggagaagggctatttgtgtcaatacccgaaatgatgtactggatgacagcaaatgcacacatcaagagaaagttaccattcagaggtgcagtgagttcccttgtccacagtggaaatctggagactggtcagagtgcttggtcacctgtggaaaagggcataagcaccgccaggtctggtgtcagtttggtgaagatcgattaaatgatagaatgtgtgaccctgagaccaagccaacatctatgcagacttgtcagcagccggaatgtgcatcctggcaggcgggtccctggggacagtgcagtgtcacttgtggacagggataccagctaagagcagtgaaatgcatcattgggacttatatgtcagtggtagatgacaatgactgtaatgcagcaactagaccaactgatacccaggactgtgaattaccatcatgtcatcctcccccagctgccccggaaacgaggagaagcacatacagtgcaccaagaacccagtggcgatttgggtcttggaccccatgctcagccacttgtgggaaaggtacccggatgagatacgtcagctgccgagatgagaatggctctgtggctgacgagagtgcctgtgctaccctgcctagaccagtggcaaaggaagaatgttctgtgacaccctgtgggcaatggaaggccttggactggagctcttgctctgtgacctgtgggcaaggtagggcaacccggcaagtgatgtgtgtcaactacagtgaccacgtgatcgatcggagtgagtgtgaccaggattatatcccagaaactgaccaggactgttccatgtcaccatgccctcaaaggaccccagacagtggcttagctcagcaccccttccaaaatgaggactatcgtccccggagcgccagccccagccgcacccatgtgctcggtggaaaccagtggagaactggcccctggggagcatgttccagtacctgtgctggcggatcccagcggcgtgttgttgtatgtcaggatgaaaatggatacaccgcaaacgactgtgtggagagaataaaacctgatgagcaaagagcctgtgaatccggcccttgtcctcagtgggcttatggcaactggggagagtgcactaagctgtgtggtggaggcataagaacaagactggtggtctgtcagcggtccaacggtgaacggtttccagatttgagctgtgaaattcttgataaacctcccgatcgtgagcagtgtaacacacatgcttgtccacacgacgctgcatggagtactggcccttggagctcgtgttctgtctcttgtggtcgagggcataaacaacgaaatgtttactgcatggcaaaagatggaagccatttagaaagtgattactgtaagcacctggctaagccacatgggcacagaaagtgccgaggaggaagatgccccaaatggaaagctggcgcttggagtcagtgctctgtgtcctgtggccgaggcgtacagcagaggcatgtgggctgtcagatcggaacacacaaaatagccagagagaccgagtgcaacccatacaccagaccggagtcggaacgcgactgccaaggcccacggtgtcccctctacacttggagggcagaggaatggcaagaatgcaccaagacctgcggcgaaggctccaggtaccgcaaggtggtgtgtgtggatgacaacaaaaacgaggtgcatggggcacgctgtgacgtgagcaagcggccggtggaccgtgaaagctgtagtttgcaaccctgcgagtatgtctggatcacaggagaatggtcagaggtaccgtcctgggaactgtaaccatcgtcagctcagccatggcctgagagtggcagagggatgagtggagggatgagtgcaggaatgtgggagacttgaggctacccgcccgatttgccactgtgaactgtgtgttttctgacaagtcctcagctttcccaagctagaattccttgtatgcaaagcgggagagatgtaagagatggtctctaagtcccttcaggtctacattctgtgattcaccttgatgtcctattggcataaagaagaaattattacaggggctgcaaactcataggatgctgtgaggtgcctgaagacagttaagtataagaaaatactgtagtgccagggatacaacaaggagagatggcaactgtgacaaactagcacatgctgtgtgaagggagcagaatctctttcactccagctgtggccatgcagaaatgtggtctagcgttaccagacctgatttttcaagagaggctaaaaatctggactagtatgtgagatttcctaacttgaaaatgggggctgaaatttttggttttaaaacattgtaaggggcaaacaaacccctttcatgaaccagatgtgttgtgcctgtttaacaaacagcttcagaggaagaaaataattttctataatatccgaagtatctcaagtaccattttttcatatatcttcctgtgcacagtgcttatctagaccctttttaatggtaataaaccagtagtaatcat

SEQ ID NO: 466 - DNA, 3662 bp, Homo sapiens
  source 1..3662: mol_type = unassigned DNA
gggaagcaccatgcagtttgtatcctgggccacactgctaacgctcctggtgcgggacctggccgagatggggagcccagacgccgcggcggccgtgcgcaaggacaggctgcacccgaggcaagtgaaattattagagaccctgagcgaatacgaaatcgtgtctcccatccgagtgaacgctctcggagaaccctttcccacgaacgtccacttcaaaagaacgcgacggagcattaactctgccactgacccctggcctgccttcgcctcctcctcttcctcctctacctcctcccaggcgcattaccgcctctctgccttcggccagcagtttctatttaatctcaccgccaatgccggatttatcgctccactgttcactgtcaccctcctcgggacgcccggggtgaatcagaccaagttttattccgaagaggaagcggaactcaagcactgtttctacaaaggctatgtcaataccaactccgagcacacggccgtcatcagcctctgctcaggaatgctgggcacattccggtctcatgatggggattattttattgaaccactacagtctatggatgaacaagaagatgaagaggaacaaaacaaaccccacatcatttataggcgcagcgccccccagagagagccctcaacaggaaggcatgcatgtgacacctcagaacacaaaaataggcacagtaaagacaagaagaaaaccagagcaagaaaatggggagaaaggattaacctggctggtgacgtagcagcattaaacagcggcttagcaacagaggcattttctgcttatggtaataagacggacaacacaagagaaaagaggacccacagaaggacaaaacgttttttatcctatccacggtttgtagaagtcttggtggtggcagacaacagaatggtttcataccatggagaaaaccttcaacactatattttaactttaatgtcaattgtagcctctatctataaagacccaagtattggaaatttaattaatattgttattgtgaacttaattgtgattcataatgaacaggatgggccttccatatcttttaatgctcagacaacattaaaaaacttttgccagtggcagcattcgaagaacagtccaggtggaatccatcatgatactgctgttctcttaacaagacaggatatctgcagagctcacgacaaatgtgataccttaggcctggctgaactgggaaccatttgtgatccctatagaagctgttctattagtgaagatagtggattgagtacagcttttacgatcgcccatgagctgggccatgtgtttaacatgcctcatgatgacaacaacaaatgtaaagaagaaggagttaagagtccccagcatgtcatggctccaacactgaacttctacaccaacccctggatgtggtcaaagtgtagtcgaaaatatatcactgagtttttagacactggttatggcgagtgtttgcttaacgaacctgaatccagaccctaccctttgcctgtccaactgccaggcatcctttacaacgtgaataaacaatgtgaattgatttttggaccaggttctcaggtgtgcccatatatgatgcagtgcagacggctctggtgcaataacgtcaatggagtacacaaaggctgccggactcagcacacaccctgggccgatgggacggagtgcgagcctggaaagcactgcaagtatggattttgtgttcccaaagaaatggatgtccccgtgacagatggatcctggggaagttggagtccctttggaacctgctccagaacatgtggagggggcatcaaaacagccattcgagagtgcaacagaccagaaccaaaaaatggtggaaaatactgtgtaggacgtagaatgaaatttaagtcctgcaacacggagccatgtctcaagcagaagcgagacttccgagatgaacagtgtgctcactttgacgggaagcattttaacatcaacggtctgcttcccaatgtgcgctgggtccctaaatacagtggaattctgatgaaggaccggtgcaagttgttctgcagagtggcagggaacacagcctactatcagcttcgagacagagtgatagatggaactccttgtggccaggacacaaatgatatctgtgtccagggcctttgccggcaagctggatgcgatcatgttttaaactcaaaagcccggagagataaatgtggggtttgtggtggcgataattcttcatgcaaaacagtggcaggaacatttaatacagtacattatggttacaatactgtggtccgaattccagctggtgctaccaatattgatgtgcggcagcacagtttctcaggggaaacagacgatgacaactacttagctttatcaagcagtaaaggtgaattcttgctaaatggaaactttgttgtcacaatggccaaaagggaaattcgcattgggaatgctgtggtagagtacagtgggtccgagactgccgtagaaagaattaactcaacagatcgcattgagcaagaacttttgcttcaggttttgtcggtgggaaagttgtacaaccccgatgtacgctattctttcaatattccaattgaagataaacctcagcagttttactggaacagtcatgggccatggcaagcatgcagtaaaccctgccaaggggaacggaaacgaaaacttgtttgcaccagggaatctgatcagcttactgtttctgatcaaagatgcgatcggctgccccagcctggacacattactgaaccctgtggtacagactgtgacctgaggtggcatgttgccagcaggagtgaatgtagtgcccagtgtggcttgggttaccgcacattggacatctactgtgccaaatatagcaggctggatgggaagactgagaaggttgatgatggtttttgcagcagccatcccaaaccaagcaaccgtgaaaaatgctcaggggaatgtaacacgggtggctggcgctattctgcctggactgaatgttcaaaaagctgtgacggtgggacccagaggagaagggctatttgtgtcaatacccgaaatgatgtactggatgacagcaaatgcacacatcaagagaaagttaccattcagaggtgcagtgagttcccttgtccacagtggaaatctggagactggtcagaggtaagatgggagggctgttatttcccctaggtcatctcttacattctagttctggtgctctctatctgtttaagacaaacccttgtgcacctttctcccacctctccctttctcccttgtctcccttgagaaaacaactccagttctctgcctgcaccatgactgtcgtactggatgtaactagtctaccagtgacctcagggcactttgggcttggctagatcactcactgttgtagcttctgttgtgattttgaagttgcagtccatcaccttccctcctctttgagccctagctaagtcactgaaaggaaatcatggatttattaatcataaagctatactagctcacatctgaagtcaacatgaagtttcctacttccttgtctttgaaataagagaattagaccccagggagtgacctctctgacttacccatccaactgcaagaaaaaaaaataaaa

SEQ ID NO: 467 - DNA, 2871 bp, Homo sapiens
  source 1..2871: mol_type = unassigned DNA
cggcgcgcctcggagcgcaagttcctcgccttctcctgcccgctcgctgggcattatgcggccaagcagccgagccccagtcctcctcctcctcctgctcctccggctcctcctgcggcccgagcggctcagctctcggcaggcggcggcgttgctcagccgagcgcagacgggaccctcgcagcgagacctcagcgactcctaaagtcaaaagttggcggcgggcgccgggctccgcgcgctctccacggccgctgcctcgcgtcgccgccgcagccaaggagggcaggagggaggggggtgggggcagcggagggaggggtgggaagcaccatgcagtttgtatcctgggccacactgctaacgctcctggtgcgggacctggccgagatggggagcccagacgccgcggcggccgtgcgcaaggacaggctgcacccgaggcaagtgaaattattagagaccctgagcgaatacgaaatcgtgtctcccatccgagtgaacgctctcggagaaccctttcccacgaacgtccacttcaaaagaacgcgacggagcattaactctgccactgacccctggcctgccttcgcctcctcctcttcctcctctacctcctcccaggcgcattaccgcctctctgccttcggccagcagtttctatttaatctcaccgccaatgccggatttatcgctccactgttcactgtcaccctcctcgggacgcccggggtgaatcagaccaagttttattccgaagaggaagcggaactcaagcactgtttctacaaaggctatgtcaataccaactccgagcacacggccgtcatcagcctctgctcaggaatgctgggcacattccggtctcatgatggggattattttattgaaccactacagtctatggatgaacaagaagatgaagaggaacaaaacaaaccccacatcatttataggcgcagcgccccccagagagagccctcaacaggaaggcatgcatgtgacacctcagaacacaaaaataggcacagtaaagacaagaagaaaaccagagcaagaaaatggggagaaaggattaacctggctggtgacgtagcagcattaaacagcggcttagcaacagaggcattttctgcttatggtaataagacggacaacacaagagaaaagaggacccacagaaggacaaaacgttttttatcctatccacggtttgtagaagtcttggtggtggcagacaacagaatggtttcataccatggagaaaaccttcaacactatattttaactttaatgtcaattgtagcctctatctataaagacccaagtattggaaatttaattaatattgttattgtgaacttaattgtgattcataatgaacaggatgggccttccatatcttttaatgctcagacaacattaaaaaacttttgccagtggcagcattcgaagaacagtccaggtggaatccatcatgatactgctgttctcttaacaagacaggatatctgcagagctcacgacaaatgtgataccttaggcctggctgaactgggaaccatttgtgatccctatagaagctgttctattagtgaagatagtggattgagtacagcttttacgatcgcccatgagctgggccatgtgtttaacatgcctcatgatgacaacaacaaatgtaaagaagaaggagttaagagtccccagcatgtcatggctccaacactgaacttctacaccaacccctggatgtggtcaaagtgtagtcgaaaatatatcactgagtttttagagtaagacttgaacattcttttagcacaaacttctagtgcctggcctacatgtagtgaactaattgtgggaaagacaatatgaagtcaaacattccttttgagttatttttgttgacattccttggagaaggcaaaaaaaaaaaaaaaaagctctctgacatctgtgtagttcatatccttgacagagtttagaagattacagactgagctaaagaaaaggttggagtcttaaagaggatgtggaaatgttgcttcattttgggtaaagttttgagatttgttcagacattgggagagggactatgaatgtgatttcttaatgaaggccacaggtatttatgcacttctaatttagtaatttgggcctgaaaaggggtggggtagtgagatgatcccaaagcagattccgtggatgagtggaaattacagcagctcccacattgttgagttgaggacattctctctctgcgtcactcttcctctccccctcttccctctcccttttctcttttttcccatttcctttcttttcttgttttgttttttaagcttcctgctaggctgctcaaagatccaattacattatacaatgcccctgtgtcacagatttattgctcttctcgctcagaagtatgaaaggttaagtgattgtcccagagtcactgggtgtatatttctgcaaccacggggaagaggaggctttatcaatcagaactcaacgggtgtgaattttccgggagaggtgtttgctgaaaacggaaagaaccagagggttgctgttgttctttttaaccagatggtgtaaggtgttttctttctatgagtcattgattcgctcacgcatcccttcagcaaacatttactaatcacctgttgtcatggacagggccctgtgctttgatgaaaaagacactatctttgcccttagaaagcttacagtctattgggaaagatagtcaaacataaacagataattgctgtgaagtgtgatcaacgttgtaacaggtgtatatttcctactggctatgttgtattcattgcatgtggttctacaaagtaaacagcaaaaatgtaa

SEQ ID NO: 468 - DNA, 476 bp, Homo sapiens
  source 1..476: mol_type = unassigned DNA
aaagtatttacttgtattgacatttactctttgatgtcatcaaggcctaagtctgctttgctttcagacaggatatctgcagagctcacgacaaatgtgataccttaggcctggctgaactgggaaccatttgtgatccctatagaagctgttctattagtgaagatagtggattgagtacagcttttacgatcgcccatgagctgggccatgtgtttaacatgcctcatgatgacaacaacaaatgtaaagaagaaggagttaagagtccccagcatgtcatggctccaacactgaacttctacaccaacccctggatgtggtcaaagtgtagtcgaaaatatatcactgagtttttagagtaagacttgaacattcttttagcacaaacttctagtgcctggcctacatgtagtgaactaattgtgggaaagacaatatgaagtcaaacattccttttgagttatttttgttga

SEQ ID NO: 469 - DNA, 579 bp, Homo sapiens
  source 1..579: mol_type = unassigned DNA
atgaagagactttacaaaaagtgttgttgagtgaatgaaaaattcacaaccacaaaatgcatatgttgcaagaaacgtaaaaaagaggtggagcccaacgtaagacgtgacttgcttattgcttacacggagttcacaattaactttgaaaaatttatctcggttgcaggtagcctctatctataaagacccaagtattggaaatttaattaatattgttattgtgaacttaattgtgattcataatgaacaggtaataaagtttttttcttttttcttctatctgtatccgaaatggcatatctaattgggatcggtacaacagattaaccataattcttctctgtatttaggatgggccttccatatcttttaatgctcagacaacattaaaaaacttttgccagtggcagcattcgaagaacagtccaggtggaatccatcatgatactgctgttctcttaacaagacaggatatctgcagagctcacgacaaatgtgataccttaggcctggctgaactgggaaccatttgtgatccctatagaagctgttctattagtgaagatagtggattga

SEQ ID NO: 470 - DNA, 7336 bp, Homo sapiens
  source 1..7336: mol_type = unassigned DNA
cccagccccatttaacttcgcggcggcggcggcgactgcggcgccgcgggctggaggccggcgtcggggaaggtcctggtgccggattccgcacgaggtgttgacgggcggcttctgccaacttctccccagcgcgcgccgagcccgcgcggccccggggctgcacgtcccagatacttctgcggcgcaaggctacaactgagacccggaggagactagaccccatggcttcctggacgagcccctggtgggtgctgatagggatggtcttcatgcactctcccctcccgcagaccacagctgagaaatctcctggagcctatttccttcccgagtttgcactttctcctcagggaagttttctggaagacacaacaggggagcagttcctcacttatcgctatgatgaccagacctcaagaaacactcgttcagatgaagacaaagatggcaactgggatgcttggggcgactggagtgactgctcccggacctgtgggggaggagcatcatattctctgcggagatgtttgactggaaggaattgtgaagggcagaacattcggtacaagacatgcagcaatcatgactgccctccagatgcagaagatttcagagcccagcagtgctcagcctacaatgatgtccagtatcaggggcattactatgaatggcttccacgatataatgatcctgctgccccgtgtgcactcaagtgtcatgcacaaggacaaaacttggtggtggagctggcacctaaggtactggatggaactcgttgcaacacggactccttggacatgtgtatcagtggcatctgtcaggcagtgggctgcgatcggcaactgggaagcaatgccaaggaggacaactgtggagtctgtgccggcgatggctccacctgcaggcttgtacggggacaatcaaagtcacacgtttctcctgaaaaaagagaagaaaatgtaattgctgttcctttgggaagtcgaagtgtgagaattacagtgaaaggacctgcccacctctttattgaatcaaaaacacttcaaggaagcaaaggagaacacagctttaacagccccggcgtctttctcgtagaaaacacaacagtggaatttcagaggggctccgagaggcaaacttttaagattccaggacctctgatggctgatttcatcttcaagaccaggtacactgcagccaaagacagcgtggttcagttcttcttttaccagcccatcagtcatcagtggagacaaactgacttctttccctgcactgtgacgtgtggaggaggttatcagctcaattctgctgaatgtgtggatatccgcttgaagagggtagttcctgaccattattgtcactactaccctgaaaatgtaaaaccaaaaccaaaactgaaggaatgcagcatggatccctgcccatcaagtgatggatttaaagagataatgccctatgaccacttccaacctcttcctcgctgggaacataatccttggactgcatgttccgtgtcctgtggaggagggattcagagacggagctttgtgtgtgtagaggaatccatgcatggagagatattgcaggtggaagaatggaagtgcatgtacgcacccaaacccaaggttatgcaaacttgtaatctgtttgattgccccaagtggattgccatggagtggtctcagtgcacagtgacttgtggccgagggttacggtaccgggttgttctgtgtattaaccaccgcggagagcatgttgggggctgcaatccacaactgaagttacacatcaaagaagaatgtgtcattcccatcccgtgttataaaccaaaagaaaaaagtccagtggaagcaaaattgccttggctgaaacaagcacaagaactagaagagaccagaatagcaacagaagaaccaacgttcattccagaaccctggtcagcctgcagtaccacgtgtgggccgggtgtgcaggtccgtgaggtgaagtgccgtgtgctcctcacattcacgcagactgagactgagctgcccgaggaagagtgtgaaggccccaagctgcccaccgaacggccctgcctcctggaagcatgtgatgagagcccggcctcccgagagctagacatccctctccctgaggacagtgagacgacttacgactgggagtacgctgggttcaccccttgcacagcaacatgcgtgggaggccatcaagaagccatagcagtgtgcttacatatccagacccagcagacagtcaatgacagcttgtgtgatatggtccaccgtcctccagccatgagccaggcctgtaacacagagccctgtccccccaggtggcatgtgggctcttgggggccctgctcagctacctgtggagttggaattcagacccgagatgtgtactgcctgcacccaggggagacccctgcccctcctgaggagtgccgagatgaaaagccccatgctttacaagcatgcaatcagtttgactgccctcctggctggcacattgaagaatggcagcagtgttccaggacttgtggcgggggaactcagaacagaagagtcacctgtcggcagctgctaacggatggcagctttttgaatctctcagatgaattgtgccaaggacccaaggcatcgtctcacaagtcctgtgccaggacagactgtcctccacatttagctgtgggagactggtcgaagtgttctgtcagttgtggtgttggaatccagagaagaaagcaggtgtgtcaaaggctggcagccaaaggtcggcgcatccccctcagtgagatgatgtgcagggatctaccagggctccctcttgtaagatcttgccagatgcctgagtgcagtaaaatcaaatcagagatgaagacaaaacttggtgagcagggtccgcagatcctcagtgtccagagagtctacattcagacaagggaagagaagcgtattaacctgaccattggtagcagagcctatttgctgcccaacacatccgtgattattaagtgccccgtgcgacgattccagaaatctctgatccagtgggagaaggatggccgttgcctgcagaactccaaacggcttggcatcaccaagtcaggctcactaaaaatccatggtcttgctgcccccgacatcggcgtgtaccggtgcattgcaggctctgcacaggaaacagttgtgctcaagctcattggtactgacaaccggctcatcgcacgcccagccctcagggagcctatgagggaatatcctgggatggaccacagcgaagccaatagtttgggagtcacatggcacaaaatgaggcaaatgtggaataacaaaaatgacctttatctggatgatgaccacattagtaaccagcctttcttgagagctctgttaggccactgcagcaattctgcaggaagcaccaactcctgggagttgaagaataagcagtttgaagcagcagttaaacaaggagcatatagcatggatacagcccagtttgatgagctgataagaaacatgagtcagctcatggaaaccggagaggtcagcgatgatcttgcgtcccagctgatatatcagctggtggccgaattagccaaggcacagccaacacacatgcagtggcggggcatccaggaagagacacctcctgctgctcagctcagaggggaaacagggagtgtgtcccaaagctcgcatgcaaaaaactcaggcaagctgacattcaagccgaaaggacctgttctcatgaggcaaagccaacctccctcaatttcatttaataaaacaataaattccaggattggaaatacagtatacattacaaaaaggacagaggtcatcaatatactgtgtgaccttattacccccagtgaggccacatatacatggaccaaggatggaaccttgttacagccctcagtaaaaataattttggatggaactgggaagatacagatacagaatcctacaaggaaagaacaaggcatatatgaatgttctgtagctaatcatcttggttcagatgtggaaagttcttctgtgctgtatgcagaggcacctgtcatcttgtctgttgaaagaaatatcaccaaaccagagcacaaccatctgtctgttgtggttggaggcatcgtggaggcagcccttggagcaaacgtgacaatccgatgtcctgtaaaaggtgtccctcagcctaatataacttggttgaagagaggaggatctctgagtggcaatgtttccttgcttttcaatggatccctgttgttgcagaatgtttcccttgaaaatgaaggaacctacgtctgcatagccaccaatgctcttggaaaggcagtggcaacatctgtactccacttgctggaacgaagatggccagagagtagaatcgtatttctgcaaggacataaaaagtacattctccaggcaaccaacactagaaccaacagcaatgacccaacaggagaacccccgcctcaagagcctttttgggagcctggtaactggtcacattgttctgccacctgtggtcatttgggagcccgcattcagagaccccagtgtgtgatggccaatgggcaggaagtgagtgaggccctgtgtgatcacctccagaagccactggctgggtttgagccctgtaacatccgggactgcccagcgaggtggttcacaagtgtgtggtcacagtgctctgtgtcttgcggtgaaggataccacagtcggcaggtgacgtgcaagcggacaaaagccaatggaactgtgcaggtggtgtctccaagagcatgtgcccctaaagaccggcctctgggaagaaaaccatgttttggtcatccatgtgttcagtgggaaccagggaaccggtgtcctggacgttgcatgggccgtgctgtgaggatgcagcagcgtcacacagcttgtcaacacaacagctctgactccaactgtgatgacagaaagagacccaccttaagaaggaactgcacatcaggggcctgtgatgtgtgttggcacacaggcccttggaagccctgtacagcagcctgtggcaggggtttccagtctcggaaagtcgactgtatccacacaaggagttgcaaacctgtggccaagagacactgtgtacagaaaaagaaaccaatttcctggcggcactgtcttgggccctcctgtgatagagactgcacagacacaactcactactgtatgtttgtaaaacatcttaatttgtgttctctagaccgctacaaacaaaggtgctgccagtcatgtcaagagggataaacctttggaggggtcatgatgctgctgtgaagataaaagtagaatataaaagctcttttccccatgtcgctgattcaaaaacatgtatttcttaaaagactagattctatggatcaaacagaggttgatgcaaaaacaccactgttaaggtgtaaagtgaaattttccaatggtagttttatattccaattttttaaaatgatgtattcaaggatgaacaaaatactatagcatgcatgccactgcacttgggacctcatcatgtcagttgaatcgagaaatcaccaagattatgagtgcatcctcacgtgctgcctctttcctgtgatatgtagactagcacagagtggtacatcctaaaaacttgggaaacacagcaacccatgacttcctcttctctcaagttgcaggttttcaacagttttataaggtatttgcattttagaagctctggccagtagttgttaagatgttggcattaatggcattttcatagatccttggtttagtctgtgaaaaagaaaccatctctctggataggctgtcacactgactgacctaagggttcatggaagcatggcatcttgtccttgcttttagaacacccatggaagaaaacacagagtagatattgctgtcatttatacaactacagaaatttatctatgacctaatgaggcatctcggaagtcaaagaagagggaaagttaaccttttctactgatttcgtagtatattcagagctttcttttaagagctgtgaatgaaactttttctaagcactattctattgcacacaaacagaaaaccaaagccttattagacctaatttatgcataaagtagtattcctgagaactttattttggaaaatttataagaaagtaatccaaataagaaacacgatagttgaaaataatttttatagtaaataattgttttgggctgatttttcagtaaatccaaagtgacttaggttagaagttacactaaggaccaggggttggaatcagaatttagtttaagatttgaggaaaagggtaagggttagtttcagttttaggattagagctagaattgggttaggtgagaaagaaagttaaggttaaggctagagttgtctttaagggttagggttaggaccaggttaggtcagggttggattgggtttagattggggccagtgctggtgttagtgatagtgtcaggatggaggttaggtttggagtaagcgttgttgctgaagtgagttcaggctagcattaaattgtaagttctgaagctgatttggttatggggtctttcccctgtatactaccagttgtgtctttagatggcacacaagtccaaataagtggtcatacttctttattcagggtctcagctgcctgtacacctgctgcctacatcttcttggcaacaaagttacctgccacaggctctgctgagcctagttcctggtcagtaataactgaacagtgcattttggctttggatgtgtctgtggacaagcttgctgagtttctctaccatattctgagcacacggtctcttttgttctaacttcagcttcactgacactgggttgagcactactgtatgtggagggtttggtgattgggaatggatgggggacagtgaggaggacacaccagcccattagttgttaatcatcaatcacatctgattgttgaaggttattaaattaaaagaaagatcatttgtaacatactctttgtatatatttattatatgaaaggtgcaatattttattttgtacagtatgtaataaagacatgggacatatatttttcttattaacaaaatttcatattaaattgcttcactttgtatttaaagttaaaagttactatttttcatttgctattgtactttcattgttgtcattcaattgacattcctgtgtactgtattttactactgtttttataacatgagagttaatgtttctgtttcatgatccttatgtaattcagaaataaatttactttgattattcagtggcatccttataaa

SEQ ID NO: 471 - DNA, 6873 bp, Homo sapiens
  source 1..6873: mol_type = unassigned DNA
cagccccatttaacttcgcggcggcggcggcgactgcggcgccgcgggctggaggccggcgtcggggaaggtcctggtgccggattccgcacgaggtgttgacgggcggcttctgccaacttctccccagcgcgcgccgagcccgcgcggccccggggctgcacgtcccagatacttctgcggcgcaaggctacaactgagacccggaggagactagaccccatggcttcctggacgagcccctggtgggtgctgatagggatggtcttcatgcactctcccctcccgcagaccacagctgagaaatctcctggagcctatttccttcccgagtttgcactttctcctcagggaagttttctggaagacacaacaggggagcagttcctcacttatcgctatgatgaccagacctcaagaaacactcgttcagatgaagacaaagatggcaactgggatgcttggggcgactggagtgactgctcccggacctgtgggggaggagcatcatattctctgcggagatgtttgactggaaggaattgtgaagggcagaacattcggtacaagacatgcagcaatcatgactgccctccagatgcagaagatttcagagcccagcagtgctcagcctacaatgatgtccagtatcaggggcattactatgaatggcttccacgatataatgatcctgctgccccgtgtgcactcaagtgtcatgcacaaggacaaaacttggtggtggagctggcacctaaggtactggatggaactcgttgcaacacggactccttggacatgtgtatcagtggcatctgtcaggcagtgggctgcgatcggcaactgggaagcaatgccaaggaggacaactgtggagtctgtgccggcgatggctccacctgcaggcttgtacggggacaatcaaagtcacacgtttctcctgaaaaaagagaagaaaatgtaattgctgttcctttgggaagtcgaagtgtgagaattacagtgaaaggacctgcccacctctttattgaatcaaaaacacttcaaggaagcaaaggagaacacagctttaacagccccggcgtctttctcgtagaaaacacaacagtggaatttcagaggggctccgagaggcaaacttttaagattccaggacctctgatggctgatttcatcttcaagaccaggtacactgcagccaaagacagcgtggttcagttcttcttttaccagcccatcagtcatcagtggagacaaactgacttctttccctgcactgtgacgtgtggaggaggttatcagctcaattctgctgaatgtgtggatatccgcttgaagagggtagttcctgaccattattgtcactactaccctgaaaatgtaaaaccaaaaccaaaactgaaggaatgcagcatggatccctgcccatcaagtgatggatttaaagagataatgccctatgaccacttccaacctcttcctcgctgggaacataatccttggactgcatgttccgtgtcctgtggaggagggattcagagacggagctttgtgtgtgtagaggaatccatgcatggagagatattgcaggtggaagaatggaagtgcatgtacgcacccaaacccaaggttatgcaaacttgtaatctgtttgattgccccaagtggattgccatggagtggtctcagtgcacagtgacttgtggccgagggttacggtaccgggttgttctgtgtattaaccaccgcggagagcatgttgggggctgcaatccacaactgaagttacacatcaaagaagaatgtgtcattcccatcccgtgttataaaccaaaagaaaaaagtccagtggaagcaaaattgccttggctgaaacaagcacaagaactagaagagaccagaatagcaacagaagaaccaacgttcattccagaaccctggtcagcctgcagtaccacgtgtgggccgggtgtgcaggtccgtgaggtgaagtgccgtgtgctcctcacattcacgcagactgagactgagctgcccgaggaagagtgtgaaggccccaagctgcccaccgaacggccctgcctcctggaagcatgtgatgagagcccggcctcccgagagctagacatccctctccctgaggacagtgagacgacttacgactgggagtacgctgggttcaccccttgcacagcaacatgcgtgggaggccatcaagaagccatagcagtgtgcttacatatccagacccagcagacagtcaatgacagcttgtgtgatatggtccaccgtcctccagccatgagccaggcctgtaacacagagccctgtccccccaggtggcatgtgggctcttgggggccctgctcagctacctgtggagttggaattcagacccgagatgtgtactgcctgcacccaggggagacccctgcccctcctgaggagtgccgagatgaaaagccccatgctttacaagcatgcaatcagtttgactgccctcctggctggcacattgaagaatggcagcagtgttccaggacttgtggcgggggaactcagaacagaagagtcacctgtcggcagctgctaacggatggcagctttttgaatctctcagatgaattgtgccaaggacccaaggcatcgtctcacaagtcctgtgccaggacagactgtcctccacatttagctgtgggagactggtcgaagtgttctgtcagttgtggtgttggaatccagagaagaaagcaggtgtgtcaaaggctggcagccaaaggtcggcgcatccccctcagtgagatgatgtgcagggatctaccagggctccctcttgtaagatcttgccagatgcctgagtgcagtaaaatcaaatcagagatgaagacaaaacttggtgagcagggtccgcagatcctcagtgtccagagagtctacattcagacaagggaagagaagcgtattaacctgaccattggtagcagagcctatttgctgcccaacacatccgtgattattaagtgccccgtgcgacgattccagaaatctctgatccagtgggagaaggatggccgttgcctgcagaactccaaacggcttggcatcaccaagtcaggctcactaaaaatccatggtcttgctgcccccgacatcggcgtgtaccggtgcattgcaggctctgcacaggaaacagttgtgctcaagctcattggtactgacaaccggctcatcgcacgcccagccctcagggagcctatgagggaatatcctgggatggaccacagcgaagccaatagtttgggagtcacatggcacaaaatgaggcaaatgtggaataacaaaaatgacctttatctggatgatgaccacattagtaaccagcctttcttgagagctctgttaggccactgcagcaattctgcaggaagcaccaactcctgggagttgaagaataagcagtttgaagcagcagttaaacaaggagcatatagcatggatacagcccagtttgatgagctgataagaaacatgagtcagctcatggaaaccggagaggtcagcgatgatcttgcgtcccagctgatatatcagctggtggccgaattagccaaggcacagccaacacacatgcagtggcggggcatccaggaagagacacctcctgctgctcagctcagaggggaaacagggagtgtgtcccaaagctcgcatgcaaaaaactcaggcaagctgacattcaagccgaaaggacctgttctcatgaggcaaagccaacctccctcaatttcatttaataaaacaataaattccaggattggaaatacagtatacattacaaaaaggacagaggtcatcaatatactgtgtgaccttattacccccagtgaggccacatatacatggaccaaggatggaaccttgttacagccctcagtaaaaataattttggatggaactgggaagatacagatacagaatcctacaaggaaagaacaaggcatatatgaatgttctgtagctaatcatcttggttcagatgtggaaagttcttctgtgctgtatgcagaggcacctgtcatcttgtctgttgaaagaaatatcaccaaaccagagcacaaccatctgtctgttgtggttggaggcatcgtggaggcagcccttggagcaaacgtgacaatccgatgtcctgtaaaaggtgtccctcagcctaatataacttggttgaagagaggaggatctctgagtggcaatgtttccttgcttttcaatggatccctgttgttgcagaatgtttcccttgaaaatgaaggaacctacgtctgcatagccaccaatgctcttggaaaggcagtggcaacatctgtactccacttgctggaacgaagatggccagagagtagaatcgtatttctgcaaggacataaaaagtacattctccaggcaaccaacactagaaccaacagcaatgacccaacaggagaacccccgcctcaagagcctttttgggagcctggtaactggtcacattgttctgccacctgtggtcatttgggagcccgcattcagagaccccagtgtgtgatggccaatgggcaggaagtgagtgaggccctgtgtgatcacctccagaagccactggctgggtttgagccctgtaacatccgggactgcccagcgaggtggttcacaagtgtgtggtcacagtgctctgtgtcttgcggtgaaggataccacagtcggcaggtgacgtgcaagcggacaaaagccaatggaactgtgcaggtggtgtctccaagagcatgtgcccctaaagaccggcctctgggaagaaaaccatgttttggtcatccatgtgttcagtgggaaccagggaaccggtgtcctggacgttgcatgggccgtgctgtgaggatgcagcagcgtcacacagcttgtcaacacaacagctctgactccaactgtgatgacagaaagagacccaccttaagaaggaactgcacatcaggggcctgtgatgtgtgttggcacacaggcccttggaagccctgtacagcagcctgtggcaggggtttccagtctcggaaagtcgactgtatccacacaaggagttgcaaacctgtggccaagagacactgtgtacagaaaaagaaaccaatttcctggcggcactgtcttgggccctcctgtgatagtacgtacacctcccagaccgctacaaacaaaggtgctgccagtcatgtcaagagggataaacctttggaggggtcatgatgctgctgtgaagataaaagtagaatataaaagctcttttccccatgtcgctgattcaaaaacatgtatttcttaaaagactagattctatggatcaaacagaggttgatgcaaaaacaccactgttaaggtgtaaagtgaaattttccaatggtagttttatattccaattttttaaaatgatgtattcaaggatgaacaaaatactatagcatgcatgccactgcacttgggacctcatcatgtcagttgaatcgagaaatcaccaagattatgagtgcatcctcacgtgctgcctctttcctgtgatatgtagactagcacagagtggtacatcctaaaaacttgggaaacacagcaacccatgacttcctcttctctcaagttgcaggttttcaacagttttataaggtatttgcattttagaagctctggccagtagttgttaagatgttggcattaatggcattttcatagatccttggtttagtctgtgaaaaagaaaccatctctctggataggctgtcacactgactgacctaagggttcatggaagcatggcatcttgtccttgcttttagaacacccatggaagaaaacacagagtagatattgctgtcatttatacaactacagaaatttatctatgacctaatgaggcatctcggaagtcaaagaagagggaaagttaaccttttctactgatttcgtagtatattcagagctttcttttaagagctgtgaatgaaactttttctaagcactattctattgcacacaaacagaaaaccaaagccttattagacctaatttatgcataaagtagtattcctgagaactttattttggaaaatttataagaaagtaatccaaataagaaacacgatagttgaaaataatttttatagtaaataattgttttgggctgatttttcagtaaatccaaagtgacttaggttagaagttacactaaggaccaggggttggaatcagaatttagtttaagatttgaggaaaagggtaagggttagtttcagttttaggattagagctagaattgggttaggtgagaaagaaagttaaggttaaggctagagttgtctttaagggttagggttaggaccaggttaggtcagggttggattgggtttagattggggccagtgctggtgttagtgatagtgtcaggatggaggttaggtttggagtaagcgttgttgctgaagtgagttcaggctagcattaaattgtaagttctgaagctgatttggttatggggtctttcccctgtatactaccagttgtgtctttagatggcacacaagtccaaataagtggtcatacttctttattcagggtctcagctgcctgtacacctgctgcctacatcttcttggcaacaaagttacctgccacaggctctgctgagcctagttcctggtcagtaataactgaacagtgcattttggctttggatgtgtctgtggacaagcttgctgagtttctctaccatattctgagcacacggtctcttttgttctaacttcagcttcactgacactgggttgagcactactgtatgtggagggtttggtgattggg

SEQ ID NO: 472 - DNA, 2468 bp, Homo sapiens
  source 1..2468: mol_type = unassigned DNA
atttaacttcgcggcggcggcggcgactgcggcgccgcgggctggaggccggcgtcggggaaggtcctggtgccggattccgcacgaggtgttgacgggcggcttctgccaacttctccccagcgcgcgccgagcccgcgcggccccggggctgcacgtcccagatacttctgcggcgcaaggctacaactgagacccggaggagactagaccccatggcttcctggacgagcccctggtgggtgctgatagggatggtcttcatgcactctcccctcccgcagaccacagctgagaaatctcctggagcctatttccttcccgagtttgcactttctcctcagggaagttttctggaagacacaacaggggagcagttcctcacttatcgctatgatgaccagacctcaagaaacactcgttcagatgaagacaaagatggcaactgggatgcttggggcgactggagtgactgctcccggacctgtgggggaggagcatcatattctctgcggagatgtttgactggaaggaattgtgaagggcagaacattcggtacaagacatgcagcaatcatgactgccctccagatgcagaagatttcagagcccagcagtgctcagcctacaatgatgtccagtatcaggggcattactatgaatggcttccacgatataatgatcctgctgccccgtgtgcactcaagtgtcatgcacaaggacaaaacttggtggtggagctggcacctaaggtactggatggaactcgttgcaacacggactccttggacatgtgtatcagtggcatctgtcaggcagtgggctgcgatcggcaactgggaagcaatgccaaggaggacaactgtggagtctgtgccggcgatggctccacctgcaggcttgtacggggacaatcaaagtcacacgtttctcctgaaaaaagagaagaaaatgtaattgctgttcctttgggaagtcgaagtgtgagaattacagtgaaaggacctgcccacctctcctccgctgctgatacccaggcaaacagggtctggagtggacctccagcaaactccaacagacctgcagctgagcgtcctgacttgtagaaggaaaactaacaaacagaaaggacatccacaccaaaaccccatctgtacgtcaccatcatcaaagaccaaaggtagataaaaccacaaagatggggaaaaaacaggagaaaaactggaaactctaaaaatcagagcacctctcctcctccaaaggaacacagctcctcaccagcaacggaacaaagctggatggagaatgactttgacgagttgagagaagaaggcttcagacaatcaaactactccgagctaaaggaggaagtccgaacccatggcaaagaagttaaaaaccttgaaaacaaattagacgaatggctaactagaataaccaatgcagagaagtccttaaagaacctgatggagctgaaaaccaaggcacgagaacgtgacgaatgcacaagcctcagtagccaattcgatcaactggaagaaagggtgtccgtgatggaagatcaaatgaatgaaatgaagcgaaaagagaagtttagagaaaaaaagaataaaaagaaatggacaaagcatccaagaaatatgggactatgtgaaaagaccaaatctacgtctgattggtgtacctgaaagtgacggggagaatggaaccaagttggaaaacactctgcagggtattatccaggtgaacttccccaatctagcaaggcaggccaacattcaaattcaggaaatacagagaatgccacaaagatactcctcgagaagagcaactgcaacacacataattgtcagattcaccaaagttgaaatgaaggaaaaattgttaagggcagccagagagaaaggtcgggttacccacaaagggaagcccatcaggctaacagcagatctcttggcagaaactctacaagccagaagagagtgggggccaatattcaaaattcttaaagaaaagaattttcaacctagaatttcatatccagccaaactaagcttcataagtgaaggagaaataaaatcctttacagataagcaaatgctgagagattttgtcaccaccaggcctgccctaaaagagctcctgaaggaagagctcaacatgcaaaggaacaactggtaccagccactgcaaaaacatgccaaattgtaaataccattgatgctaggaagaaactgcatcaactaatgggcaaaataaccagctaacatcataatgacaggatcaaattcacacataacaatattaaccttaaatgtaaatgggctaaataccccacttaaaagacacagactggcaaattggataaagagtcaagacctatcagtgtgctgtattcaggaaacccatctcacgtgcagagacacacataggctcaaaataaagggatggaggaagacctaccaagc

SEQ ID NO: 473 - DNA, 4986 bp, Homo sapiens
  source 1..4986: mol_type = unassigned DNA
atttaacttcgcggcggcggcggcgactgcggcgccgcgggctggaggccggcgtcggggaaggtcctggtgccggattccgcacgaggtgttgacgggcggcttctgccaacttctccccagcgcgcgccgagcccgcgcggccccggggctgcacgtcccagatacttctgcggcgcaaggctacaactgagacccggaggagactagaccccatggcttcctggacgagcccctggtgggtgctgatagggatggtcttcatgcactctcccctcccgcagaccacagctgagaaatctcctggagcctatttccttcccgagtttgcactttctcctcagggaagttttctggaagacacaacaggggagcagttcctcacttatcgctatgatgaccagacctcaagaaacactcgttcagatgaagacaaagatggcaactgggatgcttggggcgactggagtgactgctcccggacctgtgggggaggagcatcatattctctgcggagatgtttgactggaaggaattgtgaagggcagaacattcggtacaagacatgcagcaatcatgactgccctccagatgcagaagatttcagagcccagcagtgctcagcctacaatgatgtccagtatcaggggcattactatgaatggcttccacgatataatgatcctgctgccccgtgtgcactcaagtgtcatgcacaaggacaaaacttggtggtggagctggcacctaaggtactggatggaactcgttgcaacacggactccttggacatgtgtatcagtggcatctgtcaggcagtgggctgcgatcggcaactgggaagcaatgccaaggaggacaactgtggagtctgtgccggcgatggctccacctgcaggcttgtacggggacaatcaaagtcacacgtttctcctgaaaaaagagaagaaaatgtaattgctgttcctttgggaagtcgaagtgtgagaattacagtgaaaggacctgcccacctctttattgaatcaaaaacacttcaaggaagcaaaggagaacacagctttaacagccccggcgtctttctcgtagaaaacacaacagtggaatttcagaggggctccgagaggcaaacttttaagattccaggacctctgatggctgatttcatcttcaagaccaggtacactgcagccaaagacagcgtggttcagttcttcttttaccagcccatcagtcatcagtggagacaaactgacttctttccctgcactgtgacgtgtggaggaggttatcagctcaattctgctgaatgtgtggatatccgcttgaagagggtagttcctgaccattattgtcactactaccctgaaaatgtaaaaccaaaaccaaaactgaaggaatgcagcatggatccctgcccatcaagtgatggatttaaagagataatgccctatgaccacttccaacctcttcctcgctgggaacataatccttggactgcatgttccgtgtcctgtggaggagggattcagagacggagctttgtgtgtgtagaggaatccatgcatggagagatattgcaggtggaagaatggaagtgcatgtacgcacccaaacccaaggttatgcaaacttgtaatctgtttgattgccccaagtggattgccatggagtggtctcagtgcacagtgacttgtggccgagggttacggtaccgggttgttctgtgtattaaccaccgcggagagcatgttgggggctgcaatccacaactgaagttacacatcaaagaagaatgtgtcattcccatcccgtgttataaaccaaaagaaaaaagtccagtggaagcaaaattgccttggctgaaacaagcacaagaactagaagagaccagaatagcaacagaagaaccaacgttcattccagaaccctggtcagcctgcagtaccacgtgtgggccgggtgtgcaggtccgtgaggtgaagtgccgtgtgctcctcacattcacgcagactgagactgagctgcccgaggaagagtgtgaaggccccaagctgcccaccgaacggccctgcctcctggaagcatgtgatgagagcccggcctcccgagagctagacatccctctccctgaggacagtgagacgacttacgactgggagtacgctgggttcaccccttgcacagcaacatgcgtgggaggccatcaagaagccatagcagtgtgcttacatatccagacccagcagacagtcaatgacagcttgtgtgatatggtccaccgtcctccagccatgagccaggcctgtaacacagagccctgtccccccaggtggcatgtgggctcttgggggccctgctcagctacctgtggagttggaattcagacccgagatgtgtactgcctgcacccaggggagacccctgcccctcctgaggagtgccgagatgaaaagccccatgctttacaagcatgcaatcagtttgactgccctcctggctggcacattgaagaatggcagcagtgttccaggacttgtggcgggggaactcagaacagaagagtcacctgtcggcagctgctaacggatggcagctttttgaatctctcagatgaattgtgccaaggacccaaggcatcgtctcacaagtcctgtgccaggacagactgtcctccacatttagctgtgggagactggtcgaagtgttctgtcagttgtggtgttggaatccagagaagaaagcaggtgtgtcaaaggctggcagccaaaggtcggcgcatccccctcagtgagatgatgtgcagggatctaccagggctccctcttgtaagatcttgccagatgcctgagtgcagtaaaatcaaatcagagatgaagacaaaacttggtgagcagggtccgcagatcctcagtgtccagagagtctacattcagacaagggaagagaagcgtattaacctgaccattggtagcagagcctatttgctgcccaacacatccgtgattattaagtgccccgtgcgacgattccagaaatctctgatccagtgggagaaggatggccgttgcctgcagaactccaaacggcttggcatcaccaagtcaggctcactaaaaatccatggtcttgctgcccccgacatcggcgtgtaccggtgcattgcaggctctgcacaggaaacagttgtgctcaagctcattggtactgacaaccggctcatcgcacgcccagccctcagggagcctatgagggaatatcctgggatggaccacagcgaagccaatagtttgggagtcacatggcacaaaatgaggcaaatgtggaataacaaaaatgacctttatctggatgatgaccacattagtaaccagcctttcttgagagctctgttaggccactgcagcaattctgcaggaagcaccaactcctgggagttgaagaataagcagtttgaagcagcagttaaacaaggagcatatagcatggatacagcccagtttgatgagctgataagaaacatgagtcagctcatggaaaccggagaggtcagcgatgatcttgcgtcccagctgatatatcagctggtggccgaattagccaaggcacagccaacacacatgcagtggcggggcatccaggaagagacacctcctgctgctcagctcagaggggaaacagggagtgtgtcccaaagctcgcatgcaaaaaactcaggcaagctgacattcaagccgaaaggacctgttctcatgaggcaaagccaacctccctcaatttcatttaataaaacaataaattccaggattggaaatacagtatacattacaaaaaggacagaggtcatcaatatactgtgtgaccttattacccccagtgaggccacatatacatggaccaaggatggaaccttgttacagccctcagtaaaaataattttggatggaactgggaagatacagatacagaatcctacaaggaaagaacaaggcatatatgaatgttctgtagctaatcatcttggttcagatgtggaaagttcttctgtgctgtatgcagaggcacctgtcatcttgtctgttgaaagaaatatcaccaaaccagagcacaaccatctgtctgttgtggttggaggcatcgtggaggcagcccttggagcaaacgtgacaatccgatgtcctgtaaaaggtgtccctcagcctaatataacttggttgaagagaggaggatctctgagtggcaatgtttccttgcttttcaatggatccctgttgttgcagaatgtttcccttgaaaatgaaggaacctacgtctgcatagccaccaatgctcttggaaaggcagtggcaacatctgtactccacttgctggaacgaagatggccagagagtagaatcgtatttctgcaaggacataaaaagtacattctccaggcaaccaacactagaaccaacagcaatgacccaacaggagaacccccgcctcaagagcctttttgggagcctggtaactggtcacattgttctgccacctgtggtcatttgggagcccgcattcagagaccccagtgtgtgatggccaatgggcaggaagtgagtgaggccctgtgtgatcacctccagaagccactggctgggtttgagccctgtaacatccgggactgcccagcgaggtggttcacaagtgtgtggtcacagtgctctgtgtcttgcggtgaaggataccacagtcggcaggtgacgtgcaagcggacaaaagccaatggaactgtgcaggtggtgtctccaagagcatgtgcccctaaagaccggcctctgggaagaaaaccatgttttggtcatccatgtgttcagtgggaaccagggaaccgggtaaagctaacacatctagtttgtggacagcactatctgtccacacagatagtgtgataataatcaccttgtttccaataaactacttttggggcggggggcaggaatctgactg

SEQ ID NO: 474 - DNA, 543 bp, Homo sapiens
  source 1..543: mol_type = unassigned DNA
gtgctttggtgggaacggaacggtgtcacccctcaccgagtggctagaccaggaggagggggaggctggcggagagtgagaccacagctgagaaatctcctggagcctatttccttcccgagtttgcactttctcctcagggaagttttctggaagacacaacaggggagcagttcctcacttatcgctatgatgaccagacctcaagaaacactcgttcagatgaagacaaagatggcaactgggatgcttggggcgactggagtgactgctcccggacctgtgggggaggagcatcatattctctgcggagatgtttgactggaaggaattgtgaagggcagaacattcggtacaagacatgcagcaatcatgactgccctccagatgcagaagatttcagagcccagcagtgctcagcctacaatgatgtccagtatcaggggcattactatgaatggcttccacgatataatgatcctgctgccccgtgtgcactcaagtgtcatgcacaaggacaaaacttggtggtggagctggcac

SEQ ID NO: 475 - DNA, 533 bp, Homo sapiens
  source 1..533: mol_type = unassigned DNA
caaacttttaagattccaggacctctgatggctgatttcatcttcaaggttatcagctcaattctgctgaatgtgtggatatccgcttgaagagggtagttcctgaccattattgtcactactaccctgaaaatgtaaaaccaaaaccaaaactgaaggaatgcagcatggatccctgcccatcaagtacctgctgacttggattgcctggggaagtttcctggcttactacaataccttaaaataacagaacaatatcaagtcccagaatcctccagatatctgccagctggcttaggaagaagtgtgcaagtggaaaaggaagcgttctcagtggatttcatttcctgttactgaactgcacatttcctgtaagcctggttgaacataattattaatagagacctttcaaaggacaaattctgtgaaataaagtggttttctgaagagcctactaataggacagtgtgttaatatcactaatatattaagagagtaatgattataaaaaggaataaatttattgaaattgc

SEQ ID NO: 476 - DNA, 551 bp, Homo sapiens
  source 1..551: mol_type = unassigned DNA
agtgtggcccaaggactagtcaaattgacatcagcagggaacttataagaaatgaggaatctcaagtcccacccagacctaaggaatcagagtctgcatttcaacaagatccctgggtgttgtaatgatacacttgcagtgtgagaagtgtttccttacctgcctctcattcttgtttggtgttctgtcagttgtggtgttggaatccagagaagaaagcaggtgtgtcaaaggctggcagccaaaggtcggcgcatccccctcagtgagatgatgtgcagggatctaccagggctccctcttgtaagatcttgccagatgcctgagtgcagtaaaatcaaatcagagatgaagacaaaacttggtgagcagggtccgcagatcctcagtgtccagagagtctacattcagacaagggaagagaagcgtattaacctgaccattggtagcagagcctatttgctgcccaacacatccgtgattattaagtgccccgtgcgacgattccagaaatctctgatccagtgggagaaggatggccgttgcctgca

SEQ ID NO: 477 - DNA, 575 bp, Homo sapiens
  source 1..575: mol_type = unassigned DNA
aaattgacatcagcagggaacttataagaaatgaggaatctcaagtcccacccagacctaaggaatcagagtctgcatttcaacaagatccctgggtgttgtaatgatacacttgcagtgtgagaagtgtttccttacctgcctctcattcttgtttgggagcattcaatgcaagaggacaatggagcaggatctacacaattctaaagaaaagcaagcatgactcaaggatttcctcttcatcctgtgttcttcatgtagagagacagcagagaggcagtcagagaatactgtctgataagcccttgaaaaagctgtagggccaagatgagatacagagatgactcaaaacagagaatccaggaatgcatagatcctggtaaaaaagtgttctgtcagttgtggtgttggaatccagagaagaaagcaggtgtgtcaaaggctggcagccaaaggtcggcgcatccccctcagtgagatgatgtgcagggatctaccagggctccctcttgtaagatcttgccagatgcctgagtgcagtaaaatcaaatcagagatgaagacaaaacttggtg

SEQ ID NO: 478 - DNA, 2908 bp, Homo sapiens
  source 1..2908: mol_type = unassigned DNA
aggggccccagtggccgccgcggagcgaggttgcctggagagagcgcctgggcgcagaagggttaacgggccaccgggggctcgcagagcaggagggtgctctcggacggtgtgtcccccactgcactcctgaacttggaggacagggtcgccgcgagggacgcagagagcaccctccacgcccagatgcctgcgtagtttttgtgaccagtccgctcctgcctccccctggggcagtagagggggagcgatggagaactggactggcaggccctggctgtatctgctgctgcttctgtccctccctcagctctgcttggatcaggaggtgttgtccggacactctcttcagacacctacagaggagggccagggccccgaaggtgtctggggaccttgggtccagtgggcctcttgctcccagccctgcggggtgggggtgcagcgcaggagccggacatgtcagctccctacagtgcagctccacccgagtctgcccctccctccccggcccccaagacatccagaagccctcctcccccggggccagggtcccagaccccagacttctccagaaaccctccccttgtacaggacacagtctcggggaaggggtggcccacttcgaggtcccgcttcccacctagggagagaggagacccaggagattcgagcggccaggaggtcccggcttcgagaccccatcaagccaggaatgttcggttatgggagagtgccctttgcattgccactgcaccggaaccgcaggcaccctcggagcccacccagatctgagctgtccctgatctcttctagaggggaagaggctattccgtcccctactccaagagcagagccattctccgcaaacggcagcccccaaactgagctccctcccacagaactgtctgtccacaccccatccccccaagcagaacctctaagccctgaaactgctcagacagaggtggcccccagaaccaggcctgcccccctacggcatcaccccagagcccaggcctctggcacagagcccccctcacccacgcactccttaggagaaggtggcttcttccgtgcatcccctcagccacgaaggccaagttcccagggttgggccagtccccaggtagcagggagacgccctgatccttttccttcggtccctcggggccgaggccagcagggccaagggccttggggaacgggggggactcctcacgggccccgcctggagcctgaccctcagcacccgggcgcctggctgcccctgctgagcaacggcccccatgccagctccctctggagcctctttgctcccagtagccctattccaagatgttctggggagagtgaacagctaagagcctgcagccaagcgccctgcccccctgagcagccagacccccgggccctgcagtgcgcagcctttaactcccaggaattcatgggccagctgtatcagtgggagcccttcactgaagtccagggctcccagcgctgtgaactgaactgccggccccgtggcttccgcttctatgtccgtcacactgaaaaggtccaggatgggaccctgtgtcagcctggagcccctgacatctgtgtggctggacgctgtctgagccccggctgtgatgggatccttggctctggcaggcgtcctgatggctgtggagtctgtgggggtgatgattctacctgtcgccttgtttcggggaacctcactgaccgagggggccccctgggctatcagaagatcttgtggattccagcgggagccttgcggctccagattgcccagctccggcctagctccaactacctggcacttcgtggccctgggggccggtccatcatcaatgggaactgggctgtggatccccctgggtcctacagggccggcgggaccgtctttcgatataaccgtcctcccagggaggagggcaaaggggagagtctgtcggctgaaggccccaccacccagcctgtggatgtctatatgatctttcaggaggaaaacccaggcgttttttatcagtatgtcatctcttcacctcctccaatccttgagaaccccaccccagagccccctgtcccccagcttcagccggagattctgagggtggagcccccacttgctccggcaccccgcccagcccggaccccaggcaccctccagcgtcaggtgcggatcccccagatgcccgccccgccccatcccaggacacccctggggtctccagctgcgtactggaaacgagtgggacactctgcatgctcagcgtcctgcgggaaaggtgtctggcgccccattttcctctgcatctcccgtgagtcgggagaggaactggatgaacgcagctgtgccgcgggtgccaggcccccagcctcccctgaaccctgccacggcaccccatgccccccatactgggaggctggcgagtggacatcctgcagccgctcctgtggccccggcacccagcaccgccagctgcagtgccggcaggaatttggggggggtggctcctcggtgcccccggagcgctgtggacatctcccccggcccaacatcacccagtcttgccagctgcgcctctgtggccattgggaagttggctctccttggagccagtgctccgtgcggtgcggccggggccagagaagccggcaggttcgctgtgttgggaacaatggtgatgaagtgagcgagcaggagtgtgcgtcaggccccccgcagccccccagcagagaggcctgtgacatggggccctgtactactgcctggttccacagcgactggagctccaaggtgagcccggaacccccagccatatcctgcatcctgggtaaccacgcccaggacacctcagcctttccagcatagctcaataaacttgtattgatcaag

SEQ ID NO: 479 - DNA, 1826 bp, Homo sapiens
  source 1..1826: mol_type = unassigned DNA
gccgccgcggagcgaggttgcctggagagagcgcctgggcgcagaagggttaacgggccaccgggggctcgcagagcaggagggtgctctcggacggtgtgtcccccactgcactcctgaacttggaggacagggtcgccgcgagggacgcaggtgggtgcccttgatccagctcagcccgatggcagaagaggttgacaaaaaagaaagacacctgttggggtggcctgccagacccaggagtggagggctctgagggcccgggaattcggactcaggacagggattctccatggctaggcccagaaacacagggtccaaccactctccagcagggagacctgggggtgaaggggtgagccctgcgcaggtctctgttccttggtcttcactgggcagtgtggagaggtgtggccaggaggagcccgcgtttgtccagaccagggtctactctggcaccagagtgaccacctctgacctctcctttcctcgtcctgggccgggaacgacaccaaatgagggacatggaaagggctggagtaacaagagtcaggcagagcctgaagacttgggtggaacatgggcccttctctggagatcctggcctcccccgttcagtcagggtggagttgctgaccttagtggccggcccagccaggggaaggagtggccatcggcaacccccaccccaaccccaatccctgaggcgcccgctctggctcagccactctgacccctccctcaaattccgaaccctaggtctcagggagggcagtggggctgagtgtctgcccccaggcacattcctacccttctcttggtcattttctgccccagagctggcccacctcagcaatgcgagggctccctggattcctctcccgggtgcctttcagatccaacagaaacagattttttttttcctggaaagcagaactaagagtgggatgaggagcaggggtgggaaggactcaaagtgagaagaagggggcaaagagagtcaggcttggtggctggggtggcttccaagcctcacttctccagtgttcaaagctgaacttcagatggacttcccggctcttcagaatgagaggcctgtggctggggcatgaggcagccccggctgcacctctccttcccgcttccccagctggtagagacgcacaggaaacaagccctcactgaaccaactccagatgctggcacccagagtgggtgttacattgccggcttcttctctagagattaaaccgtcaacccatttagcttatcccttggccaaaaagtgtatgagatgtgcctggatgttccctaaagagcttatctaagaagggaagagaaagccgggaggcaagtaggacagagagatgactggggaaggtcttgtgtctggaagacccaaggaaggggcttctggtgggtcctcagagagagtgtctggcgcatcctcagtggagccttcctcctctactttctaggcacctctgggagggcaggagtgggagcagatgacaaccattttagaaggagccctctggctgggtgcggtggctcacacctgtcatcccagcactttgggaggccaaggcaggagaagcgcttgaggcctggagttcaagaccagcctgtgcaatttagctggatcccatctccaccaaaaaataccaaaattagctgggtgtggtggtgcacgcatgtagtcccacctactcaggaggctgaggaaggagagcctgtgagtttgaggctgcaatgagctttggtggcaccactgccctccagcctggatgacagagtgagatctccatctcaaaaaaaaaaaaaaa

SEQ ID NO: 480 - DNA, 4167 bp, Homo sapiens
  source 1..4167: mol_type = unassigned DNA
gaggatcctaaagggatggaccagtttcaccccctcctccatattctctgagctgtcctcccagccccaagctctctggacactggagaggtaaccaccaggcttctgtccctgcagagagcaccctccacgcccagatgcctgcgtagtttttgtgaccagtccgctcctgcctccccctggggcagtagagggggagcgatggagaactggactggcaggccctggctgtatctgctgctgcttctgtccctccctcagctctgcttggatcaggaggtgttgtccggacactctcttcagacacctacagaggagggccagggccccgaaggtgtctggggaccttgggtccagtgggcctcttgctcccagccctgcggggtgggggtgcagcgcaggagccggacatgtcagctccctacagtgcagctccacccgagtctgcccctccctccccggcccccaagacatccagaagccctcctcccccggggccagggtcccagaccccagacttctccagaaaccctccccttgtacaggacacagtctcggggaaggggtggcccacttcgaggtcccgcttcccacctagggagagaggagacccaggagattcgagcggccaggaggtcccggcttcgagaccccatcaagccaggaatgttcggttatgggagagtgccctttgcattgccactgcaccggaaccgcaggcaccctcggagcccacccagatctgagctgtccctgatctcttctagaggggaagaggctattccgtcccctactccaagagcagagccattctccgcaaacggcagcccccaaactgagctccctcccacagaactgtctgtccacaccccatccccccaagcagaacctctaagccctgaaactgctcagacagaggtggcccccagaaccaggcctgcccccctacggcatcaccccagagcccaggcctctggcacagagcccccctcacccacgcactccttaggagaaggtggcttcttccgtgcatcccctcagccacgaaggccaagttcccagggttgggccagtccccaggtagcagggagacgccctgatccttttccttcggtccctcggggccgaggccagcagggccaagggccttggggaacgggggggactcctcacgggccccgcctggagcctgaccctcagcacccgggcgcctggctgcccctgctgagcaacggcccccatgccagctccctctggagcctctttgctcccagtagccctattccaagatgttctggggagagtgaacagctaagagcctgcagccaagcgccctgcccccctgagcagccagacccccgggccctgcagtgcgcagcctttaactcccaggaattcatgggccagctgtatcagtgggagcccttcactgaagtccagggctcccagcgctgtgaactgaactgccggccccgtggcttccgcttctatgtccgtcacactgaaaaggtccaggatgggaccctgtgtcagcctggagcccctgacatctgtgtggctggacgctgtctgagccccggctgtgatgggatccttggctctggcaggcgtcctgatggctgtggagtctgtgggggtgatgattctacctgtcgccttgtttcggggaacctcactgaccgagggggccccctgggctatcagaagatcttgtggattccagcgggagccttgcggctccagattgcccagctccggcctagctccaactacctggcacttcgtggccctgggggccggtccatcatcaatgggaactgggctgtggatccccctgggtcctacagggccggcgggaccgtctttcgatataaccgtcctcccagggaggagggcaaaggggagagtctgtcggctgaaggccccaccacccagcctgtggatgtctatatgatctttcaggaggaaaacccaggcgttttttatcagtatgtcatctcttcacctcctccaatccttgagaaccccaccccagagccccctgtcccccagcttcagccggagattctgagggtggagcccccacttgctccggcaccccgcccagcccggaccccaggcaccctccagcgtcaggtgcggatcccccagatgcccgccccgccccatcccaggacacccctggggtctccagctgcgtactggaaacgagtgggacactctgcatgctcagcgtcctgcgggaaaggtgtctggcgccccattttcctctgcatctcccgtgagtcgggagaggaactggatgaacgcagctgtgccgcgggtgccaggcccccagcctcccctgaaccctgccacggcaccccatgccccccatactgggaggctggcgagtggacatcctgcagccgctcctgtggccccggcacccagcaccgccagctgcagtgccggcaggaatttggggggggtggctcctcggtgcccccggagcgctgtggacatctcccccggcccaacatcacccagtcttgccagctgcgcctctgtggccattgggaagttggctctccttggagccagtgctccgtgcggtgcggccggggccagagaagccggcaggttcgctgtgttgggaacaatggtgatgaagtgagcgagcaggagtgtgcgtcaggccccccgcagccccccagcagagaggcctgtgacatggggccctgtactactgcctggttccacagcgactggagctccaagtgctcagccgagtgtgggacgggaatccagcggcgctctgtggtctgccttgggagtggggcagccctcgggccaggccagggggaagcaggagcaggaactgggcagagctgtccaacaggaagccggccccctgacatgcgcgcctgcagcctggggccctgtgagagaacttggcgctggtacacagggccctggggtgagtgctcctccgaatgtggctctggcacacagcgtagagacatcatctgtgtatccaaactggggacggagttcaacgtgacttctccgagcaactgttctcacctccccaggccccctgccctgcagccctgtcaagggcaggcctgccaggaccgatggttttccacgccctggagcccatgttctcgctcctgccaagggggaacgcagacacgggaggtccagtgcctgagcaccaaccagaccctcagcacccgatgccctcctcaactgcggccctccaggaagcgcccctgtaacagccaaccctgcagccagcgccctgatgatcaatgcaaggacagctctccacattgccccctggtggtacaggcccggctctgcgtctacccctactacacagccacctgttgccgctcttgcgcacatgtcctggagcggtctccccaggatccctcctgaaaggggtccggggcaccttcacggttttctgtgccaccatcggtcacccattgatcggcccactctgaaccccctggctctccagcctgtcccagtctcagcagggatgtcctccaggtgacagagggtggcaaggtgactgacacaaagtgactttcagggctgtggtcaggcccatgtggtggtgtgatgggtgtgtgcacatatgcctcaggtgtgcttttgggactgcatggatatgtgtgtgctcaaacgtgtatcacttttcaaaaagaggttacacagactgagaaggacaagacctgtttccttgagactttcctaggtggaaaggaaagcaagtctgcagttccttgctaatctgagctacttagagtgtggtctccccaccaactccagttttgtgccctaagcctcatttctcatgttcagacctcacatcttctaagccgccctgtgtctctgaccccttctcatttgcctagtatctctgcccctgcctccctaattagctagggctggggtcagccactgccaatcctgccttactcaggaaggcaggaggaaagagactgcctctccagagcaaggcccagctgggcagagggtgaaaaagagaaatgtgagcatccgctcccccaccaccccgcccagcccctagccccactccctgcctcctgaaatggttcccacccagaactaatttattttttattaaagatggtcatgacaaatgagaaa

SEQ ID NO: 481 - DNA, 1803 bp, Homo sapiens
  source 1..1803: mol_type = unassigned DNA
cagggtttcatatggacccccaatatagaagtcagataagggactgaaccagggactgggggcccagggccctagggctcagcctcctcctcagcccacgaagccatgtgactgctgggctggggatcgaaggcagagcctggttctgaagcctagagctggaagctggctgagaaggtctgggaagcccagctccctggattcccctcgccccctcagtgctccgtgcggtgcggccggggccagagaagccggcaggttcgctgtgttgggaacaatggtgatgaagtgagcgagcaggagtgtgcgtcaggccccccgcagccccccagcagagaggcctgtgacatggggccctgtactactgcctggttccacagcgactggagctccaagtgctcagccgagtgtgggacgggaatccagcggcgctctgtggtctgccttgggagtggggcagccctcgggccaggccagggggaagcaggagcaggaactgggcagagctgtccaacaggaagccggccccctgacatgcgcgcctgcagcctggggccctgtgagagaacttggcgctggtacacagggccctggggtgagtgctcctccgaatgtggctctggcacacagcgtagagacatcatctgtgtatccaaactggggacggagttcaacgtgacttctccgagcaactgttctcacctccccaggccccctgccctgcagccctgtcaagggcaggcctgccaggaccgatggttttccacgccctggagcccatgttctcgctcctgccaagggggaacgcagacacgggaggtccagtgcctgagcaccaaccagaccctcagcacccgatgccctcctcaactgcggccctccaggaagcgcccctgtaacagccaaccctgcagccagcgccctgatgatcaatgcaaggacagctctccacattgccccctggtggtacaggcccggctctgcgtctacccctactacacagccacctgttgccgctcttgcgcacatgtcctggagcggtctccccaggatccctcctgaaaggggtccggggcaccttcacggttttctgtgccaccatcggtcacccattgatcggcccactctgaaccccctggctctccagcctgtcccagtctcagcagggatgtcctccaggtgacagagggtggcaaggtgactgacacaaagtgactttcagggctgtggtcaggcccatgtggtggtgtgatgggtgtgtgcacatatgcctcaggtgtgcttttgggactgcatggatatgtgtgtgctcaaacgtgtatcacttttcaaaaagaggttacacagactgagaaggacaagacctgtttccttgagactttcctaggtggaaaggaaagcaagtctgcagttccttgctaatctgagctacttagagtgtggtctccccaccaactccagttttgtgccctaagcctcatttctcatgttcagacctcacatcttctaagccgccctgtgtctctgaccccttctcatttgcctagtatctctgcccctgcctccctaattagctagggctggggtcagccactgccaatcctgccttactcaggaaggcaggaggaaagagactgcctctccagagcaaggcccagctgggcagagggtgaaaaagagaaatgtgagcatccgctcccccaccaccccgcccagcccctagccccactccctgcctcctgaaatggttcccacccagaactaatttattttttattaaagatggtcatgacaaatgagaaa

SEQ ID NO: 482 - DNA, 4319 bp, Homo sapiens
  source 1..4319: mol_type = unassigned DNA
ggagttgcggccgaggcggccgtgaccggagcgcggctcaggggccccagtggccgccgcggagcgaggttgcctggagagagcgcctgggcgcagaagggttaacgggccaccgggggctcgcagagcaggagggtgctctcggacggtgtgtcccccactgcactcctgaacttggaggacagggtcgccgcgagggacgcagagagcaccctccacgcccagatgcctgcgtagtttttgtgaccagtccgctcctgcctccccctggggcagtagagggggagcgatggagaactggactggcaggccctggctgtatctgctgctgcttctgtccctccctcagctctgcttggatcaggaggtgttgtccggacactctcttcagacacctacagaggagggccagggccccgaaggtgtctggggaccttgggtccagtgggcctcttgctcccagccctgcggggtgggggtgcagcgcaggagccggacatgtcagctccctacagtgcagctccacccgagtctgcccctccctccccggcccccaagacatccagaagccctcctcccccggggccagggtcccagaccccagacttctccagaaaccctccccttgtacaggacacagtctcggggaaggggtggcccacttcgaggtcccgcttcccacctagggagagaggagacccaggagattcgagcggccaggaggtcccggcttcgagaccccatcaagccaggaatgttcggttatgggagagtgccctttgcattgccactgcaccggaaccgcaggcaccctcggagcccacccagatctgagctgtccctgatctcttctagaggggaagaggctattccgtcccctactccaagagcagagccattctccgcaaacggcagcccccaaactgagctccctcccacagaactgtctgtccacaccccatccccccaagcagaacctctaagccctgaaactgctcagacagaggtggcccccagaaccaggcctgcccccctacggcatcaccccagagcccaggcctctggcacagagcccccctcacccacgcactccttaggagaaggtggcttcttccgtgcatcccctcagccacgaaggccaagttcccagggttgggccagtccccaggtagcagggagacgccctgatccttttccttcggtccctcggggccgaggccagcagggccaagggccttggggaacgggggggactcctcacgggccccgcctggagcctgaccctcagcacccgggcgcctggctgcccctgctgagcaacggcccccatgccagctccctctggagcctctttgctcccagtagccctattccaagatgttctggggagagtgaacagctaagagcctgcagccaagcgccctgcccccctgagcagccagacccccgggccctgcagtgcgcagcctttaactcccaggaattcatgggccagctgtatcagtgggagcccttcactgaagcccctctgcttcccctgcgccatgccttctttcttctccctggggctgggtcaggagacagcacaggtgtccagggctcccagcgctgtgaactgaactgccggccccgtggcttccgcttctatgtccgtcacactgaaaaggtccaggatgggaccctgtgtcagcctggagcccctgacatctgtgtggctggacgctgtctgagccccggctgtgatgggatccttggctctggcaggcgtcctgatggctgtggagtctgtgggggtgatgattctacctgtcgccttgtttcggggaacctcactgaccgagggggccccctgggctatcagaagatcttgtggattccagcgggagccttgcggctccagattgcccagctccggcctagctccaactacctggcacttcgtggccctgggggccggtccatcatcaatgggaactgggctgtggatccccctgggtcctacagggccggcgggaccgtctttcgatataaccgtcctcccagggaggagggcaaaggggagagtctgtcggctgaaggccccaccacccagcctgtggatgtctatatgatctttcaggaggaaaacccaggcgttttttatcagtatgtcatctcttcacctcctccaatccttgagaaccccaccccagagccccctgtcccccagcttcagccggagattctgagggtggagcccccacttgctccggcaccccgcccagcccggaccccaggcaccctccagcgtcaggtgcggatcccccagatgcccgccccgccccatcccaggacacccctggggtctccagctgcgtactggaaacgagtgggacactctgcatgctcagcgtcctgcgggaaaggtgtctggcgccccattttcctctgcatctcccgtgagtcgggagaggaactggatgaacgcagctgtgccgcgggtgccaggcccccagcctcccctgaaccctgccacggcaccccatgccccccatactgggaggctggcgagtggacatcctgcagccgctcctgtggccccggcacccagcaccgccagctgcagtgccggcaggaatttggggggggtggctcctcggtgcccccggagcgctgtggacatctcccccggcccaacatcacccagtcttgccagctgcgcctctgtggccattgggaagttggctctccttggagccagtgctccgtgcggtgcggccggggccagagaagccggcaggttcgctgtgttgggaacaatggtgatgaagtgagcgagcaggagtgtgcgtcaggccccccgcagccccccagcagagaggcctgtgacatggggccctgtactactgcctggttccacagcgactggagctccaagtgctcagccgagtgtgggacgggaatccagcggcgctctgtggtctgccttgggagtggggcagccctcgggccaggccagggggaagcaggagcaggaactgggcagagctgtccaacaggaagccggccccctgacatgcgcgcctgcagcctggggccctgtgagagaacttggcgctggtacacagggccctggggtgagtgctcctccgaatgtggctctggcacacagcgtagagacatcatctgtgtatccaaactggggacggagttcaacgtgacttctccgagcaactgttctcacctccccaggccccctgccctgcagccctgtcaagggcaggcctgccaggaccgatggttttccacgccctggagcccatgttctcgctcctgccaagggggaacgcagacacgggaggtccagtgcctgagcaccaaccagaccctcagcacccgatgccctcctcaactgcggccctccaggaagcgcccctgtaacagccaaccctgcagccagcgccctgatgatcaatgcaaggacagctctccacattgccccctggtggtacaggcccggctctgcgtctacccctactacacagccacctgttgccgctcttgcgcacatgtcctggagcggtctccccaggatccctcctgaaaggggtccggggcaccttcacggttttctgtgccaccatcggtcacccattgatcggcccactctgaaccccctggctctccagcctgtcccagtctcagcagggatgtcctccaggtgacagagggtggcaaggtgactgacacaaagtgactttcagggctgtggtcaggcccatgtggtggtgtgatgggtgtgtgcacatatgcctcaggtgtgcttttgggactgcatggatatgtgtgtgctcaaacgtgtatcacttttcaaaaagaggttacacagactgagaaggacaagacctgtttccttgagactttcctaggtggaaaggaaagcaagtctgcagttccttgctaatctgagctacttagagtgtggtctccccaccaactccagttttgtgccctaagcctcatttctcatgttcagacctcacatcttctaagccgccctgtgtctctgaccccttctcatttgcctagtatctctgcccctgcctccctaattagctagggctggggtcagccactgccaatcctgccttactcaggaaggcaggaggaaagagactgcctctccagagcaaggcccagctgggcagagggtgaaaaagagaaatgtgagcatccgctcccccaccaccccgcccagcccctagccccactccctgcctcctgaaatggttcccacccagaactaatttattttttattaaagatggtcatgacaaatg

SEQ ID NO: 483 - DNA, 4250 bp, Homo sapiens
  source 1..4250: mol_type = unassigned DNA
ggagttgcggccgaggcggccgtgaccggagcgcggctcaggggccccagtggccgccgcggagcgaggttgcctggagagagcgcctgggcgcagaagggttaacgggccaccgggggctcgcagagcaggagggtgctctcggacggtgtgtcccccactgcactcctgaacttggaggacagggtcgccgcgagggacgcagagagcaccctccacgcccagatgcctgcgtagtttttgtgaccagtccgctcctgcctccccctggggcagtagagggggagcgatggagaactggactggcaggccctggctgtatctgctgctgcttctgtccctccctcagctctgcttggatcaggaggtgttgtccggacactctcttcagacacctacagaggagggccagggccccgaaggtgtctggggaccttgggtccagtgggcctcttgctcccagccctgcggggtgggggtgcagcgcaggagccggacatgtcagctccctacagtgcagctccacccgagtctgcccctccctccccggcccccaagacatccagaagccctcctcccccggggccagggtcccagaccccagacttctccagaaaccctccccttgtacaggacacagtctcggggaaggggtggcccacttcgaggtcccgcttcccacctagggagagaggagacccaggagattcgagcggccaggaggtcccggcttcgagaccccatcaagccaggaatgttcggttatgggagagtgccctttgcattgccactgcaccggaaccgcaggcaccctcggagcccacccagatctgagctgtccctgatctcttctagaggggaagaggctattccgtcccctactccaagagcagagccattctccgcaaacggcagcccccaaactgagctccctcccacagaactgtctgtccacaccccatccccccaagcagaacctctaagccctgaaactgctcagacagaggtggcccccagaaccaggcctgcccccctacggcatcaccccagagcccaggcctctggcacagagcccccctcacccacgcactccttaggagaaggtggcttcttccgtgcatcccctcagccacgaaggccaagttcccagggttgggccagtccccaggtagcagggagacgccctgatccttttccttcggtccctcggggccgaggccagcagggccaagggccttggggaacgggggggactcctcacgggccccgcctggagcctgaccctcagcacccgggcgcctggctgcccctgctgagcaacggcccccatgccagctccctctggagcctctttgctcccagtagccctattccaagatgttctggggagagtgaacagctaagagcctgcagccaagcgccctgcccccctgagcagccagacccccgggccctgcagtgcgcagcctttaactcccaggaattcatgggccagctgtatcagtgggagcccttcactgaagtccagggctcccagcgctgtgaactgaactgccggccccgtggcttccgcttctatgtccgtcacactgaaaaggtccaggatgggaccctgtgtcagcctggagcccctgacatctgtgtggctggacgctgtctgagccccggctgtgatgggatccttggctctggcaggcgtcctgatggctgtggagtctgtgggggtgatgattctacctgtcgccttgtttcggggaacctcactgaccgagggggccccctgggctatcagaagatcttgtggattccagcgggagccttgcggctccagattgcccagctccggcctagctccaactacctggcacttcgtggccctgggggccggtccatcatcaatgggaactgggctgtggatccccctgggtcctacagggccggcgggaccgtctttcgatataaccgtcctcccagggaggagggcaaaggggagagtctgtcggctgaaggccccaccacccagcctgtggatgtctatatgatctttcaggaggaaaacccaggcgttttttatcagtatgtcatctcttcacctcctccaatccttgagaaccccaccccagagccccctgtcccccagcttcagccggagattctgagggtggagcccccacttgctccggcaccccgcccagcccggaccccaggcaccctccagcgtcaggtgcggatcccccagatgcccgccccgccccatcccaggacacccctggggtctccagctgcgtactggaaacgagtgggacactctgcatgctcagcgtcctgcgggaaaggtgtctggcgccccattttcctctgcatctcccgtgagtcgggagaggaactggatgaacgcagctgtgccgcgggtgccaggcccccagcctcccctgaaccctgccacggcaccccatgccccccatactgggaggctggcgagtggacatcctgcagccgctcctgtggccccggcacccagcaccgccagctgcagtgccggcaggaatttggggggggtggctcctcggtgcccccggagcgctgtggacatctcccccggcccaacatcacccagtcttgccagctgcgcctctgtggccattgggaagttggctctccttggagccagtgctccgtgcggtgcggccggggccagagaagccggcaggttcgctgtgttgggaacaatggtgatgaagtgagcgagcaggagtgtgcgtcaggccccccgcagccccccagcagagaggcctgtgacatggggccctgtactactgcctggttccacagcgactggagctccaagtgctcagccgagtgtgggacgggaatccagcggcgctctgtggtctgccttgggagtggggcagccctcgggccaggccagggggaagcaggagcaggaactgggcagagctgtccaacaggaagccggccccctgacatgcgcgcctgcagcctggggccctgtgagagaacttggcgctggtacacagggccctggggtgagtgctcctccgaatgtggctctggcacacagcgtagagacatcatctgtgtatccaaactggggacggagttcaacgtgacttctccgagcaactgttctcacctccccaggccccctgccctgcagccctgtcaagggcaggcctgccaggaccgatggttttccacgccctggagcccatgttctcgctcctgccaagggggaacgcagacacgggaggtccagtgcctgagcaccaaccagaccctcagcacccgatgccctcctcaactgcggccctccaggaagcgcccctgtaacagccaaccctgcagccagcgccctgatgatcaatgcaaggacagctctccacattgccccctggtggtacaggcccggctctgcgtctacccctactacacagccacctgttgccgctcttgcgcacatgtcctggagcggtctccccaggatccctcctgaaaggggtccggggcaccttcacggttttctgtgccaccatcggtcacccattgatcggcccactctgaaccccctggctctccagcctgtcccagtctcagcagggatgtcctccaggtgacagagggtggcaaggtgactgacacaaagtgactttcagggctgtggtcaggcccatgtggtggtgtgatgggtgtgtgcacatatgcctcaggtgtgcttttgggactgcatggatatgtgtgtgctcaaacgtgtatcacttttcaaaaagaggttacacagactgagaaggacaagacctgtttccttgagactttcctaggtggaaaggaaagcaagtctgcagttccttgctaatctgagctacttagagtgtggtctccccaccaactccagttttgtgccctaagcctcatttctcatgttcagacctcacatcttctaagccgccctgtgtctctgaccccttctcatttgcctagtatctctgcccctgcctccctaattagctagggctggggtcagccactgccaatcctgccttactcaggaaggcaggaggaaagagactgcctctccagagcaaggcccagctgggcagagggtgaaaaagagaaatgtgagcatccgctcccccaccaccccgcccagcccctagccccactccctgcctcctgaaatggttcccacccagaactaatttattttttattaaagatggtcatgacaaatg

SEQ ID NO: 484 - DNA, 587 bp, Homo sapiens
  source 1..587: mol_type = unassigned DNA
ccgtgtccagccagggtcctgggccgcgacctggttctcccggagtctacaagtggagcctttcaggctggcatggagagcttaaggggcaactgaaggagacacactggccaagcgcggagttctgcttacttcagtcctgctgagatactctctcagtccgctcgcaccgaaggaagctgccttgggatcagagcagacataaagctagaaaaatttcaagatgaaattgaaatggccaatgagcacaccctcattcatccagcgagcattgaggaccccctagaggccaggcccatgagtgatgaagatcccgaggatgaagacgccttgccagccagctttgctgtgctctgagcatgactaaactaaaagtaatgaatccagaccttgaagactggtgtgtgtgtaaaaggcaagaagtgagaagattcacgtgtagatccaggacaatctgaatttacttctgttcagtagttcccaaaggctttttctacatggagggactcggagtgacacagcagctccctcttgtgggcagattcccctgtgtaaggtgctggaggctgaggttccagcctgcagcc

SEQ ID NO: 485 - DNA, 2523 bp, Homo sapiens
  source 1..2523: mol_type = unassigned DNA
gcggcggggctgaggcgctgaggcggccgtggcggcggcggcggcggcggcggcagcggcggccaagcggccaggttggcggccggggctccgggccgcgcgaggccacggccacgccgcgccgctgcgcacaaccaacgaggcagagcgccgcccggcgcgagactgcggccgaagcgtggggcgcgcgtgcggaggaccaggcgcggcgcggctgcggctgagcataattgatatactgtggttactctacctatttgtgtaggcctctcaggtcattgaaacaagatgttgtacaaattagcagatgacactggcgcatggaggaatgagtctagtgttggtaatgagaagttggatatccgtttgatccttgttctactgcaggtagtgtatattttgagaacagcgtgaggtttattctactaatggaaatttacaaaaataccagtttgaatgattgagaaatctaagttaaagaacccttgaatagaaatgtcgctgttcagtgcgttgatcgattctcacatctgaagccagctgtgtattcttgagtggagcctttcaggctggcatggagagcttaaggggcaactgaaggagacacactggccaagcgcggagttctgcttacttcagtcctgctgagatactctctcagtccgctcgcaccgaaggaagctgccttgggatcagagcagacataaagctagaaaaatttcaaggaagctgtcagtgtggtgttgggcctgattgattcgcatcagctcaggtggcgtcctattggaaggtcggcagtgggagagcagctggccagttcctcccgcctgcaaggcaggggagtgtacaaggtgtgtaccccaggggcaggatgctaacactgcactgactgagaaaagaatttgtcttacctgtacctgacaggtgtgtacctgaaagagatgaaattgaaatggccaatgagcacaccctcattcatccagcgagcattgaggaccccctagaggccaggcccatgagtgatgaagatcccgaggatgaagacgccttgccagccaggtggaagaaagaaatgggaagaaaaaggaagagaaccatagctacgttgtgagggcattgcttcaactctggtaacttcatgtgaaatgactacaaaatgaattaatatgcagtaagagagccagtgccccaccagggcacctttccacttgctggcacacagatttaccacaattaggatactgcttgtcctgtcatgccgggagagtctaaattactctgactttcaagaaaccaaaaatatgcatttttgatgttaggaagatttactgtgcattgggctgtgtcatttgatgaggaaaaaaccaaatgatctctttatgaaaatgaagaattgtagcctgtggaggtgaccaaggaaccagatcccaagaggcctctgccactgaaaggagatttttattacttgcgtttcctagacgggggggcactcgcgccaagcaggcccacggggcacactggtgtcagtcaaggggcagaaaggagccacaggaaagcccaggacagagcctgagtggggtttctgtgggaaaggcagggcagggcacccgtgtaggaatggctagtgtgaacagttccagtgggccctgggctgtaggagagatcactagctgcctgctaccaggccctggggtgatttcgggcaggcgggcagttagataagggaggtgggtagagccgaccacctgcctggaaccctgtgctggctataagccctgggagggccagtctctccctgtgtctgtaaggcccacaaatgccaaagcattaggaataagaaaatggacgtaatagaattgatcctgtgaggactggatgcctaactgccacatacagaatgtgagaaagcacagaacaactgccttcattgacaagatggtgcccagagctcaagacaggcacacagcaggaggatgccggcaggatccctcaacaagcttaccgtggtatctttcacaatgttaactgtcatcccagatgaacttttaatgacagtgtatctctgaagattgtgcttttagcgtattttcacttaaagtcatatctcatttagtagacctgccagattcctgaaaagttacacacaagccagctgacatgacctttgccagtcatgttgaccacgttctcaccgagctgtggactcctcactaggagcctttacctacggccagatggctgttgtcactgcctgtggtggggttacggtttcggactcacctgatccgttctgccgggattacctacggccagatggctgttgtcactgcctgtggtggggttatggtttcggacttacctgatccgttctgccgggattacctacggccagatggctgttgtcactgcctgtggtggggttatggtttcggacgcacctgatccgttctgccgggattttaaagtatgggagtttaggcatactttgcaagttgtttcttgaatatacttttctgaattatg

SEQ ID NO: 486 - DNA, 5031 bp, Homo sapiens
  source 1..5031: mol_type = unassigned DNA
gcggcggcggcggcggcggcggcagcggcggccaagcggccaggttggcggccggggctccgggccgcgcgaggccacggccacgccgcgccgctgcgcacaaccaacgaggcagagcgccgcccggcgcgagactgcggccgaagcgtggggcgcgcgtgcggaggaccaggcgcggcgcggctgcggctgagagtggagcctttcaggctggcatggagagcttaaggggcaactgaaggagacacactggccaagcgcggagttctgcttacttcagtcctgctgagatactctctcagtccgctcgcaccgaaggaagctgccttgggatcagagcagacataaagctagaaaaatttcaagatgaaattgaaatggccaatgagcacaccctcattcatccagcgagcattgaggaccccctagaggccaggcccatgagtgatgaagatcccgaggatgaagacgccttgccagccagacagaaacagtctccgccagtcaagaaaccctcaaaagtattttgccatggatatagaagatgaagaaaacatgagttccagcagcactgatgtgaaggaaaaccgcaatctggacaacgtgtcccccaaggatggcagcacacctgggcctggcgagggctctcagctctccaatgggggtggtggtggccccggcagaaagcggcccctggaggagggcagcaatggccactccaagtaccgcctgaagaaaaggaggaaaacaccagggcccgtcctccccaagaacgccctgatgcagctgaatgagatcaagcctggtttgcagtacacactcctgtcccagactgggcccgtgcacgcgcctttgtttgtcatgtctgtggaggtgaatggccaggtttttgagggctctggtcccacaaagaaaaaggcaaaactccatgctgctgagaaggccttgaggtctttcgttcagtttcctaatgcctctgaggcccacctggccatggggaggaccctgtctgtcaacacggacttcacatctgaccaggccgacttccctgacacgctcttcaatggttttgaaactcctgacaaggcggagcctcccttttacgtgggctccaatggggatgactccttcagttccagcggggacctcagcttgtctgcttccccggtgcctgccagcctagcccagcctcctctccctgtcttaccaccattcccacccccgagtgggaagaatcccgtgatgatcttgaacgaactgcgcccaggactcaagtatgacttcctctccgagagcggggagagccatgccaagagcttcgtcatgtctgtggtcgtggatggtcagttctttgaaggctcggggagaaacaagaagcttgccaaggcccgggctgcgcagtctgccctggccgccatttttaacttgcacttggatcagacgccatctcgccagcctattcccagtgagggtcttcagctgcatttaccgcaggttttagctgacgctgtctcacgcctggtcctgggtaagtttggtgacctgaccgacaacttctcctcccctcacgctcgcagaaaagtgctggctggagtcgtcatgacaacaggcacagatgttaaagatgccaaggtgataagtgtttctacaggaacaaaatgtattaatggtgaatacatgagtgatcgtggccttgcattaaatgactgccatgcagaaataatatctcggagatccttgctcagatttctttatacacaacttgagctttacttaaataacaaagatgatcaaaaaagatccatctttcagaaatcagagcgaggggggtttaggctgaaggagaatgtccagtttcatctgtacatcagcacctctccctgtggagatgccagaatcttctcaccacatgagccaatcctggaagaaccagcagatagacacccaaatcgtaaagcaagaggacagctacggaccaaaatagagtctggtgaggggacgattccagtgcgctccaatgcgagcatccaaacgtgggacggggtgctgcaaggggagcggctgctcaccatgtcctgcagtgacaagattgcacgctggaacgtggtgggcatccagggatccctgctcagcattttcgtggagcccatttacttctcgagcatcatcctgggcagcctttaccacggggaccacctttccagggccatgtaccagcggatctccaacatagaggacctgccacctctctacaccctcaacaagcctttgctcagtggcatcagcaatgcagaagcacggcagccagggaaggcccccaacttcagtgtcaactggacggtaggcgactccgctattgaggtcatcaacgccacgactgggaaggatgagctgggccgcgcgtcccgcctgtgtaagcacgcgttgtactgtcgctggatgcgtgtgcacggcaaggttccctcccacttactacgctccaagattaccaagcccaacgtgtaccatgagtccaagctggcggcaaaggagtaccaggccgccaaggcgcgtctgttcacagccttcatcaaggcggggctgggggcctgggtggagaagcccaccgagcaggaccagttctcactcacgccctgacccgggcagacatgatggggggtgcagggggctgtgggcatccagcgtcatcctccagaacctcacatctgaactgggggcaggtgcataccttggggagggagtagggggacacgggggaccaccaggtgtccacggttgtccccagcatctcacatcagacctggggcaggtgcgcagtgtggggaggggatggggtgcgtcagggcccagcatcgccgcctggcatctctctgccgcagcatttccccttctgaaccgtccagtgactgctttcaatctcggtttacgtttagaaattgagttctactgagtagggcttccttaagtttaggaaaatagaaattactttgtgtgaaattcttgaataaataatttattcagagctaggaatgtggtttataaaataggaagtaattgtgtcaggtcacttttatgccacattattttaattgcaaaaaagcatctatatatggaggagggtgggaaaatagaggtaggaaatagtagcctaaaggaaatcgccacacgtctgtctaaacttaggtctcttttctccgtaggtacctccctgggtagttccacacactaggttgtaacagtctctccctgaggagcagactcccagcatggtgtagcgtggccctgtcatgcacatggggtcccgcagcagtgactgtgtgtcctgcagaggcgtgacccaggcccctgtagccctcagcctcctctagaagcttctgtactccttgtaggatcagatcatggaaaacttttctcagtttacttctaagtaatcacagataatacatggccagtaatcccaggctggccattcattcaggttttttaaaggatatttaacttttatggactagaaggaatcacgagggctactgcacaatacatggcctaagttccctctgttccttcctctgaatcgaatggatgtgggtgaccgcccgaaggccttcacaggatggaagtagaatgatttcagtagatactcattcttggaaaatgccatagttttaaattattgtttccagctttatcaaagacatgtttgaaaaataaaaagcatccaagtgagagctggtgagaccacgtgctgctggcgtagtgtaggccagacattgacagtcctgacgggagctcagggctgcccagcgcccagcgtgcacgggacggccccacgacagagggagtcagcccgggaggtcaggagcgcggcgggcgagggccctgtgtggaccacctccaccaagctcagagatttgcaccaggtgccttgttgcctccgctcaggatgaaagaggagctgagagaagtgctctgcctgccagtgcagtgcccagctccaaggctctagagggtgttcaggtacactgaggaggggacggctccgtcttcacattgtgcacagatctgaggatgggattagcgaagctgtggagactgcacatccggacctgcccatgtctcaaaacaaacacatgtacagtggctctttttccttctcaaacactttaccccagaagcaggtggtctgccccaggcataaagaaggaaaattggccatctttcccacctctaaattctgtaaaattatagacttgctcaaaagattcctttttatcatccccacgctgtgtaagtggaaagggcattgtgttccgtgtgtgtccagtttacagcgtctctgccccctagcgtgttttgtgacaatctccctgggtgaggagtgggtgcacccagccccgaggccagtggttgctcggggccttccgtgtgagttctagtgttcacttgatgccggggaatagaattagagaaaactctgacctgccgggttccagggactggtggaggtggatggcaggtccgactcgaccatgacttagttgtaagggtgtgtcggctttttcagtctcatgtgaaaatcctcctgtctctggcagcactgtctgcactttcttgtttactgtttgaagggacgagtaccaagccacaagaacacttcttttggccacagcataagctgatggtatgtaaggaaccgatgggccattaaacatgaactgaacggttaaaagcacagtctatggaacgctaatggagtcagcccctaaagctgtttgctttttcaggctttggattacatgcttttaatttgattttagaatctggacactttctatgaatgtaattcggctgagaaacatgttgctgagatgcaatcctcagtgttctctgtatgtaaatctgtgtatacaccacacgttacaactgcatgagcttcctctcgcacaagaccagctggaactgagcatgagacgctgtcaaatacagacaaaggatttgagatgttctcaataaaaagaaaatgtttcacta

SEQ ID NO: 487 - DNA, 4913 bp, Homo sapiens
  source 1..4913: mol_type = unassigned DNA
gcggcggcggcggcggcggcggcagcggcggccaagcggccaggttggcggccggggctccgggccgcgcgaggccacggccacgccgcgccgctgcgcacaaccaacgaggcagagcgccgcccggcgcgagactgcggccgaagcgtggggcgcgcgtgcggaggaccaggcgcggcgcggctgcggctgagagtggagcctttcaggctggcatggagagcttaaggggcaactgaaggagacacactggccaagcgcggagttctgcttacttcagtcctgctgagatactctctcagtccgctcgcaccgaaggaagctgccttgggatcagagcagacataaagctagaaaaatttcaagacagaaacagtctccgccagtcaagaaaccctcaaaagtattttgccatggatatagaagatgaagaaaacatgagttccagcagcactgatgtgaaggaaaaccgcaatctggacaacgtgtcccccaaggatggcagcacacctgggcctggcgagggctctcagctctccaatgggggtggtggtggccccggcagaaagcggcccctggaggagggcagcaatggccactccaagtaccgcctgaagaaaaggaggaaaacaccagggcccgtcctccccaagaacgccctgatgcagctgaatgagatcaagcctggtttgcagtacacactcctgtcccagactgggcccgtgcacgcgcctttgtttgtcatgtctgtggaggtgaatggccaggtttttgagggctctggtcccacaaagaaaaaggcaaaactccatgctgctgagaaggccttgaggtctttcgttcagtttcctaatgcctctgaggcccacctggccatggggaggaccctgtctgtcaacacggacttcacatctgaccaggccgacttccctgacacgctcttcaatggttttgaaactcctgacaaggcggagcctcccttttacgtgggctccaatggggatgactccttcagttccagcggggacctcagcttgtctgcttccccggtgcctgccagcctagcccagcctcctctccctgtcttaccaccattcccacccccgagtgggaagaatcccgtgatgatcttgaacgaactgcgcccaggactcaagtatgacttcctctccgagagcggggagagccatgccaagagcttcgtcatgtctgtggtcgtggatggtcagttctttgaaggctcggggagaaacaagaagcttgccaaggcccgggctgcgcagtctgccctggccgccatttttaacttgcacttggatcagacgccatctcgccagcctattcccagtgagggtcttcagctgcatttaccgcaggttttagctgacgctgtctcacgcctggtcctgggtaagtttggtgacctgaccgacaacttctcctcccctcacgctcgcagaaaagtgctggctggagtcgtcatgacaacaggcacagatgttaaagatgccaaggtgataagtgtttctacaggaacaaaatgtattaatggtgaatacatgagtgatcgtggccttgcattaaatgactgccatgcagaaataatatctcggagatccttgctcagatttctttatacacaacttgagctttacttaaataacaaagatgatcaaaaaagatccatctttcagaaatcagagcgaggggggtttaggctgaaggagaatgtccagtttcatctgtacatcagcacctctccctgtggagatgccagaatcttctcaccacatgagccaatcctggaagaaccagcagatagacacccaaatcgtaaagcaagaggacagctacggaccaaaatagagtctggtgaggggacgattccagtgcgctccaatgcgagcatccaaacgtgggacggggtgctgcaaggggagcggctgctcaccatgtcctgcagtgacaagattgcacgctggaacgtggtgggcatccagggatccctgctcagcattttcgtggagcccatttacttctcgagcatcatcctgggcagcctttaccacggggaccacctttccagggccatgtaccagcggatctccaacatagaggacctgccacctctctacaccctcaacaagcctttgctcagtggcatcagcaatgcagaagcacggcagccagggaaggcccccaacttcagtgtcaactggacggtaggcgactccgctattgaggtcatcaacgccacgactgggaaggatgagctgggccgcgcgtcccgcctgtgtaagcacgcgttgtactgtcgctggatgcgtgtgcacggcaaggttccctcccacttactacgctccaagattaccaagcccaacgtgtaccatgagtccaagctggcggcaaaggagtaccaggccgccaaggcgcgtctgttcacagccttcatcaaggcggggctgggggcctgggtggagaagcccaccgagcaggaccagttctcactcacgccctgacccgggcagacatgatggggggtgcagggggctgtgggcatccagcgtcatcctccagaacctcacatctgaactgggggcaggtgcataccttggggagggagtagggggacacgggggaccaccaggtgtccacggttgtccccagcatctcacatcagacctggggcaggtgcgcagtgtggggaggggatggggtgcgtcagggcccagcatcgccgcctggcatctctctgccgcagcatttccccttctgaaccgtccagtgactgctttcaatctcggtttacgtttagaaattgagttctactgagtagggcttccttaagtttaggaaaatagaaattactttgtgtgaaattcttgaataaataatttattcagagctaggaatgtggtttataaaataggaagtaattgtgtcaggtcacttttatgccacattattttaattgcaaaaaagcatctatatatggaggagggtgggaaaatagaggtaggaaatagtagcctaaaggaaatcgccacacgtctgtctaaacttaggtctcttttctccgtaggtacctccctgggtagttccacacactaggttgtaacagtctctccctgaggagcagactcccagcatggtgtagcgtggccctgtcatgcacatggggtcccgcagcagtgactgtgtgtcctgcagaggcgtgacccaggcccctgtagccctcagcctcctctagaagcttctgtactccttgtaggatcagatcatggaaaacttttctcagtttacttctaagtaatcacagataatacatggccagtaatcccaggctggccattcattcaggttttttaaaggatatttaacttttatggactagaaggaatcacgagggctactgcacaatacatggcctaagttccctctgttccttcctctgaatcgaatggatgtgggtgaccgcccgaaggccttcacaggatggaagtagaatgatttcagtagatactcattcttggaaaatgccatagttttaaattattgtttccagctttatcaaagacatgtttgaaaaataaaaagcatccaagtgagagctggtgagaccacgtgctgctggcgtagtgtaggccagacattgacagtcctgacgggagctcagggctgcccagcgcccagcgtgcacgggacggccccacgacagagggagtcagcccgggaggtcaggagcgcggcgggcgagggccctgtgtggaccacctccaccaagctcagagatttgcaccaggtgccttgttgcctccgctcaggatgaaagaggagctgagagaagtgctctgcctgccagtgcagtgcccagctccaaggctctagagggtgttcaggtacactgaggaggggacggctccgtcttcacattgtgcacagatctgaggatgggattagcgaagctgtggagactgcacatccggacctgcccatgtctcaaaacaaacacatgtacagtggctctttttccttctcaaacactttaccccagaagcaggtggtctgccccaggcataaagaaggaaaattggccatctttcccacctctaaattctgtaaaattatagacttgctcaaaagattcctttttatcatccccacgctgtgtaagtggaaagggcattgtgttccgtgtgtgtccagtttacagcgtctctgccccctagcgtgttttgtgacaatctccctgggtgaggagtgggtgcacccagccccgaggccagtggttgctcggggccttccgtgtgagttctagtgttcacttgatgccggggaatagaattagagaaaactctgacctgccgggttccagggactggtggaggtggatggcaggtccgactcgaccatgacttagttgtaagggtgtgtcggctttttcagtctcatgtgaaaatcctcctgtctctggcagcactgtctgcactttcttgtttactgtttgaagggacgagtaccaagccacaagaacacttcttttggccacagcataagctgatggtatgtaaggaaccgatgggccattaaacatgaactgaacggttaaaagcacagtctatggaacgctaatggagtcagcccctaaagctgtttgctttttcaggctttggattacatgcttttaatttgattttagaatctggacactttctatgaatgtaattcggctgagaaacatgttgctgagatgcaatcctcagtgttctctgtatgtaaatctgtgtatacaccacacgttacaactgcatgagcttcctctcgcacaagaccagctggaactgagcatgagacgctgtcaaatacagacaaaggatttgagatgttctcaataaaaagaaaatgtttcacta

SEQ ID NO: 488 - DNA, 5033 bp, Homo sapiens
  source 1..5033: mol_type = unassigned DNA
gcggcggcggcggcggcggcggcagcggcggccaagcggccaggttggcggccggggctccgggccgcgcgaggccacggccacgccgcgccgctgcgcacaaccaacgaggcagagcgccgcccggcgcgagactgcggccgaagcgtggggcgcgcgtgcggaggaccaggcgcggcgcggctgcggctgagagtggagcctttcaggctggcatggagagcttaaggggcaactgaaggagacacactggccaagcgcggagttctgcttacttcagtcctgctgagatactctctcagtccgctcgcaccgaaggaagctgccttgggatcagagcagacataaagctagaaaaatttcaagacagaaacagtctccgccagtcaagaaaccctcaaaagtattttgccatggatatagaagatgaagaaaacatgagttccagcagcactgatgtgaaggaaaaccgcaatctggacaacgtgtcccccaaggatggcagcacacctgggcctggcgagggctctcagctctccaatgggggtggtggtggccccggcagaaagcggcccctggaggagggcagcaatggccactccaagtaccgcctgaagaaaaggaggaaaacaccagggcccgtcctccccaagaacgccctgatgcagctgaatgagatcaagcctggtttgcagtacacactcctgtcccagactgggcccgtgcacgcgcctttgtttgtcatgtctgtggaggtgaatggccaggtttttgagggctctggtcccacaaagaaaaaggcaaaactccatgctgctgagaaggccttgaggtctttcgttcagtttcctaatgcctctgaggcccacctggccatggggaggaccctgtctgtcaacacggacttcacatctgaccaggccgacttccctgacacgctcttcaatggttttgaaactcctgacaaggcggagcctcccttttacgtgggctccaatggggatgactccttcagttccagcggggacctcagcttgtctgcttccccggtgcctgccagcctagcccagcctcctctccctgtcttaccaccattcccacccccgagtgggaagaatcccgtgatgatcttgaacgaactgcgcccaggactcaagtatgacttcctctccgagagcggggagagccatgccaagagcttcgtcatgtctgtggtcgtggatggtcagttctttgaaggctcggggagaaacaagaagcttgccaaggcccgggctgcgcagtctgccctggccgccatttttaacttgcacttggatcagacgccatctcgccagcctattcccagtgagggtcttcagctgcatttaccgcaggttttagctgacgctgtctcacgcctggtcctgggtaagtttggtgacctgaccgacaacttctcctcccctcacgctcgcagaaaagtgctggctggagtcgtcatgacaacaggcacagatgttaaagatgccaaggtgataagtgtttctacaggaacaaaatgtattaatggtgaatacatgagtgatcgtggccttgcattaaatgactgccatgcagaaataatatctcggagatccttgctcagatttctttatacacaacttgagctttacttaaataacaaagatgatcaaaaaagatccatctttcagaaatcagagcgaggggggtttaggctgaaggagaatgtccagtttcatctgtacatcagcacctctccctgtggagatgccagaatcttctcaccacatgagccaatcctggaagggtctcgctcttacacccaggctggagtgcagtggtgcaatcatggctcactgcagcctcgacctcctgggctcttaagcgatccttccacctcaaccttccaaggagctgggactacagaaccagcagatagacacccaaatcgtaaagcaagaggacagctacggaccaaaatagagtctggtgaggggacgattccagtgcgctccaatgcgagcatccaaacgtgggacggggtgctgcaaggggagcggctgctcaccatgtcctgcagtgacaagattgcacgctggaacgtggtgggcatccagggatccctgctcagcattttcgtggagcccatttacttctcgagcatcatcctgggcagcctttaccacggggaccacctttccagggccatgtaccagcggatctccaacatagaggacctgccacctctctacaccctcaacaagcctttgctcagtggcatcagcaatgcagaagcacggcagccagggaaggcccccaacttcagtgtcaactggacggtaggcgactccgctattgaggtcatcaacgccacgactgggaaggatgagctgggccgcgcgtcccgcctgtgtaagcacgcgttgtactgtcgctggatgcgtgtgcacggcaaggttccctcccacttactacgctccaagattaccaagcccaacgtgtaccatgagtccaagctggcggcaaaggagtaccaggccgccaaggcgcgtctgttcacagccttcatcaaggcggggctgggggcctgggtggagaagcccaccgagcaggaccagttctcactcacgccctgacccgggcagacatgatggggggtgcagggggctgtgggcatccagcgtcatcctccagaacctcacatctgaactgggggcaggtgcataccttggggagggagtagggggacacgggggaccaccaggtgtccacggttgtccccagcatctcacatcagacctggggcaggtgcgcagtgtggggaggggatggggtgcgtcagggcccagcatcgccgcctggcatctctctgccgcagcatttccccttctgaaccgtccagtgactgctttcaatctcggtttacgtttagaaattgagttctactgagtagggcttccttaagtttaggaaaatagaaattactttgtgtgaaattcttgaataaataatttattcagagctaggaatgtggtttataaaataggaagtaattgtgtcaggtcacttttatgccacattattttaattgcaaaaaagcatctatatatggaggagggtgggaaaatagaggtaggaaatagtagcctaaaggaaatcgccacacgtctgtctaaacttaggtctcttttctccgtaggtacctccctgggtagttccacacactaggttgtaacagtctctccctgaggagcagactcccagcatggtgtagcgtggccctgtcatgcacatggggtcccgcagcagtgactgtgtgtcctgcagaggcgtgacccaggcccctgtagccctcagcctcctctagaagcttctgtactccttgtaggatcagatcatggaaaacttttctcagtttacttctaagtaatcacagataatacatggccagtaatcccaggctggccattcattcaggttttttaaaggatatttaacttttatggactagaaggaatcacgagggctactgcacaatacatggcctaagttccctctgttccttcctctgaatcgaatggatgtgggtgaccgcccgaaggccttcacaggatggaagtagaatgatttcagtagatactcattcttggaaaatgccatagttttaaattattgtttccagctttatcaaagacatgtttgaaaaataaaaagcatccaagtgagagctggtgagaccacgtgctgctggcgtagtgtaggccagacattgacagtcctgacgggagctcagggctgcccagcgcccagcgtgcacgggacggccccacgacagagggagtcagcccgggaggtcaggagcgcggcgggcgagggccctgtgtggaccacctccaccaagctcagagatttgcaccaggtgccttgttgcctccgctcaggatgaaagaggagctgagagaagtgctctgcctgccagtgcagtgcccagctccaaggctctagagggtgttcaggtacactgaggaggggacggctccgtcttcacattgtgcacagatctgaggatgggattagcgaagctgtggagactgcacatccggacctgcccatgtctcaaaacaaacacatgtacagtggctctttttccttctcaaacactttaccccagaagcaggtggtctgccccaggcataaagaaggaaaattggccatctttcccacctctaaattctgtaaaattatagacttgctcaaaagattcctttttatcatccccacgctgtgtaagtggaaagggcattgtgttccgtgtgtgtccagtttacagcgtctctgccccctagcgtgttttgtgacaatctccctgggtgaggagtgggtgcacccagccccgaggccagtggttgctcggggccttccgtgtgagttctagtgttcacttgatgccggggaatagaattagagaaaactctgacctgccgggttccagggactggtggaggtggatggcaggtccgactcgaccatgacttagttgtaagggtgtgtcggctttttcagtctcatgtgaaaatcctcctgtctctggcagcactgtctgcactttcttgtttactgtttgaagggacgagtaccaagccacaagaacacttcttttggccacagcataagctgatggtatgtaaggaaccgatgggccattaaacatgaactgaacggttaaaagcacagtctatggaacgctaatggagtcagcccctaaagctgtttgctttttcaggctttggattacatgcttttaatttgattttagaatctggacactttctatgaatgtaattcggctgagaaacatgttgctgagatgcaatcctcagtgttctctgtatgtaaatctgtgtatacaccacacgttacaactgcatgagcttcctctcgcacaagaccagctggaactgagcatgagacgctgtcaaatacagacaaaggatttgagatgttctcaataaaaagaaaatgtttcacta

SEQ ID NO: 489 - DNA, 3563 bp, Homo sapiens
  source 1..3563: mol_type = unassigned DNA
gcggcggcggcggcggcggcggcagcggcggccaagcggccaggttggcggccggggctccgggccgcgcgaggccacggccacgccgcgccgctgcgcacaaccaacgaggcagagcgccgcccggcgcgagactgcggccgaagcgtggggcgcgcgtgcggaggaccaggcgcggcgcggctgcggctgagagtggagcctttcaggctggcatggagagcttaaggggcaactgaaggagacacactggccaagcgcggagttctgcttacttcagtcctgctgagatactctctcagtccgctcgcaccgaaggaagctgccttgggatcagagcagacataaagctagaaaaatttcaagacagaaacagtctccgccagtcaagaaaccctcaaaagtattttgccatggatatagaagatgaagaaaacatgagttccagcagcactgatgtgaaggaaaaccgcaatctggacaacgtgtcccccaaggatggcagcacacctgggcctggcgagggctctcagctctccaatgggggtggtggtggccccggcagaaagcggcccctggaggagggcagcaatggccactccaagtaccgcctgaagaaaaggaggaaaacaccagggcccgtcctccccaagaacgccctgatgcagctgaatgagatcaagcctggtttgcagtacacactcctgtcccagactgggcccgtgcacgcgcctttgtttgtcatgtctgtggaggtgaatggccaggtttttgagggctctggtcccacaaagaaaaaggcaaaactccatgctgctgagaaggccttgaggtctttcgttcagtttcctaatgcctctgaggcccacctggccatggggaggaccctgtctgtcaacacggacttcacatctgaccaggccgacttccctgacacgctcttcaatggttttgaaactcctgacaaggcggagcctcccttttacgtgggctccaatggggatgactccttcagttccagcggggacctcagcttgtctgcttccccggtgcctgccagcctagcccagcctcctctccctgtcttaccaccattcccacccccgagtgggaagaatcccgtgatgatcttgaacgaactgcgcccaggactcaagtatgacttcctctccgagagcggggagagccatgccaagagcttcgtcatgtctgtggtcgtggatggtcagttctttgaaggctcggggagaaacaagaagcttgccaaggcccgggctgcgcagtctgccctggccgccatttttaacttgcacttggatcagacgccatctcgccagcctattcccagtgagggtcttcagctgcatttaccgcaggttttagctgacgctgtctcacgcctggtcctgggtaagtttggtgacctgaccgacaacttctcctcccctcacgctcgcagaaaagtgctggctggagtcgtcatgacaacaggcacagatgttaaagatgccaaggtgataagtgtttctacaggaacaaaatgtattaatggtgaatacatgagtgatcgtggccttgcattaaatgactgccatgcagaaataatatctcggagatccttgctcagatttctttatacacaacttgagctttacttaaataacaaagatgatcaaaaaagatccatctttcagaaatcagagcgaggggggtttaggctgaaggagaatgtccagtttcatctgtacatcagcacctctccctgtggagatgccagaatcttctcaccacatgagccaatcctggaagggtctcgctcttacacccaggctggagtgcagtggtgcaatcatggctcactgcagcctcgacctcctgggctcttaagcgatccttccacctcaaccttccaaggagctgggactacagaaccagcagatagacacccaaatcgtaaagcaagaggacagctacggaccaaaatagagtctggtgaggggacgattccagtgcgctccaatgcgagcatccaaacgtgggacggggtgctgcaaggggagcggctgctcaccatgtcctgcagtgacaagattgcacgctggaacgtggtgggcatccagggatccctgctcagcattttcgtggagcccatttacttctcgagcatcatcctgggcagcctttaccacggggaccacctttccagggccatgtaccagcggatctccaacatagaggacctgccacctctctacaccctcaacaagcctttgctcagtggcatcagcaatgcagaagcacggcagccagggaaggcccccaacttcagtgtcaactggacggtaggcgactccgctattgaggtcatcaacgccacgactgggaaggatgagctgggccgcgcgtcccgcctgtgtaagcacgcgttgtactgtcgctggatgcgtgtgcacggcaaggttccctcccacttactacgctccaagattaccaagcccaacgtgtaccatgagtccaagctggcggcaaaggagtaccaggccgccaaggtacactgaggaggggacggctccgtcttcacattgtgcacagatctgaggatgggattagcgaagctgtggagactgcacatccggacctgcccatgtctcaaaacaaacacatgtacagtggctctttttccttctcaaacactttaccccagaagcaggtggtctgccccaggcataaagaaggaaaattggccatctttcccacctctaaattctgtaaaattatagacttgctcaaaagattcctttttatcatccccacgctgtgtaagtggaaagggcattgtgttccgtgtgtgtccagtttacagcgtctctgccccctagcgtgttttgtgacaatctccctgggtgaggagtgggtgcacccagccccgaggccagtggttgctcggggccttccgtgtgagttctagtgttcacttgatgccggggaatagaattagagaaaactctgacctgccgggttccagggactggtggaggtggatggcaggtccgactcgaccatgacttagttgtaagggtgtgtcggctttttcagtctcatgtgaaaatcctcctgtctctggcagcactgtctgcactttcttgtttactgtttgaagggacgagtaccaagccacaagaacacttcttttggccacagcataagctgatggtatgtaaggaaccgatgggccattaaacatgaactgaacggttaaaagcacagtctatggaacgctaatggagtcagcccctaaagctgtttgctttttcaggctttggattacatgcttttaatttgattttagaatctggacactttctatgaatgtaattcggctgagaaacatgttgctgagatgcaatcctcagtgttctctgtatgtaaatctgtgtatacaccacacgttacaactgcatgagcttcctctcgcacaagaccagctggaactgagcatgagacgctgtcaaatacagacaaaggatttgagatgttctcaataaaaagaaaatgtttcacta

SEQ ID NO: 490 - DNA, 6882 bp, Homo sapiens
  source 1..6882: mol_type = unassigned DNA
gcggcggcggcggcggcggcggcagcggcggccaagcggccaggttggcggccggggctccgggccgcgcgaggccacggccacgccgcgccgctgcgcacaaccaacgaggcagagcgccgcccggcgcgagactgcggccgaagcgtggggcgcgcgtgcggaggaccaggcgcggcgcggctgcggctgagagtggagcctttcaggctggcatggagagcttaaggggcaactgaaggagacacactggccaagcgcggagttctgcttacttcagtcctgctgagatactctctcagtccgctcgcaccgaaggaagctgccttgggatcagagcagacataaagctagaaaaatttcaagacagaaacagtctccgccagtcaagaaaccctcaaaagtattttgccatggatatagaagatgaagaaaacatgagttccagcagcactgatgtgaaggaaaaccgcaatctggacaacgtgtcccccaaggatggcagcacacctgggcctggcgagggctctcagctctccaatgggggtggtggtggccccggcagaaagcggcccctggaggagggcagcaatggccactccaagtaccgcctgaagaaaaggaggaaaacaccagggcccgtcctccccaagaacgccctgatgcagctgaatgagatcaagcctggtttgcagtacacactcctgtcccagactgggcccgtgcacgcgcctttgtttgtcatgtctgtggaggtgaatggccaggtttttgagggctctggtcccacaaagaaaaaggcaaaactccatgctgctgagaaggccttgaggtctttcgttcagtttcctaatgcctctgaggcccacctggccatggggaggaccctgtctgtcaacacggacttcacatctgaccaggccgacttccctgacacgctcttcaatggttttgaaactcctgacaaggcggagcctcccttttacgtgggctccaatggggatgactccttcagttccagcggggacctcagcttgtctgcttccccggtgcctgccagcctagcccagcctcctctccctgtcttaccaccattcccacccccgagtgggaagaatcccgtgatgatcttgaacgaactgcgcccaggactcaagtatgacttcctctccgagagcggggagagccatgccaagagcttcgtcatgtctgtggtcgtggatggtcagttctttgaaggctcggggagaaacaagaagcttgccaaggcccgggctgcgcagtctgccctggccgccatttttaacttgcacttggatcagacgccatctcgccagcctattcccagtgagggtcttcagctgcatttaccgcaggttttagctgacgctgtctcacgcctggtcctgggtaagtttggtgacctgaccgacaacttctcctcccctcacgctcgcagaaaagtgctggctggagtcgtcatgacaacaggcacagatgttaaagatgccaaggtgataagtgtttctacaggaacaaaatgtattaatggtgaatacatgagtgatcgtggccttgcattaaatgactgccatgcagaaataatatctcggagatccttgctcagatttctttatacacaacttgagctttacttaaataacaaagatgatcaaaaaagatccatctttcagaaatcagagcgaggggggtttaggctgaaggagaatgtccagtttcatctgtacatcagcacctctccctgtggagatgccagaatcttctcaccacatgagccaatcctggaagaaccagcagatagacacccaaatcgtaaagcaagaggacagctacggaccaaaatagagtctggtgaggggacgattccagtgcgctccaatgcgagcatccaaacgtgggacggggtgctgcaaggggagcggctgctcaccatgtcctgcagtgacaagattgcacgctggaacgtggtgggcatccagggatccctgctcagcattttcgtggagcccatttacttctcgagcatcatcctgggcagcctttaccacggggaccacctttccagggccatgtaccagcggatctccaacatagaggacctgccacctctctacaccctcaacaagcctttgctcagtggcatcagcaatgcagaagcacggcagccagggaaggcccccaacttcagtgtcaactggacggtaggcgactccgctattgaggtcatcaacgccacgactgggaaggatgagctgggccgcgcgtcccgcctgtgtaagcacgcgttgtactgtcgctggatgcgtgtgcacggcaaggttccctcccacttactacgctccaagattaccaagcccaacgtgtaccatgagtccaagctggcggcaaaggagtaccaggccgccaaggcgcgtctgttcacagccttcatcaaggcggggctgggggcctgggtggagaagcccaccgagcaggaccagttctcactcacgccctgacccgggcagacatgatggggggtgcagggggctgtgggcatccagcgtcatcctccagaacctcacatctgaactgggggcaggtgcataccttggggagggagtagggggacacgggggaccaccaggtgtccacggttgtccccagcatctcacatcagacctggggcaggtgcgcagtgtggggaggggatggggtgcgtcagggcccagcatcgccgcctggcatctctctgccgcagcatttccccttctgaaccgtccagtgactgctttcaatctcggtttacgtttagaaattgagttctactgagtagggcttccttaagtttaggaaaatagaaattactttgtgtgaaattcttgaataaataatttattcagagctaggaatgtggtttataaaataggaagtaattgtgtcaggtcacttttatgccacattattttaattgcaaaaaagcatctatatatggaggagggtgggaaaatagaggtaggaaatagtagcctaaaggaaatcgccacacgtctgtctaaacttaggtctcttttctccgtaggtacctccctgggtagttccacacactaggttgtaacagtctctccctgaggagcagactcccagcatggtgtagcgtggccctgtcatgcacatggggtcccgcagcagtgactgtgtgtcctgcagaggcgtgacccaggcccctgtagccctcagcctcctctagaagcttctgtactccttgtaggatcagatcatggaaaacttttctcagtttacttctaagtaatcacagataatacatggccagtaatcccaggctggccattcattcaggttttttaaaggatatttaacttttatggactagaaggaatcacgagggctactgcacaatacatggcctaagttccctctgttccttcctctgaatcgaatggatgtgggtgaccgcccgaaggccttcacaggatggaagtagaatgatttcagtagatactcattcttggaaaatgccatagttttaaattattgtttccagctttatcaaagacatgtttgaaaaataaaaagcatccaagtgagagctggtgagaccacgtgctgctggcgtagtgtaggccagacattgacagtcctgacgggagctcagggctgcccagcgcccagcgtgcacgggacggccccacgacagagggagtcagcccgggaggtcaggagcgcggcgggcgagggccctgtgtggaccacctccaccaagctcagagatttgcaccaggtgccttgttgcctccgctcaggatgaaagaggagctgagagaagtgctctgcctgccagtgcagtgcccagctccaaggctctagagggtgttcaggtgggtctcctggggccatggggagagattggtgcagaccttaccccacagcatacacctgccacagcgaaatccagggtgttggcacctgtgtgtccgtgatgagcctaggaaaccagagcaggggcagaggggcgtcatcctcccaccggacgctgggagctcagaccccaaaactgaaacaccgtggcttcggcggggggtgtgcctcctgatgtcaggagccccatccacgtgtgtccacacagatctcgtcgcagcacggcaggaaggggtgctgcttagggctcattgttggggacatgaccgggttcagcggctagaacatctgccccacagcagcctcctcctccaccgaagagggtagttgtctccctgaagcagtcacagcaggcgtctctgccgctccgtcaccacagtggggttttgttcaggcagatcgcgctggggttctgcacctgcagaaggagaggggtctgttgtcgctggctttcccccaagcaggctcttgcacactctagaaaaaacaccttgtaagtctgtgcatttttattgtcttgataaattgtatttttttctaatggggattgggagatggacttcgtttttaaaaatatgtggattttggttaccaagtttagtgttaatatattccatatacatacaaaactacccggtatgtctggcttttcccttctgtcaggtaatagctaaagtcagcatgattgctccctgtaccaccccaaataagtgagtgcctcaccttgtggggcctgagcagctaccttgagaccatgtgaggtggcacctttccggggtggactcgtgcggccttgaggacaggcacagggcaccctatcccaagccgtccaggcaggaggaaggcagccaaggcaactgggttctgggagccctgggtggggcagctgtggggaggaactgggttcggggagccctgggcggggcggctgttggggggaactgggttcggggtgccctgggcagggggctactggggggcggctgtgaggaggagttgggttcagggagccctgggcggggtggctgtcagggggaactgggttccgggagccctgggccggggcagggggcggctgtaggaaggaactggtttcggggagccctgggcggggcggctgtggggaggaaggtgacgtgcaggggaccagaggctctgcactgctcctaggacagctcatctgtaatcagaaaaaaaataaacaaaatacagaacgctgactcctccgtgagacagatcggggaccttagcactttaatccctcccttctgagcgctcggtgtgcacttttagactatagctgtttcattgacgtgtcactctccatccagtgtccttgatgtggcttttagagacttagcagaaaattcgacacaagcaggaacttgattttttaagaaaaaatattacattttgaggacattttgacaagtaggggaagagagggcttctgttgttttgttttgttttgttttgttaactaaacctgaagtattaattccacaaagacactgtccctcaggaccactcaggtacagctctgccagggacagagtcctgctagtgggaggtctcaggtggggcggtgtgttctgtgccatgaggcagcgacaggtccagatggatgtcgtcaccaccttcctcagctctcatcacctggtcgtacgccaggcccacctcttcccagcaagggacgccaaagaactgcagtttttattctgagtcttaatttaacttttcatcatcttttcctattttggagaattttttgtaattaaaagcaattattttaaaatgtgcaagccagtatctcacaaggcatggatttctgtggaatttatttttattcaaataaccatatttatctccaggctgtggaatcgccactttctttgtgaagacagtgtctctccttgtaatctcacacaggtacactgaggaggggacggctccgtcttcacattgtgcacagatctgaggatgggattagcgaagctgtggagactgcacatccggacctgcccatgtctcaaaacaaacacatgtacagtggctctttttccttctcaaacactttaccccagaagcaggtggtctgccccaggcataaagaaggaaaattggccatctttcccacctctaaattctgtaaaattatagacttgctcaaaagattcctttttatcatccccacgctgtgtaagtggaaagggcattgtgttccgtgtgtgtccagtttacagcgtctctgccccctagcgtgttttgtgacaatctccctgggtgaggagtgggtgcacccagccccgaggccagtggttgctcggggccttccgtgtgagttctagtgttcacttgatgccggggaatagaattagagaaaactctgacctgccgggttccagggactggtggaggtggatggcaggtccgactcgaccatgacttagttgtaagggtgtgtcggctttttcagtctcatgtgaaaatcctcctgtctctggcagcactgtctgcactttcttgtttactgtttgaagggacgagtaccaagccacaagaacacttcttttggccacagcataagctgatggtatgtaaggaaccgatgggccattaaacatgaactgaacggttaaaagcacagtctatggaacgctaatggagtcagcccctaaagctgtttgctttttcaggctttggattacatgcttttaatttgattttagaatctggacactttctatgaatgtaattcggctgagaaacatgttgctgagatgcaatcctcagtgttctctgtatgtaaatctgtgtatacaccacacgttacaactgcatgagcttcctctcgcacaagaccagctggaactgagcatgagacgctgtcaaatacagacaaaggatttgagatgttctcaataaaaagaaaatgtttcacta

SEQ ID NO: 491 - DNA, 704 bp, Homo sapiens
  source 1..704: mol_type = unassigned DNA
aaatgtcgctgttcagtgcgttgatcgattctcacatctgaagccagctgtgtattcttgagtggagcctttcaggctggcatggagagcttaaggggcaactgaaggagacacactggccaagcgcggagttctgcttacttcagtcctgctgagatactctctcagtccgctcgcaccgaaggaagctgccttgggatcagagcagacataaagctagaaaaatttcaagacagaaacagtctccgccagtcaagaaaccctcaaaagtattttgccatggatatagaagatgaagaaaacatgagttccagcagcactgatgtgaaggaaaaccgcaatctggacaacgtgtcccccaaggatggcagcacacctgggcctggcgagggctctcagctctccaatgggggtggtggtggccccggcagaaagcggcccctggaggagggcagcaatggccactccaagtaccgcctgaagaaaaggaggaaaacaccagggcccgtcctccccaagaacgccctgatgcagctgaatgagatcaagcctggtttgcagtacacactcctgtcccagactgggcccgtgcacgcgcctttgtttgtcatgtctgtggaggtgaatggccaggtttttgagggctctggtcccacaaagaaaaaggcaaaactccatgctgctgagaaggccttgaggtcttt

SEQ ID NO: 492 - DNA, 389 bp, Homo sapiens
  source 1..389: mol_type = unassigned DNA
cacactggccaagcgcggagttctgcttacttcagtcctgctgagatactctctcagtccgctcgcaccgaaggaagctgccttgggatcagagcagacataaagctagaaaaatttcaagatgaaattgaaatggccaatgagcacaccctcattcatccagcgagcattgaggaccccctagaggccaggcccatgagtgatgaagatcccgaggatgaagacgccttgccagccagacagaaacagtctccgccagtcaagaaaccctcaaaagtattttgccatggatatagaagatgaagaaaacatgagtaagatctaggcctatcacgtagtatcagatagctaattttatgttaacattttggtgtttttgcaaatgtatt

SEQ ID NO: 493 - DNA, 6604 bp, Homo sapiens
  source 1..6604: mol_type = unassigned DNA
caaaagtattttgccatggatatagaagatgaagaaaacatgagttccagcagcactgatgtgaaggaaaaccgcaatctggacaacgtgtcccccaaggatggcagcacacctgggcctggcgagggctctcagctctccaatgggggtggtggtggccccggcagaaagcggcccctggaggagggcagcaatggccactccaagtaccgcctgaagaaaaggaggaaaacaccagggcccgtcctccccaagaacgccctgatgcagctgaatgagatcaagcctggtttgcagtacacactcctgtcccagactgggcccgtgcacgcgcctttgtttgtcatgtctgtggaggtgaatggccaggtttttgagggctctggtcccacaaagaaaaaggcaaaactccatgctgctgagaaggccttgaggtctttcgttcagtttcctaatgcctctgaggcccacctggccatggggaggaccctgtctgtcaacacggacttcacatctgaccaggccgacttccctgacacgctcttcaatggttttgaaactcctgacaaggcggagcctcccttttacgtgggctccaatggggatgactccttcagttccagcggggacctcagcttgtctgcttccccggtgcctgccagcctagcccagcctcctctccctgtcttaccaccattcccacccccgagtgggaagaatcccgtgatgatcttgaacgaactgcgcccaggactcaagtatgacttcctctccgagagcggggagagccatgccaagagcttcgtcatgtctgtggtcgtggatggtcagttctttgaaggctcggggagaaacaagaagcttgccaaggcccgggctgcgcagtctgccctggccgccatttttaacttgcacttggatcagacgccatctcgccagcctattcccagtgagggtcttcagctgcatttaccgcaggttttagctgacgctgtctcacgcctggtcctgggtaagtttggtgacctgaccgacaacttctcctcccctcacgctcgcagaaaagtgctggctggagtcgtcatgacaacaggcacagatgttaaagatgccaaggtgataagtgtttctacaggaacaaaatgtattaatggtgaatacatgagtgatcgtggccttgcattaaatgactgccatgcagaaataatatctcggagatccttgctcagatttctttatacacaacttgagctttacttaaataacaaagatgatcaaaaaagatccatctttcagaaatcagagcgaggggggtttaggctgaaggagaatgtccagtttcatctgtacatcagcacctctccctgtggagatgccagaatcttctcaccacatgagccaatcctggaagggtctcgctcttacacccaggctggagtgcagtggtgcaatcatggctcactgcagcctcgacctcctgggctcttaagcgatccttccacctcaaccttccaaggagctgggactacagaaccagcagatagacacccaaatcgtaaagcaagaggacagctacggaccaaaatagagtctggtgaggggacgattccagtgcgctccaatgcgagcatccaaacgtgggacggggtgctgcaaggggagcggctgctcaccatgtcctgcagtgacaagattgcacgctggaacgtggtgggcatccagggatccctgctcagcattttcgtggagcccatttacttctcgagcatcatcctgggcagcctttaccacggggaccacctttccagggccatgtaccagcggatctccaacatagaggacctgccacctctctacaccctcaacaagcctttgctcagtggcatcagcaatgcagaagcacggcagccagggaaggcccccaacttcagtgtcaactggacggtaggcgactccgctattgaggtcatcaacgccacgactgggaaggatgagctgggccgcgcgtcccgcctgtgtaagcacgcgttgtactgtcgctggatgcgtgtgcacggcaaggttccctcccacttactacgctccaagattaccaagcccaacgtgtaccatgagtccaagctggcggcaaaggagtaccaggccgccaaggcgcgtctgttcacagccttcatcaaggcggggctgggggcctgggtggagaagcccaccgagcaggaccagttctcactcacgccctgacccgggcagacatgatggggggtgcagggggctgtgggcatccagcgtcatcctccagaacctcacatctgaactgggggcaggtgcataccttggggagggagtagggggacacgggggaccaccaggtgtccacggttgtccccagcatctcacatcagacctggggcaggtgcgcagtgtggggaggggatggggtgcgtcagggcccagcatcgccgcctggcatctctctgccgcagcatttccccttctgaaccgtccagtgactgctttcaatctcggtttacgtttagaaattgagttctactgagtagggcttccttaagtttaggaaaatagaaattactttgtgtgaaattcttgaataaataatttattcagagctaggaatgtggtttataaaataggaagtaattgtgtcaggtcacttttatgccacattattttaattgcaaaaaagcatctatatatggaggagggtgggaaaatagaggtaggaaatagtagcctaaaggaaatcgccacacgtctgtctaaacttaggtctcttttctccgtaggtacctccctgggtagttccacacactaggttgtaacagtctctccctgaggagcagactcccagcatggtgtagcgtggccctgtcatgcacatggggtcccgcagcagtgactgtgtgtcctgcagaggcgtgacccaggcccctgtagccctcagcctcctctagaagcttctgtactccttgtaggatcagatcatggaaaacttttctcagtttacttctaagtaatcacagataatacatggccagtaatcccaggctggccattcattcaggttttttaaaggatatttaacttttatggactagaaggaatcacgagggctactgcacaatacatggcctaagttccctctgttccttcctctgaatcgaatggatgtgggtgaccgcccgaaggccttcacaggatggaagtagaatgatttcagtagatactcattcttggaaaatgccatagttttaaattattgtttccagctttatcaaagacatgtttgaaaaataaaaagcatccaagtgagagctggtgagaccacgtgctgctggcgtagtgtaggccagacattgacagtcctgacgggagctcagggctgcccagcgcccagcgtgcacgggacggccccacgacagagggagtcagcccgggaggtcaggagcgcggcgggcgagggccctgtgtggaccacctccaccaagctcagagatttgcaccaggtgccttgttgcctccgctcaggatgaaagaggagctgagagaagtgctctgcctgccagtgcagtgcccagctccaaggctctagagggtgttcaggtgggtctcctggggccatggggagagattggtgcagaccttaccccacagcatacacctgccacagcgaaatccagggtgttggcacctgtgtgtccgtgatgagcctaggaaaccagagcaggggcagaggggcgtcatcctcccaccggacgctgggagctcagaccccaaaactgaaacaccgtggcttcggcggggggtgtgcctcctgatgtcaggagccccatccacgtgtgtccacacagatctcgtcgcagcacggcaggaaggggtgctgcttagggctcattgttggggacatgaccgggttcagcggctagaacatctgccccacagcagcctcctcctccaccgaagagggtagttgtctccctgaagcagtcacagcaggcgtctctgccgctccgtcaccacagtggggttttgttcaggcagatcgcgctggggttctgcacctgcagaaggagaggggtctgttgtcgctggctttcccccaagcaggctcttgcacactctagaaaaaacaccttgtaagtctgtgcatttttattgtcttgataaattgtatttttttctaatggggattgggagatggacttcgtttttaaaaatatgtggattttggttaccaagtttagtgttaatatattccatatacatacaaaactacccggtatgtctggcttttcccttctgtcaggtaatagctaaagtcagcatgattgctccctgtaccaccccaaataagtgagtgcctcaccttgtggggcctgagcagctaccttgagaccatgtgaggtggcacctttccggggtggactcgtgcggccttgaggacaggcacagggcaccctatcccaagccgtccaggcaggaggaaggcagccaaggcaactgggttctgggagccctgggtggggcagctgtggggaggaactgggttcggggagccctgggcggggcggctgttggggggaactgggttcggggtgccctgggcagggggctactggggggcggctgtgaggaggagttgggttcagggagccctgggcggggtggctgtcagggggaactgggttccgggagccctgggccggggcagggggcggctgtaggaaggaactggtttcggggagccctgggcggggcggctgtggggaggaaggtgacgtgcaggggaccagaggctctgcactgctcctaggacagctcatctgtaatcagaaaaaaaataaacaaaatacagaacgctgactcctccgtgagacagatcggggaccttagcactttaatccctcccttctgagcgctcggtgtgcacttttagactatagctgtttcattgacgtgtcactctccatccagtgtccttgatgtggcttttagagacttagcagaaaattcgacacaagcaggaacttgattttttaagaaaaaatattacattttgaggacattttgacaagtaggggaagagagggcttctgttgttttgttttgttttgttttgttaactaaacctgaagtattaattccacaaagacactgtccctcaggaccactcaggtacagctctgccagggacagagtcctgctagtgggaggtctcaggtggggcggtgtgttctgtgccatgaggcagcgacaggtccagatggatgtcgtcaccaccttcctcagctctcatcacctggtcgtacgccaggcccacctcttcccagcaagggacgccaaagaactgcagtttttattctgagtcttaatttaacttttcatcatcttttcctattttggagaattttttgtaattaaaagcaattattttaaaatgtgcaagccagtatctcacaaggcatggatttctgtggaatttatttttattcaaataaccatatttatctccaggctgtggaatcgccactttctttgtgaagacagtgtctctccttgtaatctcacacaggtacactgaggaggggacggctccgtcttcacattgtgcacagatctgaggatgggattagcgaagctgtggagactgcacatccggacctgcccatgtctcaaaacaaacacatgtacagtggctctttttccttctcaaacactttaccccagaagcaggtggtctgccccaggcataaagaaggaaaattggccatctttcccacctctaaattctgtaaaattatagacttgctcaaaagattcctttttatcatccccacgctgtgtaagtggaaagggcattgtgttccgtgtgtgtccagtttacagcgtctctgccccctagcgtgttttgtgacaatctccctgggtgaggagtgggtgcacccagccccgaggccagtggttgctcggggccttccgtgtgagttctagtgttcacttgatgccggggaatagaattagagaaaactctgacctgccgggttccagggactggtggaggtggatggcaggtccgactcgaccatgacttagttgtaagggtgtgtcggctttttcagtctcatgtgaaaatcctcctgtctctggcagcactgtctgcactttcttgtttactgtttgaagggacgagtaccaagccacaagaacacttcttttggccacagcataagctgatggtatgtaaggaaccgatgggccattaaacatgaactgaacggttaaaagcacagtctatggaacgctaatggagtcagcccctaaagctgtttgctttttcaggctttggattacatgcttttaatttgattttagaatctggacactttctatgaatgtaattcggctgagaaacatgttgctgagatgcaatcctcagtgttctctgtatgtaaatctgtgtatacaccacacgttacaactgcatgagcttcctctcgcacaagaccagctggaactgagcatgagacgctgtcaaatacagacaaaggatttgagatgttctcaataaaaagaaaatgtttcacta

SEQ ID NO: 494 - DNA, 736 bp, Homo sapiens
  source 1..736: mol_type = unassigned DNA
gtgatgatcttgaacgaactgcgcccaggactcaagtatgacttcctctccgagagcggggagagccatgccaagagcttcgtcatgtctgtggtcgtggatggtcagttctttgaaggctcggggagaaacaagaagcttgccaaggcccgggctgcgcagtctgccctggccgccatttttaacttgcacttggatcagacgccatctcgccagcctattcccagtgagggtcttcagctgcatttaccgcaggtctcatccaagaatctcacattcaagataagtgacaccagcccgtcagcagctgaaaacccaagtctgggtcaagatggcagcctctgggctcccacatgactggctggtggctgtttgctgttcctaagccgaggagcccatcaaagcagcgaatgagccagcacagcagtgagcacctatcagagcgcagggagggaggggcctccaacaactgttctagggcctgccagttgcctgggagtctctactttgaatttcctacatgggctgtatgaggacttccccgcatgcccaggctggaggtggacagccacccttccatttgacctccccagcgcagtgaaatcaggatgaaggaaggggaagttccagggtgggcttagattggcttacgtgaaagagaaaaagtaaaggagaaaatcacctttagttctcatctctaaatcctaaaactctctgattatgtattccttctttt

SEQ ID NO: 495 - DNA, 301 bp, Homo sapiens
  source 1..301: mol_type = unassigned DNA
tgacaacaggtgaacaccacaacgactgaatagaatagttccctaggcacagatgttaaagatgccaaggtgataagtgtttctacaggaacaaaatgtattaatggtgaatacatgagtgatcgtggccttgcattaaatgactgccatgcagaaataatatctcggagatccttgctcagatttctttatacacaacttgagctttacttaaataacaaagatgatcaaaaaagatccatctttcagaaatcagagcgaggggggtttaggctgaaggagaatgtccagtttcatctgt

SEQ ID NO: 496 - DNA, 5032 bp, Homo sapiens
  source 1..5032: mol_type = unassigned DNA
gcggcggcggcggcggcggcggcagcggcggccaagcggccaggttggcggccggggctccgggccgcgcgaggccacggccacgccgcgccgctgcgcacaaccaacgaggcagagcgccgcccggcgcgagactgcggccgaagcgtggggcgcgcgtgcggaggaccaggcgcggcgcggctgcggctgagagtggagcctttcaggctggcatggagagcttaaggggcaactgaaggagacacactggccaagcgcggagttctgcttacttcagtcctgctgagatactctctcagtccgctcgcaccgaaggaagctgccttgggatcagagcagacataaagctagaaaaatttcaagacagaaacagtctccgccagtcaagaaaccctcaaaagtattttgccatggatatagaagatgaagaaaacatgagttccagcagcactgatgtgaaggaaaaccgcaatctggacaacgtgtcccccaaggatggcagcacacctgggcctggcgagggctctcagctctccaatgggggtggtggtggccccggcagaaagcggcccctggaggagggcagcaatggccactccaagtaccgcctgaagaaaaggaggaaaacaccagggcccgtcctccccaagaacgccctgatgcagctgaatgagatcaagcctggtttgcagtacacactcctgtcccagactgggcccgtgcacgcgcctttgtttgtcatgtctgtggaggtgaatggccaggtttttgagggctctggtcccacaaagaaaaaggcaaaactccatgctgctgagaaggccttgaggtctttcgttcagtttcctaatgcctctgaggcccacctggccatggggaggaccctgtctgtcaacacggacttcacatctgaccaggccgacttccctgacacgctcttcaatggttttgaaactcctgacaaggcggagcctcccttttacgtgggctccaatggggatgactccttcagttccagcggggacctcagcttgtctgcttccccggtgcctgccagcctagcccagcctcctctccctgtcttaccaccattcccacccccgagtgggaagaatcccgtgatgatcttgaacgaactgcgcccaggactcaagtatgacttcctctccgagagcggggagagccatgccaagagcttcgtcatgtctgtggtcgtggatggtcagttctttgaaggctcggggagaaacaagaagcttgccaaggcccgggctgcgcagtctgccctggccgccatttttaacttgcacttggatcagacgccatctcgccagcctattcccagtgagggtcttcagctgcatttaccgcaggttttagctgacgctgtctcacgcctggtcctgggtaagtttggtgacctgaccgacaacttctcctcccctcacgctcgcagaaaagtgctggctggagtcgtcatgacaacaggcacagatgttaaagatgccaaggtgataagtgtttctacaggaacaaaatgtattaatggtgaatacatgagtgatcgtggccttgcattaaatgactgccatgcagaaataatatctcggagatccttgctcagatttctttatacacaacttgagctttacttaaataacaaagatgatcaaaaaagatccatctttcagaaatcagagcgaggggggtttaggctgaaggagaatgtccagtttcatctgtacatcagcacctctccctgtggagatgccagaatcttctcaccacatgagccaatcctggaagggtctcgctcttacacccaggctggagtgcagtggtgcaatcatggctcactgcagcctcgacctcctgggctcttaagcgatccttccacctcaaccttccaaggagctgggactacagaaccagcagatagacacccaaatcgtaaagcaagaggacagctacggaccaaaatagagtctggtgaggggacgattccagtgcgctccaatgcgagcatccaaacgtgggacggggtgctgcaaggggagcggctgctcaccatgtcctgcagtgacaagattgcacgctggaacgtggtgggcatccagggatccctgctcagcattttcgtggagcccatttacttctcgagcatcatcctgggcagcctttaccacggggaccacctttccagggccatgtaccagcggatctccaacatagaggacctgccacctctctacaccctcaacaagcctttgctcagtggcatcagcaatgcagaagcacggcagccagggaaggcccccaacttcagtgtcaactggacggtaggcgactccgctattgaggtcatcaacgccacgactgggaaggatgagctgggccgcgcgtcccgcctgtgtaagcacgcgttgtactgtcgctggatgcgtgtgcacggcaaggttccctcccacttactacgctccaagattaccaagcccaacgtgtaccatgagtccaagctggcggcaaaggagtaccaggccgccaaggcgcgtctgttcacagccttcatcaaggcggggctgggggcctgggtggagaagcccaccgagcaggaccagttctcactcacgccctgacccgggcagacatgatggggggtgcagggggctgtgggcatccagcgtcatcctccagaacctcacatctgaactgggggcaggtgcataccttggggagggagtagggggacacgggggaccaccaggtgtccacggttgtccccagcatctcacatcagacctggggcaggtgcgcagtgtggggaggggatggggtgcgtcagggcccagcatcgccgcctggcatctctctgccgcagcatttccccttctgaaccgtccagtgactgctttcaatctcggtttacgtttagaaattgagttctactgagtagggcttccttaagtttaggaaaatagaaattactttgtgtgaaattcttgaataaataatttattcagagctaggaatgtggtttataaaataggaagtaattgtgtcaggtcacttttatgccacattattttaattgcaaaaaagcatctatatatggaggagggtgggaaaatagaggtaggaaatagtagcctaaaggaaatcgccacacgtctgtctaaacttaggtctcttttctccgtaggtacctccctgggtagttccacacactaggttgtaacagtctctccctgaggagcagactcccagcatggtgtagcgtggccctgtcatgcacatggggtcccgcagcagtgactgtgtgtcctgcagaggcgtgacccaggcccctgtagccctcagcctcctctagaagcttctgtactccttgtaggatcagatcatggaaaacttttctcagtttacttctaagtaatcacagataatacatggccagtaatcccaggctggccattcattcaggttttttaaaggatatttaacttttatggactagaaggaatcacgagggctactgcacaatacatggcctaagttccctctgttccttcctctgaatcgaatggatgtgggtgaccgcccgaaggccttcacaggatggaagtagaatgatttcagtagatactcattcttggaaaatgccatagttttaaattattgtttccagctttatcaaagacatgtttgaaaaataaaaagcatccaagtgagagctggtgagaccacgtgctgctggcgtagtgtaggccagacattgacagtcctgacgggagctcagggctgcccagcgcccagcgtgcacgggacggccccacgacagagggagtcagcccgggaggtcaggagcgcggcgggcgagggccctgtgtggaccacctccaccaagctcagagatttgcaccaggtgccttgttgcctccgctcaggatgaaagaggagctgagagaagtgctctgcctgccagtgcagtgcccagctccaaggctctagagggtgttcaggtacactgaggaggggacggctccgtcttcacattgtgcacagatctgaggatgggattagcgaagctgtggagactgcacatccggacctgcccatgtctcaaaacaaacacatgtacagtggctctttttccttctcaaacactttaccccagaagcaggtggtctgccccaggcataaagaaggaaaattggccatctttcccacctctaaattctgtaaaattatagacttgctcaaaagattcctttttatcatccccacgctgtgtaagtggaaagggcattgtgttccgtgtgtgtccagtttacagcgtctctgccccctagcgtgttttgtgacaatctccctgggtgaggagtgggtgcacccagccccgaggccagtggttgctcggggccttccgtgtgagttctagtgttcacttgatgccggggaatagaattagagaaaactctgacctgccgggttccagggactggtggaggtggatggcaggtccgactcgaccatgacttagttgtaagggtgtgtcggctttttcagtctcatgtgaaaatcctcctgtctctggcagcactgtctgcactttcttgtttactgtttgaagggacgagtaccaagccacaagaacacttcttttggccacagcataagctgatggtatgtaaggaaccgatgggccattaaacatgaactgaacggttaaaagcacagtctatggaacgctaatggagtcagcccctaaagctgtttgctttttcaggctttggattacatgcttttaatttgattttagaatctggacactttctatgaatgtaattcggctgagaaacatgttgctgagatgcaatcctcagtgttctctgtatgtaaatctgtgtatacaccacacgttacaactgcatgagcttcctctcgcacaagaccagctggaactgagcatgagacgctgtcaaatacagacaaaggatttgagatgttctcaataaaaagaaaatgtttcact

SEQ ID NO: 497 - DNA, 159 bp, Homo sapiens
  source 1..159: mol_type = unassigned DNA
atggccaatgagcacaccctcattcatccagcgagcattgaggaccccctagaggccaggcccatgagtgatgaagatcccgaggatgaagacgccttgccagccaggtggaagaaagaaatgggaagaaaaaggaagagaaccatagctacgttgtga

SEQ ID NO: 498 - DNA, 4583 bp, Homo sapiens
  source 1..4583: mol_type = unassigned DNA
atgaagatcccgaggatgaagacgccttgccagccagacagaaacagtctccgccagtcaagaaaccctcaaaagtattttgccatggatatagaagatgaagaaaacatgagttccagcagcactgatgtgaaggaaaaccgcaatctggacaacgtgtcccccaaggatggcagcacacctgggcctggcgagggctctcagctctccaatgggggtggtggtggccccggcagaaagcggcccctggaggagggcagcaatggccactccaagtaccgcctgaagaaaaggaggaaaacaccagggcccgtcctccccaagaacgccctgatgcagctgaatgagatcaagcctggtttgcagtacacactcctgtcccagactgggcccgtgcacgcgcctttgtttgtcatgtctgtggaggtgaatggccaggtttttgagggctctggtcccacaaagaaaaaggcaaaactccatgctgctgagaaggccttgaggtctttcgttcagtttcctaatgcctctgaggcccacctggccatggggaggaccctgtctgtcaacacggacttcacatctgaccaggccgacttccctgacacgctcttcaatggttttgaaactcctgacaaggcggagcctcccttttacgtgggctccaatggggatgactccttcagttccagcggggacctcagcttgtctgcttccccggtgcctgccagcctagcccagcctcctctccctgtcttaccaccattcccacccccgagtgggaagaatcccgtgatgatcttgaacgaactgcgcccaggactcaagtatgacttcctctccgagagcggggagagccatgccaagagcttcgtcatgtctgtggtcgtggatggtcagttctttgaaggctcggggagaaacaagaagcttgccaaggcccgggctgcgcagtctgccctggccgccatttttaacttgcacttggatcagacgccatctcgccagcctattcccagtgagggtcttcagctgcatttaccgcaggttttagctgacgctgtctcacgcctggtcctgggtaagtttggtgacctgaccgacaacttctcctcccctcacgctcgcagaaaagtgctggctggagtcgtcatgacaacaggcacagatgttaaagatgccaaggtgataagtgtttctacaggaacaaaatgtattaatggtgaatacatgagtgatcgtggccttgcattaaatgactgccatgcagaaataatatctcggagatccttgctcagatttctttatacacaacttgagctttacttaaataacaaagatgatcaaaaaagatccatctttcagaaatcagagcgaggggggtttaggctgaaggagaatgtccagtttcatctgtacatcagcacctctccctgtggagatgccagaatcttctcaccacatgagccaatcctggaagaaccagcagatagacacccaaatcgtaaagcaagaggacagctacggaccaaaatagagtctggtgaggggacgattccagtgcgctccaatgcgagcatccaaacgtgggacggggtgctgcaaggggagcggctgctcaccatgtcctgcagtgacaagattgcacgctggaacgtggtgggcatccagggatccctgctcagcattttcgtggagcccatttacttctcgagcatcatcctgggcagcctttaccacggggaccacctttccagggccatgtaccagcggatctccaacatagaggacctgccacctctctacaccctcaacaagcctttgctcagtggcatcagcaatgcagaagcacggcagccagggaaggcccccaacttcagtgtcaactggacggtaggcgactccgctattgaggtcatcaacgccacgactgggaaggatgagctgggccgcgcgtcccgcctgtgtaagcacgcgttgtactgtcgctggatgcgtgtgcacggcaaggttccctcccacttactacgctccaagattaccaagcccaacgtgtaccatgagtccaagctggcggcaaaggagtaccaggccgccaaggcgcgtctgttcacagccttcatcaaggcggggctgggggcctgggtggagaagcccaccgagcaggaccagttctcactcacgccctgacccgggcagacatgatggggggtgcagggggctgtgggcatccagcgtcatcctccagaacctcacatctgaactgggggcaggtgcataccttggggagggagtagggggacacgggggaccaccaggtgtccacggttgtccccagcatctcacatcagacctggggcaggtgcgcagtgtggggaggggatggggtgcgtcagggcccagcatcgccgcctggcatctctctgccgcagcatttccccttctgaaccgtccagtgactgctttcaatctcggtttacgtttagaaattgagttctactgagtagggcttccttaagtttaggaaaatagaaattactttgtgtgaaattcttgaataaataatttattcagagctaggaatgtggtttataaaataggaagtaattgtgtcaggtcacttttatgccacattattttaattgcaaaaaagcatctatatatggaggagggtgggaaaatagaggtaggaaatagtagcctaaaggaaatcgccacacgtctgtctaaacttaggtctcttttctccgtaggtacctccctgggtagttccacacactaggttgtaacagtctctccctgaggagcagactcccagcatggtgtagcgtggccctgtcatgcacatggggtcccgcagcagtgactgtgtgtcctgcagaggcgtgacccaggcccctgtagccctcagcctcctctagaagcttctgtactccttgtaggatcagatcatggaaaacttttctcagtttacttctaagtaatcacagataatacatggccagtaatcccaggctggccattcattcaggttttttaaaggatatttaacttttatggactagaaggaatcacgagggctactgcacaatacatggcctaagttccctctgttccttcctctgaatcgaatggatgtgggtgaccgcccgaaggccttcacaggatggaagtagaatgatttcagtagatactcattcttggaaaatgccatagttttaaattattgtttccagctttatcaaagacatgtttgaaaaataaaaagcatccaagtgagagctggtgagaccacgtgctgctggcgtagtgtaggccagacattgacagtcctgacgggagctcagggctgcccagcgcccagcgtgcacgggacggccccacgacagagggagtcagcccgggaggtcaggagcgcggcgggcgagggccctgtgtggaccacctccaccaagctcagagatttgcaccaggtgccttgttgcctccgctcaggatgaaagaggagctgagagaagtgctctgcctgccagtgcagtgcccagctccaaggctctagagggtgttcaggtacactgaggaggggacggctccgtcttcacattgtgcacagatctgaggatgggattagcgaagctgtggagactgcacatccggacctgcccatgtctcaaaacaaacacatgtacagtggctctttttccttctcaaacactttaccccagaagcaggtggtctgccccaggcataaagaaggaaaattggccatctttcccacctctaaattctgtaaaattatagacttgctcaaaagattcctttttatcatccccacgctgtgtaagtggaaagggcattgtgttccgtgtgtgtccagtttacagcgtctctgccccctagcgtgttttgtgacaatctccctgggtgaggagtgggtgcacccagccccgaggccagtggttgctcggggccttccgtgtgagttctagtgttcacttgatgccggggaatagaattagagaaaactctgacctgccgggttccagggactggtggaggtggatggcaggtccgactcgaccatgacttagttgtaagggtgtgtcggctttttcagtctcatgtgaaaatcctcctgtctctggcagcactgtctgcactttcttgtttactgtttgaagggacgagtaccaagccacaagaacacttcttttggccacagcataagctgatggtatgtaaggaaccgatgggccattaaacatgaactgaacggttaaaagcacagtctatggaacgctaatggagtcagcccctaaagctgtttgctttttcaggctttggattacatgcttttaatttgattttagaatctggacactttctatgaatgtaattcggctgagaaacatgttgctgagatgcaatcctcagtgttctctgtatgtaaatctgtgtatacaccacacgttacaactgcatgagcttcctctcgcacaagaccagctggaactgagcatgagacgctgtcaaatacagacaaaggatttgagatgttctcaataaaaagaaaatgtttcact

SEQ ID NO: 499 - DNA, 8421 bp, Homo sapiens
  source 1..8421: mol_type = unassigned DNA
tgcgctgggagcccagagcaggaggcagagcccgcgggaagctcggagcactcaggacgccgcgcgcccttccccgccctccctgaccagggagcagctcgctccaggcgcccagccgaggcccccagcccagtgggagcaagtcatagagaacaattcgagagacagagagacggagcgcgctttcctgctcagtcctgaaaagtgagccgctcccgggtttgcaacctcaagcttcgcagcagcggcggcggcggctgccgggaaggaggcaggtgcaggtgcaggagggaggcggctctgggctccgcgcctgggtctcggccatggcctcggtcctggggagcggcagagggtctggagggctgagcagtcaactcaaatgcaagtccaagaggaggaggaggcggaggtccaagcggaaagataaagtaagcatattgtcaaccttcctcgctcctttcaagcacctgagtcctggcatcacaaacacggaggatgacgacaccctcagtaccagcagcgcggaggtgaaggagaaccgcaacgtgggcaacctggccgcgcggccaccgccctccggggaccgggcccggggcggcgcgcccggcgcgaagaggaagcggccgctggaggaggggaatgggggccacttgtgcaaactgcagctggtctggaagaagctgtcgtggtcggtggcgcccaagaacgcgctggtgcagctgcacgagctgaggccgggcctgcagtaccggacagtgtcgcagacgggcccggtgcatgccccggtcttcgcggtagcggtggaggtgaacgggctcacgttcgagggcacaggccccaccaagaagaaggccaagatgcgcgcggcggagctggcactcaggtccttcgtgcagttccccaacgcctgccaggcgcacctggccatgggcgggggcccgggccccggcacggacttcacctccgaccaggccgatttccccgacacgctcttccaggagttcgagcccccggcgccgcgccccggactcgcgggaggccgccccggggacgccgcgcttctgtccgcggcctacgggcgacggcggctgctgtgccgcgcgctggacctggtgggcccgacccccgccacccccgcggccccgggcgagcgcaaccccgtggtgctgctgaaccgcctgcgcgccgggctgcgctacgtgtgtctggcagaaccggccgagcggcgcgcgcggagcttcgtgatggccgtgagcgtggacggcaggacgttcgagggctcggggcgcagcaagaagctggcccggggtcaggccgcgcaggccgcactgcaggagctgttcgacatccagatgcccggccacgcgcccggcagggccaggaggacgccaatgccgcaggaattcgcagactccatatcccagctggtcacacagaagttccgcgaggtgacgacggacctcacgcccatgcacgcccgccataaagcgctggcaggaatcgtcatgaccaaaggcctggatgctcggcaggcgcaggtcgtggccctgtcctcggggaccaagtgcatcagcggcgagcacctcagtgaccaggggctggtggtgaatgactgccacgcggaggtcgtggcccggcgggcgttcctgcacttcctctacacgcagctggagctgcacctgagcaagcggcgcgaggactcagagcgatcgatattcgtgcggttaaaagaaggtggctaccggctgcgagagaacatcctcttccatctctacgtgagcacctccccctgtggagacgcaagactccactctccctacgagatcaccacagacctgcacagcagcaaacacctcgtcaggaagttccgcgggcacctgcgcaccaagatcgagtccggggaagggacggtccccgtgcgtggccccagcgcagtgcagacctgggacggcgtcctgctgggggagcagctgatcaccatgtcctgcacggacaagatcgccaggtggaacgtcctggggctgcagggcgcgctcctgtcccacttcgtggagcccgtgtacctgcagagcatcgtggtgggcagcctgcaccacacgggccacctcgcacgcgtcatgagccaccgcatggagggtgtcggccagctgcccgcctcctaccggcacaaccggcctctcctcagcggcgtgagtgacgccgaggcgcgccagccggggaagtcgccccccttcagcatgaactgggtcgtgggcagcgcggacctggagattatcaacgccaccactgggcggaggagctgtgggggcccatcccggctctgcaagcacgtgctgtctgcacggtgggcgcggctgtatggcaggctgagcacacggacacccagccctggagacacgccctccatgtactgtgaggccaagctgggggcgcacacctaccagtctgtgaaacagcagctgttcaaggcctttcagaaggctggcctgggcacctgggtgaggaaaccaccggagcagcagcagtttctactgactctctaggctgcgggctcctggctgctggagctgagcgggacgctggagggatgggaccgtgtctggggggcgacgtggcgggtcggccggttccctgcattcgttttactttggtgtcccagaaacacgcgagtgtgcaatgtttggacgagcaacaacacaaattcagaacgtgcctctttccagatcgctggccccagaaccctgtcccccacacccaggggcacatgcactgttgagttagcgccgactcttcctgtggagtctgagggaggggctccattcaggcaaaggggttttagctgcagccttggaaggaggcaccgacacgacaccaggcaggagtgagcctcaggccccgtccctgcaccccacccctgcgtgcgcctcttggtgatgctggggtctcactagcttgagggggcacatgaagataagccacaaatgaagagaaaagccatgcccaccccagccccagagaaaccaataagaatcctctattattttcactattcatttaggtttttatactccacctcctttcaaaaaagatttaagatgtacgacattaccgaacacctaaaatagaaccagagaaacgaaagccattcccacaaagtgaaggaacagtttccaaaacccctgcgaggcagagttaagacctgtgacgtggggagcctggaaacacccggcccacgcgtgctgcagatgtggggagcctggaaacacccggcccacgcgtgctgcagatgtggggagcctggaaacacccggcccacgcgtgctgcagatgtggggagtctggaaacacccggcccacgcgtgctgcagatgtggggagcccggaaacacctggcccatgcctgttcagtccgtcatggcgtttggtttatggtggccgatactaagagccactgaggtctgggttgtgtaagggttagctaccaccctataacctccctaccaggtaataaggagaccaagtctttgatcaaattctgattttttaactaaattttcattagaaagcaagcacaaaataaaatcaaaacaacctttaccttcagcttgagaggctaccagctctctattctttcagattctccaatcaacaccttgcaggacaagaccccaaaaaagttcagctgtcaaaaaatgtaagaggcaggattctgtgaccctcagagcaggcttccaacaccagagaccttcagctcacagtggagatgggacatgggggctttagcccacagcatcatccctgagagccaaggcgctgtattcatacggggtcaggctcttttccaagtatctttacgtaatccatgtacctcgagctgctgtcatctcacctccgagaactcatttctaacattcatcatgctagatagccagtctctcatttctccaacttaaaaaatccatctctgaaattcatgacagtgatggcagacggcaaagcatggtggtgtccacctctggggtgtgggcttcccggaaagaatcccagctgaccaccccagaaagtgcaagaataacattgtgctgtacatagtcaagtgctataaattacagttatcataatgagaaggcagaaatgaaactgagttgtagctatttgttacaagataataagaagtagagatattagtatggaaaaagaaacttttcctgggatttaaaatcaggccaaatttatcactcgagttcttttagaaaagaaaacaggtactggagtagacaacttcttccagataaagtttcaaaagatacgagaacattttttcaaataaaggactcacattaatcttttataaaaatcacaaaaataaatgaaatcttaattcagtgcaaaagctaagctcaaacgaccagtttctattaagttctggtaacttgacatcactaggatgaagcttagagaacttagagtcgagaggtgatgggtggctcagacattcgcagcagtcagaagtgagcgctcccctgaatgcgtgggagcacggccagctcctggctgaagtctcccacccaggcctcaaatcaccttcatctgagatgttggctagagaagcatataatgctttgtcccagtgggctccaaatcacgctgtttctgcagcgagggggcctgtgttgtaagcagatttcactgtcacagggaagacgcagggtctgattcacgggactcggaaagcgctcggccacccagtggccagcatcatgaagccacagctggggggttgggattcgttttgtctcaggcattgaccttccagaaacaactcagactttactgaaatatcaacatccacatctggagaaagccacacattaattccatgctacccattagtacaagtgtatggattcgtgtattaagtccacaggagactccatggaaggagagattaaagctcttcagagaaggccgatagcgacagaagagtttccaatgcagccagagtgaggttgaggtgccggagcctttccgtggagggatctgtcagaggggatgtgggctgcagaggggaccccacgtaaggaaaggagggtcccaggccctgggtagtgaaaggagaaggtagtcgaggcagtcaagggtgaccctacacgcaggaggcacgccacaccagatcacgccacacgcaggctgctcccaactggcagggcctgacccagccaggaagggccaggtcctaggattccacagtgccaggagtgcccgaaggggccaggtcccaggattcccacagccccaggtgtgcctggaagacccgggtcccaggattcccacagccccagctatgcttgggggggccgagtcccaggattcccacagccccaggtgtgcctggaagacccgggtcccaggattcccacagccccaagagttcccggaagagctgggtcccaggattcccacagccccagctatgcttgggggggccgggtcccaggattcccacagccccaggtgtgcctggaagacccaggtcccaggattcccacagccctggatgtgcctggaggggctgtgccacctctgcagagatggaagggctcgtgttgaagcctgaggatttcgccctcaggtccaggtcagaacatcccagcaccactttcaggccatgtctgccctgcagttttgaccactgaattggtcttaagagtggccacccattcccctccaagtgagggggcaagacacaagtaggggacgggtcactttctgtcaccctgaaaatacgctgggcacgacacaagtaggggatgggtcactttctgtcaccctgaaaatacgctgggcacgacacaaggggggctgatgaagtcaggcccgcccctccaagtccacctcgaaatcaccgtctggcttcctcgcacttcccaccacctgacaccgccaagccccttgcttcagattttctgtggtctgtattcatacccttgcttcagattttctgtagtctatattcatgcctgcttaggcccctacaaaagtcctcataaaaccagcaccacctttatctgcctccaaaacacacactgctttcccatcaggaagatcagcaatgtggtttccggcctggttcttagtcaaaaagttagtgtctggtggtttctggcctttttgcaggacggggcgcagggaacggctgcgcggccaggcagcctccgctgtccacctccagccccggttttgcagccgtgtgtgatatcaagggatagagttagggtttctgtgggttttgtttttgctgaggaaaggatgtgcaggtcgatagctattgtttcctttccattcctgtgattctctttacatctgtatatatctatcacaccatgctgactttgtgatgagtcctgttcctcagaaacatcaagctgggttccttttcaaagaaacacacagatcatatttctccatctcattttgttttcacagggagcttttcttatcaacaaagtcgcatgcttttttttttggatataatgtttatcacgtctggagagccataaacagtaaatacagaggatatcaatgcccagaatagttattttgatgaaatcctatttttagataataaatttcaagatgtgtctatagtgtattgtttaaaacaactgaagacatttgagacgtacataaagtagacatttttaatttagggaaacttatatgcccttttttaagaagccattctaataaaataatctgactaattggcccaaaatacaataagtatcactttctaacagagaccaaagggaagctgagaggctttccttttatgtactaccgttggatcgctgcagccgcctctcataacacccaacagaacccggtgaggctctgtgggcttcccgcggccctcagggaggctgcagagtcccctagtccatgtcagggagccgccatcccacatacctccaaagcctgtcctcgcctgcagtttttgcagagctcgcggttggaggtggaaatttagaagccctgtgttgcaggagaggcagtagcacccccaggcagctcttagcagggacagaccaccccccgcctcgctggtattttagggtcttttggtattttgccactgtgtggggctaggcgggtggctggaggacacggtgtaggccttgccgctgtctgggttcctcgccactgcaggagcagggctgtttctggaaacactgggctgctggtgacccgtcaaacttctcccacaaattctgaatccgagaaagtgaaggaaggatggtggggaagtgaggaggcaggagcagaggccacagggaccaaccagagatgcggtggagacagaggagcttccttctcaggctgtttctgggaagcctgagaggcggccagcaccaccctccgctcactctcccctcagcctcttcgcttcccttctcaaccctttctctcctcctcgcctcttccctttcttgctgtcttgttagtccctgtcccaaaactcctggctcctttgttctgctgccgtggcccccacccaggaggaggtctcaggcaccatccccccacgagggatccacacaacaggttcatgctggggctgggggagccccgctgggttcctgatgccttgtgcacagggagttgctgcagtcatttttggactctcctgaatgtgtccacatgttctgacctcccaccagaaggaacgctggtggccacatctctagagatctatttacttttttgagaccggcttatgagattggctaatttttgtatttttggtagagatggggtctcaccatgttgcccaggctagtctcgaactcctggcctcaagtgatctgcccacctcggcctcccagagtgctgggattacaggcatgagccaccgcgctggcctctagagattcacaccaaacaatatcactcctgcgggaaccgcagacagatcaaaccctggtgagaggaacactttatttcccaactcatcatcctaagccaaggttggagggatgagcattccctaaacaccaaggcgagatcacctggtcccagtgcctcttttcacacaggccctagatttctatctctctgcagtttatgcatcggtaaaaaaaaaaaaatctctcccagtgtgccccgttagttttcagcattttgtaagcaaaatgaacttaacacatagtaattctaattgaaggtatgtacataaaaagcatgatagaatggcaatattgtatcaatggatgtacatttgtaatatttgtaaaaaaaaatccaaaaccttaaaatatgaatttacatgttaatttgcctctaagttctataaattgcacttcagtgatatctaataagtgaatgtttctgttaagtaaataaaaatattcagtaaaa

SEQ ID NO: 500 - DNA, 1810 bp, Homo sapiens
  source 1..1810: mol_type = unassigned DNA
acacatgggcctgtggagcccagtcccaggcaacagtgtccccagagccccagtgatggctgggttgggtctggggcactcccagggagctccccaaggtccgcacgatgggaagactgacaggtcctcaggaccaggccgcagacggacagagaggaccaggctccctgggctcctgggtggggctccgctgactgctggctctccccacaggtggaacgtcctggggctgcagggcgcgctcctgtcccacttcgtggagcccgtgtacctgcagagcatcgtggtgggcagcctgcaccacacgggccacctcgcacgcgtcatgagccaccgcatggagggtgtcggccagctgcccgcctcctaccggcacaaccggcctctcctcagcggcgtgagtgacgccgaggcgcgccagccggggaagtcgccccccttcagcatgaactgggtcgtgggcagcgcggacctggagattatcaacgccaccactgggcggaggagctgtgggggcccatcccggctctgcaagcacgtgctgtctgcacggtgggcgcggctgtatggcaggctgagcacacggacacccagccctggagacacgccctccatgtactgtgaggccaagctgggggcgcacacctaccagtctgtgaaacagcagctgttcaaggcctttcagaaggctggcctgggcacctgggtgaggaaaccaccggagcagcagcagtttctactgactctctaggctgcgggctcctggctgctggagctgagcgggacgctggagggatgggaccgtgtctggggggcgacgtggcgggtcggccggttccctgcattcgttttactttggtgtcccagaaacacgcgagtgtgcaatgtttggacgagcaacaacacaaattcagaacgtgcctctttccagatcgctggccccagaaccctgtcccccacacccaggggcacatgcactgttgagttagcgccgactcttcctgtggagtctgagggaggggctccattcaggcaaaggggttttagctgcagccttggaaggaggcaccgacacgacaccaggcaggagtgagcctcaggccccgtccctgcaccccacccctgcgtgcgcctcttggtgatgctggggtctcactagcttgagggggcacatgaagataagccacaaatgaagagaaaagccatgcccaccccagccccagagaaaccaataagaatcctctattattttcactattcatttaggtttttatactccacctcctttcaaaaaagatttaagatgtacgacattaccgaacacctaaaatagaaccagagaaacgaaagccattcccacaaagtgaaggaacagtttccaaaacccctgcgaggcagagttaagacctgtgacgtggggagcctggaaacacccggcccacgcgtgctgcagatgtggggagcctggaaacacccggcccacgcgtgctgcagatgtggggagcctggaaacacccggcccacgcgtgctgcagatgtggggagtctggaaacacccggcccacgcgtgctgcagatgtggggagcccggaaacacctggcccatgcctgttcagtccgtcatggcgtttggtttatggtggccgatactaagagccactgaggtctgggttgtgtaagggttagctaccaccctataacctccctaccaggtaataaggagaccaagtctttgatcaaattctgattttttaactaaattttcattagaaagcaagcacaaaataaaatcaaaacaacctttaccttc

SEQ ID NO: 501 - DNA, 768 bp, Homo sapiens
  source 1..768: mol_type = unassigned DNA
gatctgcgaggaggcatgaatgagagggagacacccggccagctgggcttggggaacgcgtcaggcgtgagtgacgccgaggcgcgccagccggggaagtcgccccccttcagcatgaactgggtcgtgggcagcgcggacctggagattatcaacgccaccactgggcggaggagctgtgggggcccatcccggctctgcaagcacgtgctgtctgcacggtgggcgcggctgtatggcaggctgagcacacggacacccagccctggagacacgccctccatgtactgtgaggccaagctgggggcgcacacctaccagtctgtgaaacagcagctgttcaaggcctttcagaaggctggcctgggcacctgggtgaggaaaccaccggagcagcagcagtttctactgactctctaggctgcgggctcctggctgctggagctgagcgggacgctggagggatgggaccgtgtctggggggcgacgtggcgggtcggccggttccctgcattcgttttactttggtgtcccagaaacacgcgagtgtgcaatgtttggacgagcaacaacacaaattcagaacgtgcctctttccagatcgctggccccagaaccctgtcccccacacccaggggcacatgcactgttgagttagcgccgactcttcctgtggagtctgagggaggggctccattcaggcaaaggggttttagctgcagccttggaaggaggcaccgacacgacaccaggcaggagtgagcctca

SEQ ID NO: 502 - DNA, 599 bp, Homo sapiens
  source 1..599: mol_type = unassigned DNA
attcatagcctgggtgctccaaaagtgctcttatttgcctggtttgatcttcacatcacctcgtgaagtagagaagtcacctgtcacagagcggcgtgagtgacgccgaggcgcgccagccggggaagtcgccccccttcagcatgaactgggtcgtgggcagcgcggacctggagattatcaacgccaccactgggcggaggagctgtgggggcccatcccggctctgcaagcacgtgctgtctgcacggtgggcgcggctgtatggcaggctgagcacacggacacccagccctggagacacgccctccatgtactgtgaggccaagctgggggcgcacacctaccagtctgtgaaacagcagctgttcaaggcctttcagaaggctggcctgggcacctgggtgaggaaaccaccggagcagcagcagtttctactgactctctaggctgcgggctcctggctgctggagctgagcgggacgctggagggatgggaccgtgtctggggggcgacgtggcgggtcggccggttccctgcattcgttttactttggtgtcccagaaacacgcgagtgtgcaatgtttggacgagcaac

SEQ ID NO: 503 - DNA, 703 bp, Homo sapiens
  source 1..703: mol_type = unassigned DNA
agaaaagagagcagcatttgttagcacacatgggcctgtggagcccagtcccaggcaacagtgtccccagagccccagtgatggctgggttgggtctggggcactcccagggagctccccaaggtggaacgtcctggggctgcagggcgcgctcctgtcccacttcgtggagcccgtgtacctgcagagcatcgtggtgggcagcctgcaccacacgggccacctcgcacgcgtcatgagccaccgcatggagggtgtcggccagctgcccgcctcctaccggcacaaccggcctctcctcagcggcgtgagtgacgccgaggcgcgccagccggggaagtcgccccccttcagcatgaactgggtcgtgggcagcgcggacctggagattatcaacgccaccactgggcggaggagctgtgggggcccatcccggctctgcaagcacgtgctgtctgcacggtgggcgcggctgtatggcaggctgagcacacggacacccagccctggagacacgccctccatgtactgtgaggccaagctgggggcgcacacctaccagtctgtgaaacagcagctgttcaaggcctttcagaaggctggcctgggcacctgggtgaggaaaccaccggagcagcagcagtttctactgactctctaggctgcgggctcctggctgctggagctgagcgggacgctggag

SEQ ID NO: 504 - DNA, 683 bp, Homo sapiens
  source 1..683: mol_type = unassigned DNA
catttgttagcacacatgggcctgtggagcccagtcccaggcaacagtgtccccagagccccagtgatggctgggttgggtctggggcactcccagggagctccccaaggtccgcacgatgggaagactgacaggtcctcaggaccaggccgcagacggacagagaggaccaggctccctgggctcctgggtggggctccgctgactgctggctctccccacaggtggaacgtcctggggctgcagggcgcgctcctgtcccacttcgtggagcccgtgtacctgcagagcatcgtggtgggcagcctgcaccacacgggccacctcgcacgcgtcatgagccaccgcatggagggtgtcggccagctgcccgcctcctaccggcacaaccggcctctcctcagcgcggtgtctgaaggagttctgaaaacagaatcactagtgttgggctcacccaagaggccccacctgcccacctggccgcccacctgcccacctgcccacctggccgcccacaggaggcgatgctgaggaagagccaggtgggcgaggaggggcggggggcgccaaggtcacgtggccagagcgggtcttcggaacccagggccccgggccctccacaccctccagaggctgccaggttactccgcgagtactgggccggcttcgcaccaggattcccc

SEQ ID NO: 505 - DNA, 1741 bp, Homo sapiens
  source 1..1741: mol_type = unassigned DNA
acagaggcaggaagactgctggatgccgcaaggacttcctgtggagaaaatgtctgttctgttgcctgtgtgatctcagggccccacagaacacaatccatcacccatggggcagaacgtgtgaaaacagcaagaccggcagaagcaagcggcgcgaggactcagagcgatcgatattcgtgcggttaaaagaaggtggctaccggctgcgagagaacatcctcttccatctctacgtgagcacctccccctgtggagacgcaagactccactctccctacgagatcaccacagacctgcacagcagcaaacacctcgtcaggaagttccgcgggcacctgcgcaccaagatcgagtccggggaagggacggtccccgtgcgtggccccagcgcagtgcagacctgggacggcgtcctgctgggggagcagctgatcaccatgtcctgcacggacaagatcgccaggtgaggcccacggcttcctctcgaggatgttggctgcggccggtggggagtgccaagccccaggctccctgcatcccacttctggtgaggtcagtgatgctgggcacatgcggtcagggccctgtgcctgagccgtggaactccacagccattccacatgttcagtcccacaccctgaggccaaggcaccccgagtccctgagggagcaaggccctgccacccgaggctgccgctgcagaggcaaacagccccgagcaaggcccggcaaccccaggctgtggctgcatggggcaaacacagcctggcctgaggctgccggccagtcggggtggccataggctaacgagaagccagggcctccctccccactgggctttccacaaaaacctgactaatgtccagggacagccaaaggccttgaggtcagctgggtggaacacctttcccctaccatcccgagatattgtcttcttggatggagttttcaaagcctccatgtggaggtctcgggatgagaggcctcggctgagctctgtgcagaggagcaggaagctgcagaatgggcacccgcctccctcccagcacctccagtcgctgccacgccccaagctcctgagctgctctgcccaagacctcccccaaccttggtctgacgcgttgagacctccccctaccttggcctgatgccccgagacctcccccaacctcggtctgatgccccgagacctccttgacctcagtctgataccctaagacctcccccaacctcagtctgatgccccaagacctcccccaggttagtctgatgccctgagacttcccccaaccttggtctaatgtcccaagacctctccgtcctcgatctgaccccgagacctcccccacgttggtgacacccccacgttggtgacaccctgagacctcccccacgttgctctgaggccccgaggcctcccccacgttgctctgatgccctgaggcctccccaacgtggatttgaggccctgaggcctccccaacgtggatctgaggccctaagacctccccaacgttgatctgaagcccctagacctcccccacattggtctgacgccctgaaagcgccatccccaatgcaggacatttctgtaactttggtttggaaaataggggtcacaggtgtggggacagcatgagtttccctaaaagagccatgaattccccacaagcctgataaactaacaacaatgtggtcacaggaagtctgggttgagggacccagaacacccttggac

SEQ ID NO: 506 - DNA, 1693 bp, Homo sapiens
  source 1..1693: mol_type = unassigned DNA
gttccactgtgcacggtggggaaactgaggctcggaggggacaaggaaggtgccccagctgcagcaggtcggccagctggcgctgctcttcagcctcaccttcgcgctgctctgctgtcctttcgcgctgggcggccccgcccggggttccgccggggccgctggggggccagcgaccgccgaacaaggggtttggcagctccttttggtcaccttcgtgtcctatgccttgctgcccgtgcgcagcctgctggccataggctttgggctcgtggtggctgcgtcgcacttgctggtcacagccaccttggtccccgccaagcgcccacgtctctggaggacgctcggtgccaatgccttgctcttcgtcggtgtgaacatgtatggggtctttgtgcggattctgactgagcgttcacagaggaaggcgttcctgcaggcccggagctgcattgaggaccgactgaggctggaggatgagaacgagaagcaggagcggctcctcatgagcctcctgccccggaacgttgccatggagatgaaggaggacttcctgaagccccctgagaggattttccacaagatttacatccagaggcacgacaatgtgagcatcctgtttgctgacatcgtgggtttcacgggcttggcatcccagtgcacagcccaggagctggtgaaactcctcaatgagctcttcggcaagttcgatgaattagccacggagaaccactgtcgccgcatcaagattctcggggactgctactactgcgtgtcgggcctcacccagcccaagactgaccatgcccactgctgtgtggagatgggactcgacatgattgataccatcacatctgtggctgaagccaccgaggtggatctgaacatgcgtgtgggtctgcacacgggcagggtcctctgtggtgtcctgggcttgcgcaagtggcagtacgacgtgtggtccaatgatgtgaccttggccaatgtcatggaagccgctggcctgccagggaaggttcatatcacaaagacgaccctagcgtgcttgaatggggactacgaggtagaaccgggttacggacatgagaggaacagtttcttgaaaactcataacatcgaaaccttttttattgtgccatcccatcgccgaaagatatttccaggcctgattctctcagatataaaaccggccaaaaggatgaagttcaagactgtctgctacctgctggtgcagctcatgcactgccggaaaatgttcaaggccgagatccccttctccaatgtcatgacctgcgaggacgatgacaaggttcagatccatccctcactgagtggcctggatgtcctcctggggttttggtctcccaccctgcaacggggacgactgtgcacgtagcttcaggtcctgcccaacagccactgtcaccagtgctgcaaggatgagctcctgccatcagcccttatcccccagggcattcacgccagctctgttcttctctcagcactctctcctgatcgtaaacataattgattatggaaaatatggagaacacaaagatgcacaagggagaaaatgaaaagcatttatctggaatcctaccatctcacaaaaaagctatcatgaacattttgttccttccagtttcttaagtttgtgtgtctgtatttttttaataaacttgactggatggta

SEQ ID NO: 507 - DNA, 12503 bp, Homo sapiens
  source 1..12503: mol_type = unassigned DNA
gcggccgctgcatggcgctgagatggcgggggcgccgcgcggcggaggcggcggcggaggcggcgcgggcgagcccgggggcgccgagcgggcggccgggacaagccgccggcgcgggctccgggcgtgcgacgaggagttcgcttgcccagagctggaggcgctgttccgcggctacacgctgcggctggagcaggcggccacgctgaaggcgctggccgttctcagcctgctggcgggcgcgctggcgctggccgagctgctgggcgcgccggggcccgcgcccggcctggccaagggctcacacccggtgcactgcgtcctcttcctggcgctgctcgtggtaaccaacgtccggtccctgcaggtgccccagctgcagcaggtcggccagctggcgctgctcttcagcctcaccttcgcgctgctctgctgtcctttcgcgctgggcggccccgcccggggttccgccggggccgctggggggccagcgaccgccgaacaaggggtttggcagctccttttggtcaccttcgtgtcctatgccttgctgcccgtgcgcagcctgctggccataggctttgggctcgtggtggctgcgtcgcacttgctggtcacagccaccttggtccccgccaagcgcccacgtctctggaggacgctcggtgccaatgccttgctcttcgtcggtgtgaacatgtatggggtctttgtgcggattctgactgagcgttcacagaggaaggcgttcctgcaggcccggagctgcattgaggaccgactgaggctggaggatgagaacgagaagcaggagcggctcctcatgagcctcctgccccggaacgttgccatggagatgaaggaggacttcctgaagccccctgagaggattttccacaagatttacatccagaggcacgacaatgtgagcatcctgtttgctgacatcgtgggtttcacgggcttggcatcccagtgcacagcccaggagctggtgaaactcctcaatgagctcttcggcaagttcgatgaattagccacggagaaccactgtcgccgcatcaagattctcggggactgctactactgcgtgtcgggcctcacccagcccaagactgaccatgcccactgctgtgtggagatgggactcgacatgattgataccatcacatctgtggctgaagccaccgaggtggatctgaacatgcgtgtgggtctgcacacgggcagggtcctctgtggtgtcctgggcttgcgcaagtggcagtacgacgtgtggtccaatgatgtgaccttggccaatgtcatggaagccgctggcctgccagggaaggttcatatcacaaagacgaccctagcgtgcttgaatggggactacgaggtagaaccgggttacggacatgagaggaacagtttcttgaaaactcataacatcgaaaccttttttattgtgccatcccatcgccgaaagatatttccaggcctgattctctcagatataaaaccggccaaaaggatgaagttcaagactgtctgctacctgctggtgcagctcatgcactgccggaaaatgttcaaggccgagatccccttctccaatgtcatgacctgcgaggacgatgacaagcggagggcattaagaacagcctcggaaaaactcagaaaccgctcatctttttctaccaacgttgtctacaccaccccgggcactcgcgtcaacaggtacatcagccgcctcttagaagcccgccagacagagctggagatggcagacctgaacttctttaccctgaagtacaaacatgtcgaacgggagcaaaagtaccaccagcttcaggacgagtatttcaccagcgccgttgtcctcaccctcatcctggctgccttatttggccttgtctaccttctaatattcccacagagtgtggtcgtcctgctcctgctagtattctgcatctgcttcctggtggcctgtgtcctgtacctgcacatcacccgggtccagtgttttccagggtgcctgacgattcagattcgcactgtcctgtgtattttcatagtggtcttaatctactcagtagcccaaggttgtgtggtgggctgcctgccttgggcctggagctccaagcccaacagttccctggtggtcctttcgtctgggggccagcgcacagccctgcccaccctgccctgcgagtctacacaccatgccctgctctgctgcctggtgggcaccctcccgctagccatatttttccgggtgtcctccttgccaaaaatgatcctgctctccgggctcaccacgtcctacatcctcgttctggagctcagcggatacaccaggactgggggtggtgccgtctccgggcgcagctacgagccgattgtggccatcctgctcttctcctgtgcgctggccctgcatgccaggcaggtggacatcaggctgaggctggactacctctgggccgcacaggcagaggaggagcgagaggacatggagaaggtgaagctggacaacaggcgcatcctcttcaacctcctgccggcccacgtcgcccagcacttcctcatgtccaaccctcggaacatggacctctactaccagtcctactcccaggtgggcgtcatgtttgcctccatccccaacttcaatgacttctacatcgagctggacggcaacaacatgggggtggagtgtctgcggcttctcaacgagatcatcgccgactttgacgagctcatggaaaaagacttttacaaggacatagagaagatcaagaccatcgggagcacctacatggccgctgtggggctagcgcccacctcggggaccaaggctaagaagtccatctcctcccacctgagcacgctggcggactttgccattgagatgtttgacgttctggatgaaatcaactaccagtcttacaacgactttgtcctccgagttggcatcaatgttggccctgtggtggctggagtgattggcgctcgcaggccccagtacgacatctggggaaacacagtcaacgtggccagtcggatggatagcacaggggtccagggcagaatccaggtgactgaggaagtccaccggctgctgagaaggtgcccctaccactttgtgtgccgaggcaaagtcagtgtcaagggcaaaggcgagatgttgacatactttctagaaggcaggactgatggaaacggctcccaaatcaggtccctgggcttggatcggaaaatgtgtccatttgggagagctggccttcagggcagacgtccccccgtgtgccccatgcctggcgtctcagtcagggctgggctccctccacactccccaggccagtacctgccctctgcagcagctgggaaggaggcttagtggagcccacgtgggcctctggggtgcacatggggtgggaatgctccgggggtgacacaggccacggtggctccagccaggaccagccagaccagcagagcagggagccacttgccagggtggaggaggagcattgtccaggcatggcctgtggcccgagggccaaccaccgagcaggcacagcacagcagtgactcggtgaggggaggacacccgactgtgcacacttccaggcctccctggagaggtgtccactccatccttccctccgtggcgtagggagcactgtttctttccagcaagcctgttcaggtttggccaggtcggcatcaatgtaaggaccttcagagcatcccagggttacagcaagagccactgaggtgtggctggcagagcaactgaggagctctgcgagagtgtgccctctgagacagccctgtccgccccgcccaggtgggacctgacatacaggcggctccagccctgggcagcggcttcaagagccagagtgggaagtcaggcctctctgggaaggtcacaaggcctggggttgttcacaccacaggcacaatacagagctgtccactcttgaactggaccgtctggggagaattgagaagctgcctctcactgcatggatagtggtggctgctggctttcaagcgtggttttttgctaagagccagaggcaggtcttctggagttctcaggggggccctgtgaccccctctccacaaccatggccagcatcggcttcttgctgcacctgtgcattctccacccctccgccaatggcttccagctcctaaaacacctggacattccccatcctgcaccggcactgtgtttgttcagagaaaacgaagggtgtcatttcttcttttccctgtggcatcgtggatcctttacatttagcaacaacagtgtgaggctccacttctgttgaatatgagcggctgtcacacccatgagcaagtttccttgatggaagatgctgtttctccggcagaaccaaccctccaggacgaagtttcagaattggctgatggtcgtgagtgcaggtgtccctgttgtaatttgcagggaaattgactgcaggtgatagtgttgacgtctgacgtctgacaacctcctatgtgcatgtctaaatagtcacaatgaagatgaaaataaggatgatggggacggggtccaggagggccactgggaaggcactatccagaaatagtggacagaggtctggcatgtggaaaccttggatctcggtcacagggaggaaggcagctagaaatgggagggaagcttctgggtaggcaccatagtaggggaatgtctaaagacccactgctctgagatgtggtcagagaggtttctgtggactgcagatgaggcctgagccctgcctatgctcaaagccagcagggttgggggtccgcctcctcactgctcctcaacagctgtaaccctttcctgagggccccgacttttcagaataggagcagagagaagcccagacttccttccctggagtgtagacctgtgtgtgggacctgctccaggctgatccctgtccgcacaggtgggtgatgtccttggctgctgccgtcagaggcagccccctgcacagggaggggctgatcctgcctcagctgtgtggccatgtgggggcagcaggggcctgggccatagctgggggaggccagaccctgagggctttgcagggcggccagtgcagtgatgcctggcgcttccagctgagacaggagtccggacagaggtgggcagggtggatggcttcgggcagggaaggcgggtagaggctgcatgtgggggcccctgtctgcctgtccttagggtgtggattaggctctggcttctgtgatggtgcaagaggcaggatggtctccagacaccttcttgcagagtgattttgaccaatgcctttccagcaccttcccctggttatgacagggagctcccaggccaggccacatgaccccacaggtaggctgaccccatggacccactggagactttgagggcagagctcgggcacctttcatcttccttgggtggtcctcatgtcgctgtccgctcatgttcctggtgttctggcatcaccttgtgccggtgggggctgggctcccgtgaggtcctagggcagaaggaggtgcttgcagggcctctcgctgctactgggacatccacaggacctaatgtttatgtggaatctccaggctgccatcgagggctcctgagctcatcctgaggacccagggtccatctgagctggctgtgggctgagatcctggctggggccctgctgtcaacctctcctccaggccctgccttgtccctgctcctgtgctttcctctcttcaggacaaatggtttgtccttatggtcccctttccactaggattttctcatcctcatctgtctatcccagccggatttaaagcagtcacttcagacaggagccacagggagcctgtgagggagtagtgcggtggtggtgagtgtggctgccctggctcccccagctcaccgtggtgctgtccttgacccacgagctgttgagaagggtgcagagcccctggcacagccaaccctgttgcccccagtgccgctgcccagcttcggccatccaggtggtgggtagacagaggagtgaaccccaaaggtgtccatgccccagttctaagccctgtggccaggtgctgtcacacagcaaaggggactttgcaggtggaattagggttagggatctaaggatgggaggggaacttggtttatctgggtgggctcagtgaccccttggaatggctgagggaggcaggagagcctggaaagattcgaagtgtcacagagatggtgccgtcattgctggcttaaagacaaggggccaggagccaacaccagaggccactccacaaccccagcgccagtcagcaaggaagccgggtgtcgctcacacaaccagaaggagctgagtttggcaacaacccaagtgagcctgaagcagattcgccccagagcctccaggcgtgagtggagcccagtccagcgacaccttggtttggcctgtgagactgagaagagagccagccacgccatgctgtgcctggggtccacagagccgggaggtcacacatgtacatcctggaagctgcccaaggtgtggccacttgtagggcagtgagaggaagccgtcgcggggaccatgctgccttctctgggctcacgactgttctggaaaggaccccatggcagacttggcaaggtctccacttcaggggcaaacatctccatcatcagcaactccaaaccccagccacttcctgggagttcaggaactgtgtttagccataatgtcccttggggtttggtgaaaaacaacttcctttttatttgtgggaaaactgtattatattgccttatttatttttaatcatgtacaatattcatgtacaaatgttagagccattcgggtaggattctctctaaattatttattgaagaggctttgtaaatagtgcaccagtgacaggtgctgcctgtttactcgtaccaaaaatgaagacaagccccacacccacctcagcccttgcttggccatgctgtggccctttggaaatgaccctgtgtgctcccctcgcgacccttgcatgcctttcatgcctgatgccgtagagtagaacacagccccggaatgcttccagttgcttgcaagggaccatgccggcccgggtggtccatgcctgcggggtgtctgtatcctgcaggaggacgcccctacagacccagcaacccaagttgccagcccgtgtttctcagactttaaagccaccagggcttctggaacacctgtcatagaagcaataactctaactctatactgtagagatgagtctggtccgaagcagattagtaatttagagataagccatgcatacaagtttgccccattctctggcttggggtggtgggaggcggggagctgccactcccaaagcctccaccccttcctgaagacccagctatgaaaccgcagttcctgtgggttgggctgcccaggctggtcagagctcagcaccccaggtctggtgagcagacagagccggcgttaaaccccgatcaggtcattgtcaccacacccttgcttggatgaggaaggaaggaggcaaaggcacccactccatccaagatccgttccaattgatgagcctcagtactggcctcacactgaccaacggtggtatgctgcagtttgttggtttggtgcagagtctaaaggataacatatcaaggcttacctgtgataggccattttaaggaaatggtggcactctgaaggctgtccccattcaccttccacaatgctggtaccatcctggtagaagagccctctgaacaggacacctgttcaggcctgggggccccatgctaggcttgcctgggtgtgagaaggtcgaactgggtggcttaggccttcaaattgagcttgggggtgtccaagagaggggtcttattcgaggaactcacataccccaaataaccatcagtgcacaaatcattccatgctctttggcaccaggcaggagatgctgcaggcaggtgtccgtagttggcaaaaatgggcagtaggggaaatggagttgcttcaacctttctcagtcccggccctcactgcacccaccaagtcaagcagagctgggtgggctgagaccagcatcccagctggactgagcctggggggaggggctggagccaaggagcccccctgggtgggggcatcaggagcaggggcagggcctgaggactgctccccctgcatggagggcaggccaggatggagcccagggtagactttgaggaaggctcagtgggctcagcagaaggaaggctcttctcatagttgtggtttttcacagatggatttgggtgatctgagtgtggtcaggccctgccgttggggaatgaatgccacacggggtttgtctgtaagctgcagtgtctgtgattctgtgtgaactgacagcagggagctgaaggacaggccccggccttgggagaggacacgggcatgggctgctggatgcagggctcccagggctgtgaaggcagaggggtctctggaggcagacagggtgggctgggggccagcagcagggggcagagccccagccagggcagctgcttcctgcacatagacattcctcctgcgcagggccaagtgcccatgagcacagccccagacagacacggtggggagcttggagccctccgctcacctagaggagccctgggacacgcactggaaagtattctaggggcttcctgccttatccttctgtttgttcatacacttagtgaaagcagatcctgtactaggatgtgaggatatctgtcacctgcgtggtccattccataaacaccagattccatttcagttgccacacattttggggctagacttccctaaacaacatgccattgtgaaataatgcatatatttgtatttttaaatttccctgaaaatttaatctattctgttccatatgaagtctgtttcactaccttaaaaaatagatactccactagaggctgtgcttaattcaaatccatgtgtgtgcctgcattacatgtgtgaacacgtgtttctgtcgtgtgtgtcatgcacatctgtgtgttgcatagcataagccaaatgaaaatcatttgttcatgggattcatatgaggaacaaaattaaatttgaatacagtcagataactgccacgcagggcatttggggaaccatccccgaatgccctgatgtgatttccctcagaaaatccttgttattagaggagaaggtctgggcaggggcagcagcatctcagacatcaagtcaactttatcatctactacatcagcactgaagtccaggggcattgaggcactaactaggttccattttctttggtttggttacttattttttctttttgggttctcggtgtgcagaggctgtagagagagcctcagggcggtgaccgctgcaggaattcggccctccagctcccctccagttaccaggagccgatttggaggccaggccttcccagctgagtgtctgtcagcttcattctctctcagctgtgcagtggaagagcaacaacagacaggtgaccttcttgggttgtgcttcacaatggactgggaaaaacatctttgaaatcaggaaatcaggccgggcgcagtggctcatgcctgtaagcccagcactttgggaggcggaggcgggtggatccattgaggtcaggagctcaagaccagcctggtcaacatggtgaaaccccgtctctactaaaaatacaaaaaaaaaattagctgggcgtgttggcgggagcctgtagtcccagctacacgggaggctaaggtgggagaattgcttgaacccgggaggcggaggttgcagtgagctgagattgcaccattgcactccagcctgggcgacagagcaagactctctcaaaaaaaaaaaaaaaagaaagaaagaaatcagaaaatcgaccacagtggtagccacctggcctaatgctgtgtttttgtacctgacaggggtcactcattttaggcacaactccttcattctttgtgaaattagtgagtttccttctacccgtcaccagattcaatatgttctattaatacaccgataaccacaggggaagggcacttgtcgctctcccacctggttaccacagtctccatgggtcttttgccgtgaccacaaataaaggaaacactcatcactagtatctaagtcgggctttacagtaactatgcaccttctgtgtgcttcacctcactctctacttcaaacagcccatggagggaggtattattatactccttatgttgacagtgaagaatctgaggcccagagaggttggggacttgagtaaagtcacacagccctgagaggcaggaccagggttccattcctgctctatccagttccaagcccttgtgttttccattatgtttagtgcctctttgctaacagcaacatctgcaagatttgtgttggttttgatggagaactctagctcatccacatgctagtgcccaagtggtggaggggccacctcagcaggtgggttctgaatgcagccaaggctgtccccgcaatgggtgagactcgctccaactgcccgccctcagagcaggtgcctaagtcctccctggcactggcaggccttacctcacattgctaaattaaagcaatgcaattcctcttgggtaagaggaattcctccttctttactaactgatccccagcaaggaaataaaatgttaggctttaaaaatccctactttgtcatatcagactatattctaaaactatatttgagcgaaacctgtcattgcgtctaatttcaaatatacagaatctccttaagagctgttgccttatttttttgtaaagcctctctgacatcaaatggggagaaatggtggcacctccagacaccctgaaactacacaccatttcttccctgctcagcttctgctcaggagttctgtgagctatgggaaggccattggttgtatttgctacttttactttcatcttcctctgctgtagagccatttaatgttattgtcatatgctgctggtgaggtaaaggtgggtccgggtgccttcccaggggttagaggatgttcaaagggccgatttcagcaggagttcagagggcttatgatggatggtgagagatttgacaaccaccagagcacatgtgctctgaccctctcctgggcattggttcctgctggtaccgggcggttcagaccttcaaataggttgctttcaaaagagctttcaggcacttattgagaattaatgtttaaacagacataatagcctagatgaactcccaagagatctattaaatcttgtgggctgaataaatatctcgtgcaggactgtgcaacagtagcccagagcatcctgcctgtgggcatccacctcccaggtgagggcagtgggaagctggcccgacggcagccagaacttgtttctcacctcccaccagcaaccccccacccaactctgggccccaggcacacgaagcacaagtctcaggggaccattcccacattgggggatcctgagggagcccatcaccgcctcttgcatacaactgtccactaggaggcacgcccagtgtgggagagatgtatggtcttgccttccacctgtaaaaactgcacatatgcaagccatttgcactctggaactgcatgccgtgaaaactcctaatggtgtggaacttagtttgaatttgaaatcacgccgcatgcacaaagggacaggcccaggcccgacctcaggtcatccgcccgctggctgcagagcatccctgggagccaaggcgaggcccgtggagcctgagctttgtgtagctcgagctttgtgtagctcgtgcacttattatgcaccacctcccttcagtcaccactcctcttcctccgccatcctcatttatactgattgcacaccccccgctcaaacaacaatgtccttattatgatgaccatctcgtagtggtacattccattcctatttaaggtaagcccaaagcccacttttggattttctcgactgtccgagaaaagttgtgtaagcgcctgcgttcttctgggtttggctagatagggttgtgtccctctatggaatggagagtgatgtgggcaagggtgtcattttctcgcacaatacaactcactgaggatgcttctgtagaagtgagaaacacgatgagtacattcagaattacaataactcactctcactgggtaacttctcatgatagatttgtatgatcaatacgggtctatttttatgtcaactgaacactgtagggtaccttccagtctttttcaagattgttaaattgagacaagtaattgaataatttgtcctatttttattttaaaaaaagtgaatggactgaaatgttaaatgtgaatgtacatttcttaattgcaacttttctactgagtgtttgcactatactttctggaatcttatttaacaaaaataaagggaaaaaattgcttgactaaa

SEQ ID NO: 508 - DNA, 763 bp, Homo sapiens
  source 1..763: mol_type = unassigned DNA
ggactctagcagggtgagttgttttctgtaaggtccctgcgtattaattttagtttatatttatactttcagaagtgttaagtgtaaaaaggacttcttttatccgtgaaatcactttttgaagatttcaaaatgtctgtataatacatagatttaaaataaaatttctaataactctataaaacctacgtgaacaaaataataaaatttatttagagcatatcaaagaagacacaaatgaatggaaatttgtaccatttctgaaatggaagaattcaatataatgaaaataccaagttaatctatccagttaacttcagtgccaatcaaagttacaatgcaagtggaaggaagggaagtattattctttgtaatttaaagacttcaggtttctttttttaactttggcaagcttttcacctgggagaataaacaaatgaaaaaagccaagagacatgtgaggagggtgaaaaacggatgtggacctagcagcttgcaggtcatctgcacattccactataggaagtattaactgtgcacgtgaatcaccttggtaatcagagggtattttctaaattaacatttcttattcagtgttttccagggtgcctgacgattcagattcgcactgtcctgtgtattttcatagtggtcttaatctactcagtagcccaaggttgtgtggtgggctgcctgccttgggcctggagctccaagcccaacagttccctggtggtcctttcgtctgggggccagcgcacag

SEQ ID NO: 509 - DNA, 1647 bp, Homo sapiens
  source 1..1647: mol_type = unassigned DNA
gcaggtgccccagctgcagcaggtcggccagctggcgctgctcttcagcctcaccttcgcgctgctctgctgtcctttcgcgctgggcggccccgcccggggttccgccggggccgctggggggccagcgaccgccgaacaaggggtttggcagctccttttggtcaccttcgtgtcctatgccttgctgcccgtgcgcagcctgctggccataggctttgggctcgtggtggctgcgtcgcacttgctggtcacagccaccttggtccccgccaagcgcccacgtctctggaggacgctcggtgccaatgccttgctcttcgtcggtgtgaacatgtatggggtctttgtgcggattctgactgagcgttcacagaggaaggcgttcctgcaggcccggagctgcattgaggaccgactgaggctggaggatgagaacgagaagcaggagcggctcctcatgagcctcctgccccggaacgttgccatggagatgaaggaggacttcctgaagccccctgagaggattttccacaagatttacatccagaggcacgacaatgtgagcatcctgtttgctgacatcgtgggtttcacgggcttggcatcccagtgcacagcccaggagctggtgaaactcctcaatgagctcttcggcaagttcgatgaattagccacggagaaccactgtcgccgcatcaagattctcggggactgctactactgcgtgtcgggcctcacccagcccaagactgaccatgcccactgctgtgtggagatgggactcgacatgattgataccatcacatctgtggctgaagccaccgaggtggatctgaacatgcgtgtgggtctgcacacgggcagggtcctctgtggtgtcctgggcttgcgcaagtggcagtacgacgtgtggtccaatgatgtgaccttggccaatgtcatggaagccgctggcctgccagggaaggttcatatcacaaagacgaccctagcgtgcttgaatggggactacgaggtagaaccgggttacggacatgagaggaacagtttcttgaaaactcataacatcgaaaccttttttattgtgccatcccatcgccgaaagatatttccaggcctgattctctcagatataaaaccggccaaaaggatgaagttcaagactgtctgctacctgctggtgcagctcatgcactgccggaaaatgttcaaggccgagatccccttctccaatgtcatgacctgcgaggacgatgacaaggttcagatccatccctcactgagtggcctggatgtcctcctggggttttggtctcccaccctgcaacggggacgactgtgcacgtagcttcaggtcctgcccaacagccactgtcaccagtgctgcaaggatgagctcctgccatcagcccttatcccccagggcattcacgccagctctgttcttctctcagcactctctcctgatcgtaaacataattgattatggaaaatatggagaacacaaagatgcacaagggagaaaatgaaaagcatttatctggaatcctaccatctcacaaaaaagctatcatgaacattttgttccttccagtttcttaagtttgtgtgtctgtatttttttaataaacttgactggatggt

SEQ ID NO: 510 - DNA, 6487 bp, Homo sapiens
  source 1..6487: mol_type = unassigned DNA
gcgagcgtggtccccgcgtgcgcacacgcacacgccgccgcgcagggacacacggaccccggccgccagccggccacacaggcgcggagacccggctcggcgcgcgctcctcggcgcacacgctccccatccccgcgccgcgcgggccgcggacttgcaggctgcgcgtcctttgcggagtctgccccggccccacggacaggccccgcagtgagcagcccagagacacattggggctgacctgccgctgctgtcagtgggaggccagtggtgctggccaagaagtgtcatggctggtgtcgtgcacgtttccctggctgctctcctcctgctgcctatggcccctgccatgcattctgactgcatcttcaagaaggagcaagccatgtgcctggagaagatccagagggccaatgagctgatgggcttcaatgattcctctccaggctgtcctgggatgtgggacaacatcacgtgttggaagcccgcccatgtgggtgagatggtcctggtcagctgccctgagctcttccgaatcttcaacccagaccaagtctgggagaccgaaaccattggagagtctgattttggtgacagtaactccttagatctctcagacatgggagtggtgagccggaactgcacggaggatggctggtcggaacccttccctcattactttgatgcctgtgggtttgatgaatatgaatctgagactggggaccaggattattactacctgtcagtgaaggccctctacacggttggctacagcacatccctcgtcaccctcaccactgccatggtcatcctttgtcgcttccggaagctgcactgcacacgcaacttcatccacatgaacctgtttgtgtcgttcatgctgagggcgatctccgtcttcatcaaagactggattctgtatgcggagcaggacagcaaccactgcttcatctccactgtggaatgtaaggccgtcatggttttcttccactactgtgttgtgtccaactacttctggctgttcatcgagggcctgtacctcttcactctgctggtggagaccttcttccctgaaaggagatacttctactggtacaccatcattggctgggggaccccaactgtgtgtgtgacagtgtgggctacgctgagactctactttgatgacacaggctgctgggatatgaatgacagcacagctctgtggtgggtgatcaaaggccctgtggttggctctatcatggttaactttgtgctttttattggcattatcgtcatccttgtgcagaaacttcagtctccagacatgggaggcaatgagtccagcatctacttgcgactggcccggtccaccctgctgctcatcccactattcggaatccactacacagtatttgccttctccccagagaatgtcagcaaaagggaaagactcgtgtttgagctggggctgggctccttccagggctttgtggtggctgttctctactgttttctgaatggtgaggtacaagcggagatcaagcgaaaatggcgaagctggaaggtgaaccgttacttcgctgtggacttcaagcaccgacacccgtctctggccagcagtggggtgaatgggggcacccagctctccatcctgagcaagagcagctcccaaatccgcatgtctggcctccctgctgacaatctggccacctgagccatgctcccctcctcctcctctcctccatccacaggctgggaccgcaggcaggtgccagcccacgcatgtttgcgcctcttccctccccttgggcaggccctgggctggaagcttggctcctgaggggggagaaggaggcagggcacagactggaattgtcccctccttgttttggtactggtcccacccactgtggtcccctgggccctgaccccagacatgtaaatactcctcaaatttggaaaagttgtcccatcccttccccctttgccccagtgtccctgctcacttccagtcaggtctcagctccaccccactgtttcttggtcagcctcagtgatggcctgaccccagctgtgaggccttgtgagctaaggctgaagagaccttgcctgtgggagctggggtggtacctgccccaacagccccccatcatctgattttgggtgtgacccctcgagtgtgcatgccaccctggggctcttctcagtcctgggcccaagtccctgaagcctagcagagggccagctcgggtggccagaacaccccttggtgcaggcctcctggcactcgcctggcatcttggtgtccgggtgctcagctcctgggtcccagggcagtgggacagctcccaggctcttctcatcagagacttcagtttgggtggggagtctgcaggtcagggaaggttctggtgcttttcgtttgatccaaaaggagctgagagccagaaatgtggctgtgattgcgaaagagacggagtttgggagacccatggaagaaaaccttcgccatctccattgttttacccccagctcaagatggacagggttcttctggtcatctcccttccacctcttccaccctcatggatgccttccagaagctgtctccaaccatgcacaccacagagagcccttaagccctcccctccccatttcccctaagtcaaagccatgactaggatgtaccagccacctgcctctgatgtcggcgaatcctgaagcacctgcacccgaatctggggcccagggctgcccgacccccactcccatggatgatgaggagccccagacaccagctcctctggcctggactcaactattgaaatctctctgagacctctgcaaagatgtcccttttatgcccttgaccttgactcaccatgggctgctggggtgtcgggagaagccacacccaacatgcccattagcagaggctgctgctgatgtggcagctgctccctaccacccgccctggctccccagctgcaggttgcacaccctcagcctgagaatgtaaaatagggcagtgcccagctggggaggtagaggaaagtgctagagtacatggtccgtgtgtggcctagctcattccatgtcagcatttggtgttactcctgtccaaattctgtttgcagacttgtttcatgatgatgctctggaatgcttggggactttgggtggaggaggatgttacttcattttataaagaggaaggggcctgggagacttgggaaaatgtttctggagaggctttcagagtggctggaaaaggctcttgttgctgtaatttagagaggagctctgtgtccttggccagtcaagtaagttcctggatctttggcaaagccagaggaagaaaggagctacctgccctttcctgggcatgcttggtgactcagattgatcttggagtgtgcagtggcccttctaccctgcacctgacctcatgatcccctccacctgcactggtgtgcattactgaagcaagggtcctgtggacatcttgcattttgggcactgctagggggtctgggctgcttggaaggagccatggcctagggttcagggaactagactctatcccagttgggttcagactgctgtgactgtggacacgatgctccttgttctgggctccagttttcccatttgtgagatgaggcaacttccaatgcttctctaggccctgcacgtaagtgatttttccagttcaaagtcaagacaggtaaaagggcattcatcattgtgcctcatatcaggttttgatgaatatatgtgtgtgtgtgtgtgtgtgtgtgtgtgtgtgtgtagagggatggacaggatgctgtttattttccctttcttggaaatggaccttctgtcccttccatttggacaccacagtggaagctggtggcctggaaggaaggattaggtcatggacatttgaacaggtgccttgggcatgatgtatagatgcagtcatatataccttgctggggtggggtgccacctccagtggccagctccagatccaaggagcagccccctggggatggaccccattcattcatcatgactcccaacagttttcattgtggaagaagaaactttggcattatagagacatcatcacaaaacagtaaaaacaaaatcaaccctgaaccccatgcactgtgctgcttcctgagcctggccctgcatcctcatagaggtgccgggttcctattggttagttggttgtttttccgtctgagtgaatttttgccagtcttgtgagcagatgtacctgatgtattctcaatgttccaagaggttctggccttcagggtcacaggcagtagggggacagcataaggtctatgtaaaacccttccctctctgaccctctgttttcaaatctgtaaaatgggcaataagactagatgatttgtatatagcccaatgcatctctggaactctgtctaaacaccagccatctacttggaatgggccccaggactgtggtatttgcctgggccaggaaaggataagaaatcctgtcatgtgaagacagcttgagaggcttgagaaaagtggggctggggagaagcaggcttgtcagactccacccctgttgatgatcattcctgggaaggggtttctcgttctatgcaatcctaaaggacgaaactcacccatgggaggccgaattctccttgggatgaagaaatttctctttccctgtcatgagtgtccagccagggagcagggaggcagtgtcagggagggactctcatcctggaggaaatgggattccaagtcaaggatgctgaggctgtcagggagccagagaggggggtccaagtgcgggatgtgggtggctctgtggttcagtggctctgtggtagttcctagcactgcagacttcatgactccccacttaagtccaagtcacattgtctatcccagtgtgtagctctgtcaccctgcttgacacatccagtggcctacagcgactcttctctaaccccaccccctccaagctgggttctttgtggaagaaggacagggagctagagccaagccctaggcttgagagacacctgcatctataatccccgccaaggatgcccactcacctctctcatctgatcctcactctttgtggaagggaaagctcaaagggactctctctctctctctctttttttttttttttgagtagtacccttgccctcttcatggccacttcaaagtgaagccagcaaagtgataatactttatcatttagtattatcataaagtattaatactttgtcataaagtcctccttgagcccagggaccatggaagtcagctagaagagccctgagcaaggagcaaggacttgggcttctccacgctttgctcctggcttgtttgaccttgactcattccccatatgtctttgaggaggctcacaaaatactaaagctgggaggaaacttggagatctataggtcaaacctccccattgggctgatgagaaaatacacgcaggcctagcatggtgcctgccaccatggtgggatccagtatgttttataaatctgaatgagtaaatggctcaccaatttatgcatagccctgcacatgagcagaatgtgacactcaaagcatccatgcagtacgcatgtaaccttgcacaggagtggggctctggtgaccgaaggttgtccaggactcttgcaggagaagcaatggagtcagtgtggtgtggggagacctactttttaacctgggcttagccacctgctctgtgatccagggcttaccttctttgggcctcggcctcctaatctgggtaatggggaggacttcattggcattgttagtcccacaggccaaggataaggttgaaatgagacggcttgtgtgtgaaaagattttggaaattacacagatgtgggcttgttattgggatgaagactgctggaagggactccttgctgtttatctactgctttgagccctcctaagttaacctgtgcctcatttgtaaaaccaccagcatcaggagtaagggggaggccagagggctcagatggacacagaattctagctttacctgcatccgctgattcagttttctgttgggatcagagtgaggatacttccatatgggtgatagcagccatgcccctgggagtcaacttcaaggatctgggacattttggtgtgcccattccttcttttcctgaactcacagtcttggggtgtttctgcacttggctatgtgtgtcttgtctgatgtctgtcttctgtagctttgcctctatcagggctggagtggtgcagcccctggcatctcagacatggttcctgcctcacttgtgggagctggaccagcctgggtttcatctcccacagtaaagctaagtaagccccacagaccttactgctactgctgctgccattaatgctgtgctcactatcttgtccaggattttaaggatgtcagactgctgtagatgactcaataaatgttttgccatttttc

SEQ ID NO: 511 - DNA, 1889 bp, Homo sapiens
  source 1..1889: mol_type = unassigned DNA
cagccggccacacaggcgcggagacccggctcggcgcgcgctcctcggcgcacacgctccccatccccgcgccgcgcgggccgcggacttgcaggctgcgcgtcctttgcggagtctgccccggccccacggacaggccccgcagtgagcagcccagagacacattggggctgacctgccgctgctgtcagtgggaggccagtggtgctggccaagaagtgtcatggctggtgtcgtgcacgtttccctggctgctctcctcctgctgcctatggcccctgccatgcattctgactgcatcttcaagaaggagcaagccatgtgcctggagaagatccagagggccaatgagctgatgggcttcaatgattcctctccaggctgtcctgggatgtgggacaacatcacgtgttggaagcccgcccatgtgggtgagatggtcctggtcagctgccctgagctcttccgaatcttcaacccagaccaagacatgggagtggtgagccggaactgcacggaggatggctggtcggaacccttccctcattactttgatgcctgtgggtttgatgaatatgaatctgagactggggaccaggattattactacctgtcagtgaaggccctctacacggttggctacagcacatccctcgtcaccctcaccactgccatggtcatcctttgtcgcttccggaagctgcactgcacacgcaacttcatccacatgaacctgtttgtgtcgttcatgctgagggcgatctccgtcttcatcaaagactggattctgtatgcggagcaggacagcaaccactgcttcatctccactgtggaatgtaaggccgtcatggttttcttccactactgtgttgtgtccaactacttctggctgttcatcgagggcctgtacctcttcactctgctggtggagaccttcttccctgaaaggagatacttctactggtacaccatcattggctgggggaccccaactgtgtgtgtgacagtgtgggctacgctgagactctactttgatgacacaggctgctgggatatgaatgacagcacagctctgtggtgggtgatcaaaggccctgtggttggctctatcatggttaactttgtgctttttattggcattatcgtcatccttgtgcagaaacttcagtctccagacatgggaggcaatgagtccagcatctacttgcgactggcccggtccaccctgctgctcatcccactattcggaatccactacacagtatttgccttctccccagagaatgtcagcaaaagggaaagactcgtgtttgagctggggctgggctccttccagggctttgtggtggctgttctctactgttttctgaatggtgaggtacaagcggagatcaagcgaaaatggcgaagctggaaggtgaaccgttacttcgctgtggacttcaagcaccgacacccgtctctggccagcagtggggtgaatgggggcacccagctctccatcctgagcaagagcagctcccaaatccgcatgtctggcctccctgctgacaatctggccacctgagccatgctcccctcctcctcctctcctccatccacaggctgggaccgcaggcaggtgccagcccacgcatgtttgcgcctcttccctccccttgggcaggccctgggctggaagcttggctcctgaggggggagaaggaggcagggcacagactggaattgtcccctccttgttttggtactggtcccacccactgtggtcccctgggccctgaccccagacatgtaaatactcctcaaatttggaaaagttgtcccatcccttccccctttgccccagtgtccctgctcacttccagtcaggtctcagctccaccccactg

SEQ ID NO: 512 - DNA, 466 bp, Homo sapiens
  source 1..466: mol_type = unassigned DNA
atccaggttttctgggcactcgtgtgtcttgcctgtgccaggtgctgtgggcacacgcacgtcagagctgggctcatgctcacttaggagaggctgaagcttaaccagcgtctgcacaaagggaaaggcgctcagtgcagagctactcctctccacaccacaccccctgccggcccagagacacattggggctgacctgccgctgctgtcagtgggaggccagtggtgctggccaagaagtgtcatggctggtgtcgtgcacgtttccctggctgctctcctcctgctgcctatggcccctgccatgcattctgactgcatcttcaagaaggagcaagccatgtgcctggagaagatccagagggccaatgagctgatgggcttcaatgattcctctccaggctgtcctgggatgtgggacaacatcacgtgttggaagcccgcccatgtgggtgagatggtcctg

SEQ ID NO: 513 - DNA, 1587 bp, Homo sapiens
  source 1..1587: mol_type = unassigned DNA
cccagagacacattggggctgacctgccgctgctgtcagtgggaggccagtggtgctggccaagaagtgtcatggctggtgtcgtgcacgtttccctggctgctctcctcctgctgcctatggcccctgccatgcattctgactgcatcttcaagaaggagcaagccatgtgcctggagaagatccagagggccaatgagctgatgggcttcaatgattcctctccaggctgtcctgggatgtgggacaacatcacgtgttggaagcccgcccatgtgggtgagatggtcctggtcagctgccctgagctcttccgaatcttcaacccagaccaagtctgggagaccgaaaccattggagagtctgattttggtgacagtaactccttagatctctcagacatgggagtggtgagccggaactgcacggaggatggctggtcggaacccttccctcattactttgatgcctgtgggtttgatgaatatgaatctgagactggggaccaggattattactacctgtcagtgaaggccctctacacggttggctacagcacatccctcgtcaccctcaccactgccatggtcatcctttgtcgcttccggaagctgcactgcacacgcaacttcatccacatgaacctgtttgtgtcgttcatgctgagggcgatctccgtcttcatcaaagactggattctgtatgcggagcaggacagcaaccactgcttcatctccactgtggaatgtaaggccgtcatggttttcttccactactgtgttgtgtccaactacttctggctgttcatcgagggcctgtacctcttcactctgctggtggagaccttcttccctgaaaggagatacttctactggtacaccatcattggctgggggaccccaactgtgtgtgtgacagtgtgggctacgctgagactctactttgatgacacaggctgctgggatatgaatgacagcacagctctgtggtgggtgatcaaaggccctgtggttggctctatcatggttaactttgtgctttttattggcattatcgtcatccttgtgcagaaacttcagtctccagacatgggaggcaatgagtccagcatctacttcagctgcgtgcagaaatgctactgcaagccacagcgggctcagcagcactcttgcaagatgtcagaactgtccaccattactctgcgactggcccggtccaccctgctgctcatcccactattcggaatccactacacagtatttgccttctccccagagaatgtcagcaaaagggaaagactcgtgtttgagctggggctgggctccttccagggctttgtggtggctgttctctactgttttctgaatggtgaggtacaagcggagatcaagcgaaaatggcgaagctggaaggtgaaccgttacttcgctgtggacttcaagcaccgacacccgtctctggccagcagtggggtgaatgggggcacccagctctccatcctgagcaagagcagctcccaaatccgcatgtctggcctccctgctgacaatctggccacctgagccatgctcccctcctcctcctctc

SEQ ID NO: 514 - DNA, 1761 bp, Homo sapiens
  source 1..1761: mol_type = unassigned DNA
gccagtggtgctggccaagaagtgtcatggctggtgtcgtgcacgtttccctggctgctctcctcctgctgcctatggcccctgccatgcattctgactgcatcttcaagaaggagcaagccatgtgcctggagaagatccagagggccaatgagctgatgggcttcaatgattcctctccaggctgtcctgggatgtgggacaacatcacgtgttggaagcccgcccatgtgggtgagatggtcctggtcagctgccctgagctcttccgaatcttcaacccagaccaagtctgggagaccgaaaccattggagagtctgattttggtgacagtaactccttagatctctcagacatgggagtggtgagccggaactgcacggaggatggctggtcggaacccttccctcattactttgatgcctgtgggtttgatgaatatgaatctgagactggggaccaggattattactacctgtcagtgaaggccctctacacggttggctacagcacatccctcgtcaccctcaccactgccatggtcatcctttgtcgcttccggaagctgcactgcacacgcaacttcatccacatgaacctgtttgtgtcgttcatgctgagggcgatctccgtcttcatcaaagactggattctgtatgcggagcaggacagcaaccactgcttcatctccactgtggaatgtaaggccgtcatggttttcttccactactgtgttgtgtccaactacttctggctgttcatcgagggcctgtacctcttcactctgctggtggagaccttcttccctgaaaggagatacttctactggtacaccatcattggctgggggaccccaactgtgtgtgtgacagtgtgggctacgctgagactctactttgatgacacaggctgctgggatatgaatgacagcacagctctgtggtgggtgatcaaaggccctgtggttggctctatcatggttaactttgtgctttttattggcattatcgtcatccttgtgcagaaacttcagtctccagacatgggaggcaatgagtccagcatctacttaacaaatttaagcccgcgagtccccaagaaagcccgagaggaccccctgcctgtgccctcagaccagcattcactccctttcctcagctgcgtgcagaaatgctactgcaagccacagcgggctcagcagcactcttgcaagatgtcagaactgtccaccattactctgcgactggcccggtccaccctgctgctcatcccactattcggaatccactacacagtatttgccttctccccagagaatgtcagcaaaagggaaagactcgtgtttgagctggggctgggctccttccagggctttgtggtggctgttctctactgttttctgaatggtgaggtacaagcggagatcaagcgaaaatggcgaagctggaaggtgaaccgttacttcgctgtggacttcaagcaccgacacccgtctctggccagcagtggggtgaatgggggcacccagctctccatcctgagcaagagcagctcccaaatccgcatgtctggcctccctgctgacaatctggccacctgagccatgctcccctcctcctcctctcctccatccacaggctgggaccgcaggcaggtgccagcccacgcatgtttgcgcctcttccctccccttgggcaggccctgggctggaagcttggctcctgaggggggagaaggaggcagggcacagactggaatt

SEQ ID NO: 515 - DNA, 441 bp, Homo sapiens
  source 1..441: mol_type = unassigned DNA
ggctacgctgagactctactttgatgacacaggctgctgggatatgaatgacagcacagctctgtggtgggtgatcaaaggccctgtggttggctctatcatggttaactttgtgctttttattggcattatcgtcatccttgtgcagaaacttcagtctccagacatgggaggcaatgagtccagcatctacttaacaaatttaagcccgcgagtccccaagaaagcccgagaggaccccctgcctgtgccctcagaccagcattcactccctttcctgcgactggcccggtccaccctgctgctcatcccactattcggaatccactacacagtatttgccttctccccagagaatgtcagcaaaagggaaagactcgtgtttgagctggggctgggctccttccagggctttgtggtggctgttctctactgttttct

SEQ ID NO: 516 - DNA, 6575 bp, Homo sapiens
  source 1..6575: mol_type = unassigned DNA
gcgagcgtggtccccgcgtgcgcacacgcacacgccgccgcgcagggacacacggaccccggccgccagccggccacacaggcgcggagacccggctcggcgcgcgctcctcggcgcacacgctccccatccccgcgccgcgcgggccgcggacttgcaggctgcgcgtcctttgcggagtctgccccggccccacggacaggccccgcagtgagcagcccagagacacattggggctgacctgccgctgctgtcagtgggaggccagtggtgctggccaagaagtgtcatggctggtgtcgtgcacgtttccctggctgctctcctcctgctgcctatggcccctgccatgcattctgactgcatcttcaagaaggagcaagccatgtgcctggagaagatccagagggccaatgagctgatgggcttcaatgattcctctccaggctgtcctgggatgtgggacaacatcacgtgttggaagcccgcccatgtgggtgagatggtcctggtcagctgccctgagctcttccgaatcttcaacccagaccaagtctgggagaccgaaaccattggagagtctgattttggtgacagtaactccttagatctctcagacatgggagtggtgagccggaactgcacggaggatggctggtcggaacccttccctcattactttgatgcctgtgggtttgatgaatatgaatctgagactggggaccaggattattactacctgtcagtgaaggccctctacacggttggctacagcacatccctcgtcaccctcaccactgccatggtcatcctttgtcgcttccggaagctgcactgcacacgcaacttcatccacatgaacctgtttgtgtcgttcatgctgagggcgatctccgtcttcatcaaagactggattctgtatgcggagcaggacagcaaccactgcttcatctccactgtggaatgtaaggccgtcatggttttcttccactactgtgttgtgtccaactacttctggctgttcatcgagggcctgtacctcttcactctgctggtggagaccttcttccctgaaaggagatacttctactggtacaccatcattggctgggggaccccaactgtgtgtgtgacagtgtgggctacgctgagactctactttgatgacacaggctgctgggatatgaatgacagcacagctctgtggtgggtgatcaaaggccctgtggttggctctatcatggttaactttgtgctttttattggcattatcgtcatccttgtgcagaaacttcagtctccagacatgggaggcaatgagtccagcatctacttcagctgcgtgcagaaatgctactgcaagccacagcgggctcagcagcactcttgcaagatgtcagaactgtccaccattactctgcgactggcccggtccaccctgctgctcatcccactattcggaatccactacacagtatttgccttctccccagagaatgtcagcaaaagggaaagactcgtgtttgagctggggctgggctccttccagggctttgtggtggctgttctctactgttttctgaatggtgaggtacaagcggagatcaagcgaaaatggcgaagctggaaggtgaaccgttacttcgctgtggacttcaagcaccgacacccgtctctggccagcagtggggtgaatgggggcacccagctctccatcctgagcaagagcagctcccaaatccgcatgtctggcctccctgctgacaatctggccacctgagccatgctcccctcctcctcctctcctccatccacaggctgggaccgcaggcaggtgccagcccacgcatgtttgcgcctcttccctccccttgggcaggccctgggctggaagcttggctcctgaggggggagaaggaggcagggcacagactggaattgtcccctccttgttttggtactggtcccacccactgtggtcccctgggccctgaccccagacatgtaaatactcctcaaatttggaaaagttgtcccatcccttccccctttgccccagtgtccctgctcacttccagtcaggtctcagctccaccccactgtttcttggtcagcctcagtgatggcctgaccccagctgtgaggccttgtgagctaaggctgaagagaccttgcctgtgggagctggggtggtacctgccccaacagccccccatcatctgattttgggtgtgacccctcgagtgtgcatgccaccctggggctcttctcagtcctgggcccaagtccctgaagcctagcagagggccagctcgggtggccagaacaccccttggtgcaggcctcctggcactcgcctggcatcttggtgtccgggtgctcagctcctgggtcccagggcagtgggacagctcccaggctcttctcatcagagacttcagtttgggtggggagtctgcaggtcagggaaggttctggtgcttttcgtttgatccaaaaggagctgagagccagaaatgtggctgtgattgcgaaagagacggagtttgggagacccatggaagaaaaccttcgccatctccattgttttacccccagctcaagatggacagggttcttctggtcatctcccttccacctcttccaccctcatggatgccttccagaagctgtctccaaccatgcacaccacagagagcccttaagccctcccctccccatttcccctaagtcaaagccatgactaggatgtaccagccacctgcctctgatgtcggcgaatcctgaagcacctgcacccgaatctggggcccagggctgcccgacccccactcccatggatgatgaggagccccagacaccagctcctctggcctggactcaactattgaaatctctctgagacctctgcaaagatgtcccttttatgcccttgaccttgactcaccatgggctgctggggtgtcgggagaagccacacccaacatgcccattagcagaggctgctgctgatgtggcagctgctccctaccacccgccctggctccccagctgcaggttgcacaccctcagcctgagaatgtaaaatagggcagtgcccagctggggaggtagaggaaagtgctagagtacatggtccgtgtgtggcctagctcattccatgtcagcatttggtgttactcctgtccaaattctgtttgcagacttgtttcatgatgatgctctggaatgcttggggactttgggtggaggaggatgttacttcattttataaagaggaaggggcctgggagacttgggaaaatgtttctggagaggctttcagagtggctggaaaaggctcttgttgctgtaatttagagaggagctctgtgtccttggccagtcaagtaagttcctggatctttggcaaagccagaggaagaaaggagctacctgccctttcctgggcatgcttggtgactcagattgatcttggagtgtgcagtggcccttctaccctgcacctgacctcatgatcccctccacctgcactggtgtgcattactgaagcaagggtcctgtggacatcttgcattttgggcactgctagggggtctgggctgcttggaaggagccatggcctagggttcagggaactagactctatcccagttgggttcagactgctgtgactgtggacacgatgctccttgttctgggctccagttttcccatttgtgagatgaggcaacttccaatgcttctctaggccctgcacgtaagtgatttttccagttcaaagtcaagacaggtaaaagggcattcatcattgtgcctcatatcaggttttgatgaatatatgtgtgtgtgtgtgtgtgtgtgtgtgtgtgtgtgtagagggatggacaggatgctgtttattttccctttcttggaaatggaccttctgtcccttccatttggacaccacagtggaagctggtggcctggaaggaaggattaggtcatggacatttgaacaggtgccttgggcatgatgtatagatgcagtcatatataccttgctggggtggggtgccacctccagtggccagctccagatccaaggagcagccccctggggatggaccccattcattcatcatgactcccaacagttttcattgtggaagaagaaactttggcattatagagacatcatcacaaaacagtaaaaacaaaatcaaccctgaaccccatgcactgtgctgcttcctgagcctggccctgcatcctcatagaggtgccgggttcctattggttagttggttgtttttccgtctgagtgaatttttgccagtcttgtgagcagatgtacctgatgtattctcaatgttccaagaggttctggccttcagggtcacaggcagtagggggacagcataaggtctatgtaaaacccttccctctctgaccctctgttttcaaatctgtaaaatgggcaataagactagatgatttgtatatagcccaatgcatctctggaactctgtctaaacaccagccatctacttggaatgggccccaggactgtggtatttgcctgggccaggaaaggataagaaatcctgtcatgtgaagacagcttgagaggcttgagaaaagtggggctggggagaagcaggcttgtcagactccacccctgttgatgatcattcctgggaaggggtttctcgttctatgcaatcctaaaggacgaaactcacccatgggaggccgaattctccttgggatgaagaaatttctctttccctgtcatgagtgtccagccagggagcagggaggcagtgtcagggagggactctcatcctggaggaaatgggattccaagtcaaggatgctgaggctgtcagggagccagagaggggggtccaagtgcgggatgtgggtggctctgtggttcagtggctctgtggtagttcctagcactgcagacttcatgactccccacttaagtccaagtcacattgtctatcccagtgtgtagctctgtcaccctgcttgacacatccagtggcctacagcgactcttctctaaccccaccccctccaagctgggttctttgtggaagaaggacagggagctagagccaagccctaggcttgagagacacctgcatctataatccccgccaaggatgcccactcacctctctcatctgatcctcactctttgtggaagggaaagctcaaagggactctctctctctctctctttttttttttttttgagtagtacccttgccctcttcatggccacttcaaagtgaagccagcaaagtgataatactttatcatttagtattatcataaagtattaatactttgtcataaagtcctccttgagcccagggaccatggaagtcagctagaagagccctgagcaaggagcaaggacttgggcttctccacgctttgctcctggcttgtttgaccttgactcattccccatatgtctttgaggaggctcacaaaatactaaagctgggaggaaacttggagatctataggtcaaacctccccattgggctgatgagaaaatacacgcaggcctagcatggtgcctgccaccatggtgggatccagtatgttttataaatctgaatgagtaaatggctcaccaatttatgcatagccctgcacatgagcagaatgtgacactcaaagcatccatgcagtacgcatgtaaccttgcacaggagtggggctctggtgaccgaaggttgtccaggactcttgcaggagaagcaatggagtcagtgtggtgtggggagacctactttttaacctgggcttagccacctgctctgtgatccagggcttaccttctttgggcctcggcctcctaatctgggtaatggggaggacttcattggcattgttagtcccacaggccaaggataaggttgaaatgagacggcttgtgtgtgaaaagattttggaaattacacagatgtgggcttgttattgggatgaagactgctggaagggactccttgctgtttatctactgctttgagccctcctaagttaacctgtgcctcatttgtaaaaccaccagcatcaggagtaagggggaggccagagggctcagatggacacagaattctagctttacctgcatccgctgattcagttttctgttgggatcagagtgaggatacttccatatgggtgatagcagccatgcccctgggagtcaacttcaaggatctgggacattttggtgtgcccattccttcttttcctgaactcacagtcttggggtgtttctgcacttggctatgtgtgtcttgtctgatgtctgtcttctgtagctttgcctctatcagggctggagtggtgcagcccctggcatctcagacatggttcctgcctcacttgtgggagctggaccagcctgggtttcatctcccacagtaaagctaagtaagccccacagaccttactgctactgctgctgccattaatgctgtgctcactatcttgtccaggattttaaggatgtcagactgctgtagatgactcaataaatgttttgccatttttcctgg

SEQ ID NO: 517 - DNA, 3745 bp, Homo sapiens
  source 1..3745: mol_type = unassigned DNA
catttcctcccagcctcgtgcgggaaatggctttaattctgacggcagggctgtgagggactagcgggaacccgagccttttgtcaaggaactgcggcgtcggtggccagtcatccccgccgccgcggagccgctgcactgctgggggatctcccagcagctctgacgagcgcgggctgcagcatgggcagaaaacgctgccctgcagattagctgggtggattttttaagcgcaccccaccccccaaacccataaaataacaaaaccaacccgcagtggccgaccggagatagctaagatgccgcgcaggagtttccacctggatgtttgaggttgtgtagatgtggccggcacccttgagagtggagctagggggtgcagactgagcagtgaacagaaggagccttggacagggctgggccagcctcccgagttccaggagcgaattgcaaacccaccgggaaaatgagcgaagagacggtccccgaggctgcctcgccgccgcccccgcaggggcagccttactttgaccgcttctcagaggacgaccccgagtacatgcgccttcgcaaccgggcggcggacctgcggcaggacttcaacctgatggagcagaagaagcgcgtcaccatgatcctgcagagtccctctttcagggaggagctggaaggcctcatccaggagcagatgaagaaggggaacaactcctccaacatctgggccctgcgacagatcgcggacttcatggccagcacctcccacgcagtcttcccgacatcttccatgaatgtctccatgatgacgcctatcaatgacctccacacagctgactccctgaacctggccaaaggggagcggctcatgcggtgcaagatcagcagtgtctaccgactcctggacctctatggctgggcccagctgagtgacacctatgtcacgttgagagtcagcaaggagcaggaccacttcctgatcagccctaagggagtttcttgcagtgaagtcacagcgtccagcctgatcaaggtgaacattctgggagaggtggtggagaagggcagcagctgcttcccagtggacaccacaggcttctgtctgcactcggccatctatgcagcgaggcccgacgtgcgctgcatcatccacctgcacacaccggccacagcagcggtgtcggccatgaagtggggcctcctgcctgtctcccacaatgccctgctggtgggggacatggcctattatgacttcaatggggaaatggagcaggaagccgatcggatcaacctgcagaagtgccttggacccacctgcaagatcctggtgctaagaaaccatggagtggttgctctgggtgacacggtagaggaggcattttacaagatcttccacctgcaggctgcatgtgagatacaggtgtcggctctgtccagtgccgggggagtggagaacctcatcctcctggagcaggagaagcaccggccccatgaggtgggctccgtgcagtgggccgggagcacctttgggcctatgcagaagagtcggctgggggagcatgagtttgaggccctcatgaggatgctggacaacctgggctacagaacaggttacacgtatcgccacccctttgttcaagagaaaaccaaacacaaaagtgaggtggagattccagccacggtcacagccttcgtgtttgaggaggacggtgccccggtgcccgccctgcgacagcatgcccagaagcagcagaaggagaagacccgctggctcaatacgcccaacacctacctgcgggtcaatgtggccgatgaggtccagaggagcatgggcagcccccgacccaagaccacgtggatgaaggctgacgaggtggagaaatccagcagtggcatgccgattcgcatcgaaaacccaaaccaatttgtgcctctctatactgacccccaggaagtactggagatgaggaacaagattcgagaacaaaaccgacaagatgtgaagtcagcggggcctcagtcccagctcctggcgagcgtcattgccgagaagagccgaagcccgtctacagagagccagctgatgtccaagggagacgaggataccaaagacgattcagaggagacggtgcccaaccccttcagccaactcactgaccaggagttggaggagtacaagaaagaggtggagaggaagaaactagaacttgatggagagaaagaaactgccccagaagagcctggctcacctgcaaagtctgcacctgcttctccagtgcagagcccagcgaaggaggcagagacaaagagccctttagtctctccttccaagtctttagaggaaggtactaagaagacagaaacaagcaaagccgccaccacagagcccgaaacaacccagccggaaggggtggtggtcaacgggagggaggaggagcagacggcagaggaaatcctcagcaaaggcctgagccagatgaccaccagtgctgacacggatgttgatacctctaaggacaaaaccgagtcggtcaccagcggccccatgtccccagagggctcaccttccaagtctccctcaaagaagaaaaagaaattccgaaccccctccttcctgaaaaagagcaaaaagaaggagaaagtggagtcctgattcatgacacccttgggctccctcctgcctcctctctctcctccccttcccttctcccatctctgtccctgcaagcacagggctaaggagggatagagtaggaccctggaccacattcggaaggggaacttagagatcacccgaccaacccttcgttttacagttgcccaagagaaatcagattacctgagactgggtcatttataatgaacacagatttatttctctcacatctggaagctgggaagtccaagatcaaggcaccagcatttggtgaagccttctttctgtgtcatcccatggcagaagacagaagggcaagagaggaaaccggtccaagcaggatgccttcctttttctgacaggcagcccccagcagtaccatcacaaaccttggtctcttcttgtcaccagcaaagggatgaaggataagtgatgaggagactgaagcacagaggtgaagcagcttgcccaacgtcacactgctgcttagtgatagaggcagtgctagaccccggggctcctgaatgttactgttggaggctcttaacccactgggatcaagaaggtgtcaagagctagactctccctccaggagaatgaacacagacacaaaaccttgcatatatgcttccgggtaaagaacctgcctgcattttggtaccactacgtgctggcctgtcctgggcatgttatatcatgagaaggcagggaaggctgaatcattaaggacatgaatcagattgattctcgtggctttaaaaacaaacactacaggaccagcatgacccgccagcctgttatccacagaggcttgtggtctccattgaaaagaagcaaagacagcacgtcccaactcaaaagattgtgtcatcctaaaggtgaaaggaagagatgatccaagcaaatttaggaccaatagcagactcttcacactgcctggggatagagggaccaccctgggctcctcttactcctggatttacttggatgaccagactcaggacttcatttaaatagaatttggtttcataatggaatcttcagcttgaaatataaatttgtttctgtctccctctgccatctcagcctttcttg

SEQ ID NO: 518 - DNA, 9267 bp, Homo sapiens
  source 1..9267: mol_type = unassigned DNA
gggaaatggctttaattctgacggcagggctgtgagggactagcgggaacccgagccttttgtcaaggaactgcggcgtcggtggccagtcatccccgccgccgcggagccgctgcactgctgggggatctcccagcagctctgacgagcgcgggctgcagcatgggcagaaaacgctgccctgcagattagctgggtggattttttaagcgcaccccaccccccaaacccataaaataacaaaaccaacccgcagtggccgaccggagatagctaagatgccgcgcaggagtttccacctggatgtttgaggttgtgtagatgtggccggcacccttgagagtggagctagggggtgcagactgagcagtgaacagaaggagccttggacagggctgggccagcctcccgagttccaggagcgaattgcaaacccaccgggaaaatgagcgaagagacggtccccgaggctgcctcgccgccgcccccgcaggggcagccttactttgaccgcttctcagaggacgaccccgagtacatgcgccttcgcaaccgggcggcggacctgcggcaggacttcaacctgatggagcagaagaagcgcgtcaccatgatcctgcagagtccctctttcagggaggagctggaaggcctcatccaggagcagatgaagaaggggaacaactcctccaacatctgggccctgcgacagatcgcggacttcatggccagcacctcccacgcagtcttcccgacatcttccatgaatgtctccatgatgacgcctatcaatgacctccacacagctgactccctgaacctggccaaaggggagcggctcatgcggtgcaagatcagcagtgtctaccgactcctggacctctatggctgggcccagctgagtgacacctatgtcacgttgagagtcagcaaggagcaggaccacttcctgatcagccctaagggagtttcttgcagtgaagtcacagcgtccagcctgatcaaggtgaacattctgggagaggtggtggagaagggcagcagctgcttcccagtggacaccacaggcttctgtctgcactcggccatctatgcagcgaggcccgacgtgcgctgcatcatccacctgcacacaccggccacagcagcggtgtcggccatgaagtggggcctcctgcctgtctcccacaatgccctgctggtgggggacatggcctattatgacttcaatggggaaatggagcaggaagccgatcggatcaacctgcagaagtgccttggacccacctgcaagatcctggtgctaagaaaccatggagtggttgctctgggtgacacggtagaggaggcattttacaagatcttccacctgcaggctgcatgtgagatacaggtgtcggctctgtccagtgccgggggagtggagaacctcatcctcctggagcaggagaagcaccggccccatgaggtgggctccgtgcagtgggccgggagcacctttgggcctatgcagaagagtcggctgggggagcatgagtttgaggccctcatgaggatgctggacaacctgggctacagaacaggttacacgtatcgccacccctttgttcaagagaaaaccaaacacaaaagtgaggtggagattccagccacggtcacagccttcgtgtttgaggaggacggtgccccggtgcccgccctgcgacagcatgcccagaagcagcagaaggagaagacccgctggctcaatacgcccaacacctacctgcgggtcaatgtggccgatgaggtccagaggagcatgggcagcccccgacccaagaccacgtggatgaaggctgacgaggtggagaaatccagcagtggcatgccgattcgcatcgaaaacccaaaccaatttgtgcctctctatactgacccccaggaagtactggagatgaggaacaagattcgagaacaaaaccgacaagatgtgaagtcagcggggcctcagtcccagctcctggcgagcgtcattgccgagaagagccgaagcccgtctacagagagccagctgatgtccaagggagacgaggataccaaagacgattcagaggagacggtgcccaaccccttcagccaactcactgaccaggagttggaggagtacaagaaagaggtggagaggaagaaactagaacttgatggagagaaagaaactgccccagaagagcctggctcacctgcaaagtctgcacctgcttctccagtgcagagcccagcgaaggaggcagagacaaagagccctttagtctctccttccaagtctttagaggaaggtactaagaagacagaaacaagcaaagccgccaccacagagcccgaaacaacccagccggaaggggtggtggtcaacgggagggaggaggagcagacggcagaggaaatcctcagcaaaggcctgagccagatgaccaccagtgctgacacggatgttgatacctctaaggacaaaaccgagtcggtcaccagcggccccatgtccccagagggctcaccttccaagtctccctcaaagaagaaaaagaaattccgaaccccctccttcctgaaaaagagcaaaaagaaggagaaagtggagtcctgattcatgacacccttgggctccctcctgcctcctctctctcctccccttcccttctcccatctctgtccctgcaagcacagggctaaggagggatagagtaggaccctggaccacattcggaaggggaacttagagatcacccgaccaacccttcgttttacagttgcccaagagaaatcaggtgacttgcccaaggtcacacagctagttagcggcagagcctgcactcgaattcaggtctcctgacttccagtccagtgctccttctactacacaacactgcctagttgtgggctgcctttgtttggatgctgtccaccaatctgagcctagggcaagaaggccagaaatgggccgtgagctctcacaggctcagactaaatcagaggtcaaggcttcccctgagtaaggtccatttcttcccaggaatccaatctcctgtggatggagctatctctacatttaaaaatctcttctcttttccactttgggtccctgccctgctgctcaaagtgactagccaaattgacccctccaacagaaagtaatctttgttcccaagggctgatggcttagcttgtactaccccaaacattaaccctgagctttcttcatggaacctcttgaatgatggatggaagagctataagaggtggtaggcataggggcaagccatgtaagctgaggattggggatggtttcatcaacataagaggccaggaacttgacccctttgaattgtgcatctcaggcacttcaaaactaaaaccaaatttagcataggaaaaagttgtttaatgctcagggcagaaatttggggaagttgaaatcctctgttggctttgggttgtataaggaggatcaaaacaacagaggaaatgctgactttctagctttgcatgacacctggagcaatgcactgtacctgcctcactcctgtccagtggtcaggtttcccctgaccttccctcacccccagaaacacttgcttacagaccgaaactggcatcttactcttggcaccttgacttgcaccctctgaggttccaactcagtcattctttgtccagcagaggagaatcagaaatgagcccttcaggattaatcctcttgcaccagctctcagagaaatgctgggtatccctgtccttgtccctatctgtccatcctggggcctggtaatggccacagttattgttttaaatgccaacactgtcttctcatgttcttccgtggggcattgattaatgagcatttgttggctcctaaaaattagacaatccattctcttgaaagcaccgtgtcttgaaagaatatttttccttttgatctgactatcgtgaaaatatttttgaaagttcttaatcatagttttccacttttgagcacttgctatctatagacactgtgcaggcttcacatacattacattctttaaccctcacagtaatcctttgaggggggtaagatcattcccattttgtgggtgaggaaattgaccccctaaaatgataattgacttgtcccagctgacttggctagaaagatctggatcctggatttgaatccaggtcagtctgagtccagagcccttgctcttaacagctatggtgaacagacaactttaatccccaggggtggtggttttcatccaggatttgtctctatgactgttctccattgcataatgttagcacgtgaagcaaaggtagggaacaccctgtgctcatcctcatcactgcacgtgaagttcctggtcaatgtggactgtggtgatgctactgtgtgcctctgacaaaggagaggcaagagccttctggttggggcgggaaataccatccatagttggctatttcttgagaaggaaggaaactgacctaggaccaaggtaaacctgacactgtgtctctctagtgcagattcctaactgctaccccaggctccatctctgttctacttcctgattgggtcaaattttaggagggacaacccactcatgcctcagaaaaatctgtcatatgggaaatgcctttaaaagccaatcccttgatgccttcttttaaaaagtagatttcacacttattcatttatccttacatggtatttgttaaggatccactgagcaccaggcattatgctgacgttgaaagagagccatcattatgactagaataataagtggcaaacgatgttgtgagaatggtgaacacgacctctgatgcagccttttgtgtgcgagttgttctacttcgggggtgatgttgattgcctctgcattcaacacactctattcccttgacaatgaggcctcacttaggcctcattgggtggagtcttgctgcagcattattctgggaatttatgccatgggcccactttctattgatagatgaacctgtcagttggttcattcctcatgcattccaaaaacatgcattgagcttgggtcaagggccaggcatgaggataggcatagttcctgccctcaagaagttcatgagcataggaggtgtatagacaaattgcaaaacaggcaagggtaccaaggtggcataagaaagcatcaattaactatcttggggaccagagaaaccctgagagaagcaatggctgctaaggttttaaaacaaagagtaaatttccagtagaatgaaaggattggcagggcatgccacaatgagggaagaatgtgcaaaggtgtggacgcatgaaatgccatgatgggttccgctgagcaacgtggcattgccagagcatgatgtggaagctcaggggttgaggggtcccttcataggtaggcagggctgaatcctaaggaaactggtaggaagtgtggaggagctagacttgtcatggaaggggtttggagccactggagcctttaaatcaggatagagtcatgatcagaattgcattttaggaaaatccctttggtggctgaatggagactgtggactggatgggcgtgggatggtggcatgggagctatgaggcctttttgaaatgtcaatactaaaacatagttgatggcctgctttacacgatgtttcctctacagcagatagtgagtttccaacacaaaatttatttccataaaagtctttggataaagcaccttaagagggattttcaacaaggagaggggagcattcaaagagctaatgtttccagttttattttgtcttggtgtagaattgctgggagaggtgtccagccatcctgccatttcttcttcccttgcacagaatgtggcacatttagctccaggcttgaggacatgcaccaaatgctacagaaacagacatgtggtccaaacaaatctacaggctattagaaaggaaaggccattttctttggctgtggataaaagttggctgaaaactttgaccaatatctgactggagaaaatgtgtattcaagagctcagatttggtgggcagtaggttcatgtctggttgagctactgtgcttggatgtgccagagaaaagggtaacatttgaaccaatgtgctgctctgtggctggctgagctgggaagtggagaggtttctgagcttatttccatcgcaaggcaggcaggaggagagaggacaagaaggattagtggtttcgcagagacaggcttggctccaacggctccttgcgtagtgttggctgcacccaacagtggtgtgagagaaccgtccataccatgtgaccttcctcccaaactgcagaaagagacaccttctagcccagatctggactccctaagagcctcctggcctgcatgcaacccaagtaactgtcctactttggccagttgaccccctccactctcctataactaaaacagggttcttcctctgtgaacagataagttctttttaaaggacttgggggaaattggatgaagagcagtaagttcttacagtaagaaccccactgtaaagcactgccctctgccactgatccatgtagactgaatttgaatcccattccctgtggatgataccgtcacttgctcatggtgacatggcaagacagtcattcagatgtttggcattgttgtagcagggctactgctagtgtgggggaaaatgctataaatccacttctttgattgccatggatttgaaagaaccatttgcccaacagcatgattcgcctctgaaagtctaaaaataattttcaatttttccatgaaggtatgtggagggtaaacacacagcctacgcataggtctgcatgacatgttttttctttttctttctttttttttttttttttttttttttttagacggagctttgctctttgttgcccaggctggagtgcagtggtgcaatcttagctcactgcaacctctgcctcccggtttttcaagcgattcttctgtctcagcctcccaagtagctggaattacaggagcccgccaccttgcccagctaatttttgtatttttagtagagacggggtttcaccatgttggccaggctggtcttgaactcctgacctcgtgatccacctgcctcggcttcccaaagtgctgggattacaggaatgagccactgtgccagctgacacgttttttcttttgtgtgaattttatgttctagttttgggacaagggtaatcagttcttgactagtgaacaaatgagagaacatttaccccttactcattttacacatgcaggtcagcagaagccctagagttggttggcacagtcgcagttgactgagcatagaggaaacaggtctttttacattctctctcatcactggagctcagttgaactctaagaccttagcactcaaagagtctgaaaagaaatgagggagaggctaaatttaagctctccactcccacagaaaggacagggcaccctacaatctaaaagccagtgaggcagcctatcatctgtttcacatctgttctgaaagggatagtttaatgcaagaagtaagaggcctgtagtgactgtaaactcatgaaatgtgcacattggttatctgtgcacatttccacttgcaccataacataagaaagcgtacatggagtgtaattacttccagaagccccgtctaaccaacctattcagatgtggcacactttctgtcataaatgagagaccacacgtagagctcggtcaccaaggaatgcccaacatccctttacctctcacaatgagcagccacgctcaccgggaagcagtgtggggacttcagtggggtgtcccttagtggagaacacctttcatcatttttatagagacaattcccttgagaatgtaggcttttcatcttaggaacaattaggaagaatctccagctgggagtgttcttatgtatacagaaacaatgggtcgcattggttcatacttaggtgatattaggtttggctatattgatgtttggtgccacttaccttctagattttcccaaaagttgggtcattgctatgggaaattggggcctgcagatgggggagaaatgatcattattggtgcagggaaggggttcaggcagagctggagtctgaggctcagtgtgagaaagcactggcagttttctagtagagtcaggtcctgggctcctctcctcacccactgtgtcccgaactgaggccagctgtgatcggcaaattgcttatctctaggtagtttaaagaaaacgtaagagtttggggggtggtgggagaataactgtagaaagaccctaaactcttctctcccccagcaaattatcttgtataatgtttaaaaacccaaaggccagatctccccttttaacgtgaatcagaaggaggatggcaattggaccaagggcagagtggccacacttgaaacacattataaaatgggaatatatttcagggaaccccacccccacacttccactccacctcacacctgttggtcctgctttgtgggtgattgattgatacccaaggactgccccacctttaaattcctgcaatttatgctgcaaccaacatcttagtgtttgctctctccgggaagaggccaggtgggggagaacatacggtccagagcctgagatcgcctggctggggtgcaggcaagcaggaacccagtctagatagaatgcagtgttctctaaagctatggatggtttcagtgaaatgtctgtgtctgacaatcgtcacgcaagagtacttactgtcttcccttgtacatacattgtctgtgtttagcttttcctagtattgtgaggtttcaaataggggttccatgtaaatactctttctgctactgaaatgccggcccccttgagtatgcatcacccccacagatggttttgcctttctctatgctaacactttttgagccactgacgtgcagatcggtggttagtttcttgggcttttattttgcaattttatatatatacacatattatatatatatatatatttatgggttggttttgtatagttttctgtttgaatctctgagcaccaaagctgccctttgattttcacgagaactttccaaagccacttcctgagccctcctgctgctttggtgtctgacggtgatgctgcggtggcatctctgcccgtgaatttctgtatgtgtgtgctgttacctcacctgcagacatgaccctagtaaatctaacgtgcttggcttccca

SEQ ID NO: 519 - DNA, 3741 bp, Homo sapiens
  source 1..3741: mol_type = unassigned DNA
aaaggtttctggtgatgatgtagcatccgaggctcttaggaaatcggggctgcaagcactggcccctgcttggggatggtgggaccctcgcccggagcgtaacgcctgacagtttccacctggatgtttgaggttgtgtagatgtggccggcacccttgagagtggagctagggggtgcagactgagcagtgaacagaaggagccttggacagggctgggccagcctcccgagttccaggagcgaattgcaaacccaccgggaaaatgagcgaagagacggtccccgaggctgcctcgccgccgcccccgcaggggcagccttactttgaccgcttctcagaggacgaccccgagtacatgcgccttcgcaaccgggcggcggacctgcggcaggacttcaacctgatggagcagaagaagcgcgtcaccatgatcctgcagagtccctctttcagggaggagctggaaggcctcatccaggagcagatgaagaaggggaacaactcctccaacatctgggccctgcgacagatcgcggacttcatggccagcacctcccacgcagtcttcccgacatcttccatgaatgtctccatgatgacgcctatcaatgacctccacacagctgactccctgaacctggccaaaggggagcggctcatgcggtgcaagatcagcagtgtctaccgactcctggacctctatggctgggcccagctgagtgacacctatgtcacgttgagagtcagcaaggagcaggaccacttcctgatcagccctaagggagtttcttgcagtgaagtcacagcgtccagcctgatcaaggtgaacattctgggagaggtggtggagaagggcagcagctgcttcccagtggacaccacaggcttctgtctgcactcggccatctatgcagcgaggcccgacgtgcgctgcatcatccacctgcacacaccggccacagcagcggtgtcggccatgaagtggggcctcctgcctgtctcccacaatgccctgctggtgggggacatggcctattatgacttcaatggggaaatggagcaggaagccgatcggatcaacctgcagaagtgccttggacccacctgcaagatcctggtgctaagaaaccatggagtggttgctctgggtgacacggtagaggaggcattttacaagatcttccacctgcaggctgcatgtgagatacaggtgtcggctctgtccagtgccgggggagtggagaacctcatcctcctggagcaggagaagcaccggccccatgaggtgggctccgtgcagtgggccgggagcacctttgggcctatgcagaagagtcggctgggggagcatgagtttgaggccctcatgaggatgctggacaacctgggctacagaacaggttacacgtatcgccacccctttgttcaagagaaaaccaaacacaaaagtgaggtggagattccagccacggtcacagccttcgtgtttgaggaggacggtgccccggtgcccgccctgcgacagcatgcccagaagcagcagaaggagaagacccgctggctcaatacgcccaacacctacctgcgggtcaatgtggccgatgaggtccagaggagcatgggcagcccccgacccaagaccacgtggatgaaggctgacgaggtggagaaatccagcagtggcatgccgattcgcatcgaaaacccaaaccaatttgtgcctctctatactgacccccaggaagtactggagatgaggaacaagattcgagaacaaaaccgacaagatgtgaagtcagcggggcctcagtcccagctcctggcgagcgtcattgccgagaagagccgaagcccgtctacagagagccagctgatgtccaagggagacgaggataccaaagacgattcagaggagacggtgcccaaccccttcagccaactcactgaccaggagttggaggagtacaagaaagaggtggagaggaagaaactagaacttgatggagagaaagaaactgccccagaagagcctggctcacctgcaaagtctgcacctgcttctccagtgcagagcccagcgaaggaggcagagacaaagagccctttagtctctccttccaagtctttagaggaaggtactaagaagacagaaacaagcaaagccgccaccacagagcccgaaacaacccagccggaaggggtggtggtcaacgggagggaggaggagcagacggcagaggaaatcctcagcaaaggcctgagccagatgaccaccagtgctgacacggatgttgatacctctaaggacaaaaccgagtcggtcaccagcggccccatgtccccagagggctcaccttccaagtctccctcaaagaagaaaaagaaattccgaaccccctccttcctgaaaaagagcaaaaagaaggagaaagtggagtcctgattcatgacacccttgggctccctcctgcctcctctctctcctccccttcccttctcccatctctgtccctgcaagcacagggctaaggagggatagagtaggaccctggaccacattcggaaggggaacttagagatcacccgaccaacccttcgttttacagttgcccaagagaaatcaggtgacttgcccaaggtcacacagctagttagcggcagagcctgcactcgaattcaggtctcctgacttccagtccagtgctccttctactacacaacactgcctagttgtgggctgcctttgtttggatgctgtccaccaatctgagcctagggcaagaaggccagaaatgggccgtgagctctcacaggctcagactaaatcagaggtcaaggcttcccctgagtaaggtccatttcttcccaggaatccaatctcctgtggatggagctatctctacatttaaaaatctcttctcttttccactttgggtccctgccctgctgctcaaagtgactagccaaattgacccctccaacagaaagtaatctttgttcccaagggctgatggcttagcttgtactaccccaaacattaaccctgagctttcttcatggaacctcttgaatgatggatggaagagctataagaggtggtaggcataggggcaagccatgtaagctgaggattggggatggtttcatcaacataagaggccaggaacttgacccctttgaattgtgcatctcaggcacttcaaaactaaaaccaaatttagcataggaaaaagttgtttaatgctcagggcagaaatttggggaagttgaaatcctctgttggctttgggttgtataaggaggatcaaaacaacagaggaaatgctgactttctagctttgcatgacacctggagcaatgcactgtacctgcctcactcctgtccagtggtcaggtttcccctgaccttccctcacccccagaaacacttgcttacagaccgaaactggcatcttactcttggcaccttgacttgcaccctctgaggttccaactcagtcattctttgtccagcagaggagaatcagaaatgagcccttcaggattaatcctcttgcaccagctctcagagaaatgctgggtatccctgtccttgtccctatctgtccatcctggggcctggtaatggccacagttattgttttaaatgccaacactgtcttctcatgttcttccgtggggcattgattaatgagcatttgttggctcctaaaaattagacaatccattctcttgaaa

SEQ ID NO: 520 - DNA, 2654 bp, Homo sapiens
  source 1..2654: mol_type = unassigned DNA
gggaaatggctttaattctgacggcagggctgtgagggactagcgggaacccgagccttttgtcaaggaactgcggcgtcggtggccagtcatccccgccgccgcggagccgctgcactgctgggggatctcccagcagctctgacgagcgcgggctgcagcatgggcagaaaacgctgccctgcagattagctgggtggattttttaagcgcaccccaccccccaaacccataaaataacaaaaccaacccgcagtggccgaccggagatagctaagatgccgcgcaggagtttccacctggatgtttgaggttgtgtagatgtggccggcacccttgagagtggagctagggggtgcagactgagcagtgaacagaaggagccttggacagggctgggccagcctcccgagttccaggagcgaattgcaaacccaccgggaaaatgagcgaagagacggtccccgaggctgcctcgccgccgcccccgcaggggcagccttactttgaccgcttctcagaggacgaccccgagtacatgcgccttcgcaaccgggcggcggacctgcggcaggacttcaacctgatggagcagaagaagcgcgtcaccatgatcctgcagagtccctctttcagggaggagctggaaggcctcatccaggagcagatgaagaaggggaacaactcctccaacatctgggccctgcgacagatcgcggacttcatggccagcacctcccacgcagtcttcccgacatcttccatgaatgtctccatgatgacgcctatcaatgacctccacacagctgactccctgaacctggccaaaggggagcggctcatgcggtgcaagatcagcagtgtctaccgactcctggacctctatggctgggcccagctgagtgacacctatgtcacgttgagagtcagcaaggagcaggaccacttcctgatcagccctaagggagtttcttgcagtgaagtcacagcgtccagcctgatcaaggtgaacattctgggagaggtggtggagaagggcagcagctgcttcccagtggacaccacaggcttctgtctgcactcggccatctatgcagcgaggcccgacgtgcgctgcatcatccacctgcacacaccggccacagcagcggtgtcggccatgaagtggggcctcctgcctgtctcccacaatgccctgctggtgggggacatggcctattatgacttcaatggggaaatggagcaggaagccgatcggatcaacctgcagaagtgccttggacccacctgcaagatcctggtgctaagaaaccatggagtggttgctctgggtgacacggtagaggaggcattttacaagatcttccacctgcaggctgcatgtgagatacaggtgtcggctctgtccagtgccgggggagtggagaacctcatcctcctggagcaggagaagcaccggccccatgaggtgggctccgtgcagtgggccgggagcacctttgggcctatgcagaagagtcggctgggggagcatgagtttgaggccctcatgaggatgctggacaacctgggctacagaacaggttacacgtatcgccacccctttgttcaagagaaaaccaaacacaaaagtgaggtggagattccagccacggtcacagccttcgtgtttgaggaggacggtgccccggtgcccgccctgcgacagcatgcccagaagcagcagaaggagaagacccgctggctcaatacgcccaacacctacctgcgggtcaatgtggccgatgaggtccagaggagcatgggcagcccccgacccaagaccacgtggatgaaggctgacgaggtggagaaatccagcagtggcatgccgattcgcatcgaaaacccaaaccaatttgtgcctctctatactgacccccaggaagtactggagatgaggaacaagattcgagaacaaaaccgacaagatgtgaagtcagcggggcctcagtcccagctcctggcgagcgtcattgccgagaagagccgaagcccgtctacagagagccagctgatgtccaagggagacgaggataccaaagacgattcagaggagacggtgcccaaccccttcagccaactcactgaccaggagttggaggagtacaagaaagaggtggagaggaagaaactagaacttgatgagacaggacaggaacgagagccaggctctggtccggccgtgtgcgagttcttcagcgttgccctccacatctggagtaacatattggagagaaagaaactgccccagaagagcctggctcacctgcaaagtctgcacctgcttctccagtgcagagcccagcgaaggaggcagagacaaagagccctttagtctctccttccaagtctttagaggaaggtactaagaagacagaaacaagcaaagccgccaccacagagcccgaaacaacccagccggaaggggtggtggtcaacgggagggaggaggagcagacggcagaggaaatcctcagcaaaggcctgagccagatgaccaccagtgctgacacggatgttgatacctctaaggacaaaaccgagtcggtcaccagcggccccatgtccccagagggctcaccttccaagtctccctcaaagaagaaaaagaa

SEQ ID NO: 521 - DNA, 475 bp, Homo sapiens
  source 1..475: mol_type = unassigned DNA
gctcctggctggttctcttcagagacaggacaggaacgagagccaggctctggtccggccgtgtgcgagttcttcagcgttgccctccacatctggagtaacatattggagagaaagaaactgccccagaagagcctggctcacctgcaaagtctgcacctgcttctccagtgcagagcccagcgaaggaggcagagacaaagagccctttagtctctccttccaagtctttagaggaaggtactaagaagacagaaacaagcaaagccgccaccacagagcccgaaacaacccagccggaaggggtggtggtcaacgggagggaggaggagcagacggcagaggaaatcctcagcaaaggcctgagccagatgaccaccagtgctgacacggatgttgatacctctaaggacaaaaccgagtcggtcaccagcggccccatgtccccagagggctcaccttccaagtctccctc

SEQ ID NO: 522 - DNA, 874 bp, Homo sapiens
  source 1..874: mol_type = unassigned DNA
gagttccaggagcgaattgcaaacccaccgggaaaatgagcgaagagacggtccccgaggctgcctcgccgccgcccccgcaggggcagccttactttgaccgcttctcagaggacgaccccgagtacatgcgccttcgcaaccgggcggcggacctgcggcaggacttcaacctgatggagcagaagaagcgcgtcaccatgatcctgcagagtccctctttcagggaggagctggaaggcctcatccaggagcagatgaagaaggggaacaactcctccaacatctgggccctgcgacagatcgcggacttcatggccagcacctcccacgcagtcttcccgacatcttccatgaatgtctccatgatgacgcctatcaatgacctccacacagctgactccctgaacctggccaaaggggagcggctcatgcggtgcaagatcagcagtgtctaccgactcctggacctctatggctgggcccagctgagtgacacctatgtcacgttgagagtcagcaaggagcaggaccacttcctgatcagccctaagggagtttcttgcagtgaagtcacagcgtccagcctgatcaaggaagtactggagatgaggaacaagattcgagaacaaaaccgacaagatgtgaagtcagcggggcctcagtcccagctcctggcgagcgtcattgccgagaagagccgaagcccgtctacagagagccagctgatgtccaagggagacgaggataccaaagacgattcagaggagacggtgcccaaccccttcagccaactcactgaccaggagttggaggagtacaagaaagaggtggagaggaagaaactagaacttgatgagacaggacaggaacg

SEQ ID NO: 523 - DNA, 997 bp, Homo sapiens
  source 1..997: mol_type = unassigned DNA
atgagcgaagagacggtccccgaggctgcctcgccgccgcccccgcaggggcagccttactttgaccgcttctcagaggacgaccccgagtacatgcgccttcgcaaccgggcggcggacctgcggcaggacttcaacctgatggagcagaagaagcgcgtcaccatgatcctgcagagtccctctttcagggaggagctggaaggcctcatccaggagcagatgaagaaggggaacaactcctccaacatctgggccctgcgacagatcgcggacttcatggccagcacctcccacgcagtcttcccgacatcttccatgaatgtctccatgatgacgcctatcaatgacctccacacagctgactccctgaacctggccaaaggggagcggctcatgcggtgcaagatcagcagtgtctaccgactcctggacctctatggctgggcccagctgagtgacacctatgtcacgttgagagtcagcaaggagcaggaccacttcctgatcagccctaagggagtttcttgcagtgaagtcacagcgtccagcctgatcaaggtgaacattctgggagaggtggtggagaagggcagcagctgcttcccagtggacaccacaggcttctgtctgcactcggccatctatgcagcgaggcccgacgtgcgctgcatcatccacctgcacacaccggccacagcagcggtgtcggccatgaagtggggcctcctgcctgtctcccacaatgccctgctggtgggggacatggcctattatgacttcaatggggaaatggagcaggaagccgatcggatcaacctgcagaagtgccttggacccacctgcaagtctacagagagccagctgatgtccaagggagacgaggataccaaagacgattcagaggagacggtgcccaaccccttcagccaactcactgaccaggagttggaggagtacaagaaagaggtggagaggaagaaactagaacttgatg

SEQ ID NO: 524 - DNA, 3776 bp, Homo sapiens
  source 1..3776: mol_type = unassigned DNA
gccaggagagctctcatttcctcccagcctcgtgcgggaaatggctttaattctgacggcagggctgtgagggactagcgggaacccgagccttttgtcaaggaactgcggcgtcggtggccagtcatccccgccgccgcggagccgctgcactgctgggggatctcccagcagctctgacgagcgcgggctgcagcatgggcagaaaacgctgccctgcagattagctgggtggattttttaagcgcaccccaccccccaaacccataaaataacaaaaccaacccgcagtggccgaccggagatagctaagatgccgcgcaggagtttccacctggatgtttgaggttgtgtagatgtggccggcacccttgagagtggagctagggggtgcagactgagcagtgaacagaaggagccttggacagggctgggccagcctcccgagttccaggagcgaattgcaaacccaccgggaaaatgagcgaagagacggtccccgaggctgcctcgccgccgcccccgcaggggcagccttactttgaccgcttctcagaggacgaccccgagtacatgcgccttcgcaaccgggcggcggacctgcggcaggacttcaacctgatggagcagaagaagcgcgtcaccatgatcctgcagagtccctctttcagggaggagctggaaggcctcatccaggagcagatgaagaaggggaacaactcctccaacatctgggccctgcgacagatcgcggacttcatggccagcacctcccacgcagtcttcccgacatcttccatgaatgtctccatgatgacgcctatcaatgacctccacacagctgactccctgaacctggccaaaggggagcggctcatgcggtgcaagatcagcagtgtctaccgactcctggacctctatggctgggcccagctgagtgacacctatgtcacgttgagagtcagcaaggagcaggaccacttcctgatcagccctaagggagtttcttgcagtgaagtcacagcgtccagcctgatcaaggtgaacattctgggagaggtggtggagaagggcagcagctgcttcccagtggacaccacaggcttctgtctgcactcggccatctatgcagcgaggcccgacgtgcgctgcatcatccacctgcacacaccggccacagcagcggtgtcggccatgaagtggggcctcctgcctgtctcccacaatgccctgctggtgggggacatggcctattatgacttcaatggggaaatggagcaggaagccgatcggatcaacctgcagaagtgccttggacccacctgcaagatcctggtgctaagaaaccatggagtggttgctctgggtgacacggtagaggaggcattttacaagatcttccacctgcaggctgcatgtgagatacaggtgtcggctctgtccagtgccgggggagtggagaacctcatcctcctggagcaggagaagcaccggccccatgaggtgggctccgtgcagtgggccgggagcacctttgggcctatgcagaagagtcggctgggggagcatgagtttgaggccctcatgaggatgctggacaacctgggctacagaacaggttacacgtatcgccacccctttgttcaagagaaaaccaaacacaaaagtgaggtggagattccagccacggtcacagccttcgtgtttgaggaggacggtgccccggtgcccgccctgcgacagcatgcccagaagcagcagaaggagaagacccgctggctcaatacgcccaacacctacctgcgggtcaatgtggccgatgaggtccagaggagcatgggcagcccccgacccaagaccacgtggatgaaggctgacgaggtggagaaatccagcagtggcatgccgattcgcatcgaaaacccaaaccaatttgtgcctctctatactgacccccaggaagtactggagatgaggaacaagattcgagaacaaaaccgacaagatgtgaagtcagcggggcctcagtcccagctcctggcgagcgtcattgccgagaagagccgaagcccggtagagcagaggctgcccctgactggcggggaaacgtgtttgccttcggggtcttctgtgcctggggctgggttgcaggacccctgagtcctcatacccaccttcccctgtgatcttgggtgccggtgctcttgctgcaaaatggaggccaacctcacaggggtgctgtgaggaccagggaggacaatgtctgatggcccctgtgggcactgggctggagaacagcagcccagcctgcctgcaggagtgatgcggccggcttccgtacctcctgccatggaactccactctgtcctcccttactaccccgtgaagtggggactcataggcttggggctggagactcccaggtgccccaggtgtgcccagccctgagagtctctgacctctgagcctggtatgacatcatccaaccagagctctggaaagatgatcatgtacccatagagaaggggtatatagacaggacccatgctcctacaggatgggaagggacaatattacccacacaaacccacattgagttagaaagtattgtaattgtttttgtgcttgagatagaacagtgttttgtctagtgcttagcaaaaggggtgaagttcagaattctggcatgtgtttgaaatcactgctgctccttgcaaggtagcaatgggcatgacattttccttagcagtaaaaattggggaaatacaggaaatgttcctctctgcagggcaaattgtgatgatgcaatgatttcaggtcaagactgcagcccacagggtgggtgcccattggcaggagaagtgtgaaagttgtatcatcacacttacctccccccaaccccaactcagccaagatggggaacactgaatatcccgcagggtcaagtatagaaatagccatgttctggcgggaggtgagagttcattacaatgagcaacactgttaaaaaaacaaacaaaaatctcccctgccatttataccaagtgctcttctcggagtccctcttcttgggtttttggtcttggattctcggttgactccatgattccctacattaggcctactgtggcctcccttttggaaggggcccaggggcagaagacctggcgggccagggcagggaggactggcagcctccaggctcacctccctttggcttcactctctttgctcctcagcttcagagcactgcatcctcaaaggccaagatgaggatgctgaattaggaaaaaaggctgtggagtctgaattttagttcctatcttgggctagaggggtcaaagaattcctgaagcttatgtaagggccggctggtcagctccctagaaccacgggctccacagaggtggcaaaacccagtgattttgccagtatccctgcagggacctgcggtacaggcaggttgaagatctgagactcaggaaccttggcccctttgtcacttacaactgtgtgtgaaacaggactaacagtttggactgagagcactgaagctgctgtgtgttgtgcatataacttaatgctgtgtgttgtggcttgcactgctgtgggggcggggagggcagtggtggggaatggctggcatgaagcttgcttgagccaatgctatgcttgctgggctttggctgactggctttgggccaccaactgtatttgcatagtgatggcttggaagtgtccatagaagggattgcaataaaggtgtgtcttccttc

SEQ ID NO: 525 - DNA, 2332 bp, Homo sapiens
  source 1..2332: mol_type = unassigned DNA
atttcctcccagcctcgtgcgggaaatggctttaattctgacggcagggctgtgagggactagcgggaacccgagccttttgtcaaggaactgcggcgtcggtggccagtcatccccgccgccgcggagccgctgcactgctgggggatctcccagcagctctgacgagcgcgggctgcagcatgggcagaaaacgctgccctgcagattagctgggtggattttttaagcgcaccccaccccccaaacccataaaataacaaaaccaacccgcagtggccgaccggagatagctaagatgccgcgcaggagagttccaggagcgaattgcaaacccaccgggaaaatgagcgaagagacggtccccgaggctgcctcgccgccgcccccgcaggggcagccttactttgaccgcttctcagaggacgaccccgagtacatgcgccttcgcaaccgggcggcggacctgcggcaggacttcaacctgatggagcagaagaagcgcgtcaccatgatcctgcagagtccctctttcagggaggagctggaaggcctcatccaggagcagatgaagaaggggaacaactcctccaacatctgggccctgcgacagatcgcggacttcatggccagcacctcccacgcagtcttcccgacatcttccatgaatgtctccatgatgacgcctatcaatgacctccacacagctgactccctgaacctggccaaaggggagcggctcatgcggtgcaagatcagcagtgtctaccgactcctggacctctatggctgggcccagctgagtgacacctatgtcacgttgagagtcagcaaggagcaggaccacttcctgatcagccctaagggagtttcttgcagtgaagtcacagcgtccagcctgatcaaggtgaacattctgggagaggtggtggagaagggcagcagctgcttcccagtggacaccacaggcttctgtctgcactcggccatctatgcagcgaggcccgacgtgcgctgcatcatccacctgcacacaccggccacagcagcggtgtcggccatgaagtggggcctcctgcctgtctcccacaatgccctgctggtgggggacatggcctattatgacttcaatggggaaatggagcaggaagccgatcggatcaacctgcagaagtgccttggacccacctgcaagatcctggtgctaagaaaccatggagtggttgctctgggtgacacggtagaggaggcattttacaagatcttccacctgcaggctgcatgtgagatacaggtgtcggctctgtccagtgccgggggagtggagaacctcatcctcctggagcaggagaagcaccggccccatgaggtgggctccgtgcagtgggccgggagcacctttgggcctatgcagaagagtcggctgggggagcatgagtttgaggccctcatgaggatgctggacaacctgggctacagaacaggttacacgtatcgccacccctttgttcaagagaaaaccaaacacaaaagtgaggtggagattccagccacggtcacagccttcgtgtttgaggaggacggtgccccggtgcccgccctgcgacagcatgcccagaagcagcagaaggagaagacccgctggctcaatacgcccaacacctacctgcgggtcaatgtggccgatgaggtccagaggagcatgggcagcccccgacccaagaccacgtggatgaaggctgacgaggtggagaaatccagcagtggcatgccgattcgcatcgaaaacccaaaccaatttgtgcctctctatactgacccccaggaagtactggagatgaggaacaagattcgagaacaaaaccgacaagatgtgaagtcagcggggcctcagtcccagctcctggcgagcgtcattgccgagaagagccgaagcccggtagagcagaggctgcccctgactggcggggaaacgtgtttgccttcggggtcttctgtgcctggggctgggttgcaggacccctgagtcctcatacccaccttcccctgtgatcttgggtgccggtgctcttgctgcaaaatggaggccaacctcacaggggtgctgtgaggaccagggaggacaatgtctgatggcccctgtgggcactgggctggagaacagcagcccagcctgcctgcaggagtgatgcggccggcttccgtacctcctgccatggaactccactctgtcctcccttactaccccgtgaagtggggactcataggcttggggctggagactcccaggtgccccaggtgtgcccagccctgagagtctctgacctctgag

SEQ ID NO: 526 - DNA, 930 bp, Homo sapiens
  source 1..930: mol_type = unassigned DNA
tcccttattcaactgtcttcatttattctgtaaaagtagcagcagctcagccctgaccatctcctctctcacttgtgggagtctcatttagggatcgtttccacctggatgtttgaggttgtgtagatgtggccggcacccttgagagtggagctagggggtgcagactgagcagtgaacagaaggagccttggacagggctgggccagcctcccgagttccaggagcgaattgcaaacccaccgggaaaatgagcgaagagacggtccccgaggctgcctcgccgccgcccccgcaggggcagccttactttgaccgcttctcagaggacgaccccgagtacatgcgccttcgcaaccgggcggcggacctgcggcaggacttcaacctgatggagcagaagaagcgcgtcaccatgatcctgcagagtccctctttcagggaggagctggaaggcctcatccaggagcagatgaagaaggggaacaactcctccaacatctgggccctgcgacagatcgcggacttcatggccagcacctcccacgcagtcttcccgacatcttccatgaatgtctccatgatgacgcctatcaatgacctccacacagctgactccctgaacctggccaaaggggagcggctcatgcggtgcaagatcagcagtgtctaccgactcctggacctctatggctgggcccagctgagtgacacctatgtcacgttgagagtcagcaaggagcaggaccacttcctgatcagccctaagggagtttcttgcagtgaagtcacagcgtccagcctgatcaaggtgaacattctgggagaggtggtggagaagggcagcagctgcttcccagtggacaccacaggcttctgtctgcactcggccatctatgcagcgaggcccgacgtgcgctgcatcatcca

SEQ ID NO: 527 - DNA, 721 bp, Homo sapiens
  source 1..721: mol_type = unassigned DNA
cggtgcgaggcgggcttggcggggctgggcgcgtcccccggggcctcgcgatcgctggctgcgcggcgctcagccgcagtggccggccgagcaggtgcggcgtcggcagccgcctacattgagatcggggcaaccggcactttccacctggatgtttgaggttgtgtagatgtggccggcacccttgagagtggagctagggggtgcagactgagcagtgaacagaaggagccttggacagggctgggccagcctcccgagttccaggagcgaattgcaaacccaccgggaaaatgagcgaagagacggtccccgaggctgcctcgccgccgcccccgcaggggcagccttactttgaccgcttctcagaggacgaccccgagtacatgcgccttcgcaaccgggcggcggacctgcggcaggacttcaacctgatggagcagaagaagcgcgtcaccatgatcctgcagagtccctctttcagggaggagctggaaggcctcatccaggagcagatgaagaaggggaacaactcctccaacatctgggccctgcgacagatcgcggacttcatggccagcacctcccacgcagtcttcccgacatcttccatgaatgtctccatgatgacgcctatcaatgacctccacacagctgactccctgaacctggccaaaggggagcggctcatgcggtgcaagatcagcagtgtctaccgact

SEQ ID NO: 528 - DNA, 582 bp, Homo sapiens
  source 1..582: mol_type = unassigned DNA
tttcctcccagcctcgtgcgggaaatggctttaattctgacggcagggctgtgagggactagcgggaacccgagccttttgtcaaggaactgcggcgtcggtggccagtcatccccgccgccgcggagccgctgcactgctgggggatctcccagcagctctgacgagcgcgggctgcagcatgggcagaaaacgctgccctgcagattagctgggtggattttttaagcgcaccccaccccccaaacccataaaataacaaaaccaacccgcagtggccgaccggagatagctaagatgccgcgcaggagagcaccactaacacgaagctcttctgcacatcagactcttaatcaaaggattgggcatatcagaagtttccacctggatgtttgaggttgtgtagatgtggccggcacccttgagagtggagctagggggtgcagactgagcagtgaacagaaggagccttggacagggctgggccagcctcccgagttccaggagcgaattgcaaacccaccgggaaaatgagcgaagagacggtccccgaggctgcctcgccgccgcccccgcaggggc

SEQ ID NO: 529 - DNA, 582 bp, Homo sapiens
  source 1..582: mol_type = unassigned DNA
ctcatttcctcccagcctcgtgcgggaaatggctttaattctgacggcagggctgtgagggactagcgggaacccgagccttttgtcaaggaactgcggcgtcggtggccagtcatccccgccgccgcggagccgctgcactgctgggggatctcccagcagctctgacgagcgcgggctgcagcatgggcagaaaacgctgccctgcagattagctgggtggattttttaagcgcaccccaccccccaaacccataaaataacaaaaccaacccgcagtggccgaccggagatagctaagatgccgcgcaggagtttccacctggatgtttgaggttgtgtagatgtggccggcacccttgagagtggagctagggggtgcagactgagcagtgaacagaaggagccttggacagggctgggccagcctcccggaattccaaaggtttttgaaactctgtgccaggaaccagggacaaagatgacatatagtctttcttatatcatacctggctcatcacacgctggtctcctctgatcttcagcatcctgagttccaggagcgaattgcaaacccaccgg

SEQ ID NO: 530 - DNA, 551 bp, Homo sapiens
  source 1..551: mol_type = unassigned DNA
gtcagcgcgcagggccaggagagctctcatttcctcccagcctcgtgcgggaaatggctttaattctgacggcagggctgtgagggactagcgggaacccgagccttttgtcaaggaactgcggcgtcggtggccagtcatccccgccgccgcggagccgctgcactgctgggggatctcccagcagctctgacgagcgcgggctgcagcatgggcagaaaacgctgccctgcagattagctgggtggattttttaagcgcaccccaccccccaaacccataaaataacaaaaccaacccgcagtggccgaccggagatagctaagatgccgcgcaggaggtcaagaagcaggacacagccagctcccagagcccagtgcacccttgaaccacaccctgcttccccctggaggtaacaactcaccttccttttatgtttccacctggatgtttgaggttgtgtagatgtggccggcacccttgagagtggagctagggggtgcagactgagcagtgaacagaaggagccttggacagggctgggccagcct

SEQ ID NO: 531 - DNA, 6004 bp, Homo sapiens
  source 1..6004: mol_type = unassigned DNA
atgcgaggccacgggaaccactcgcggctgaaatccagatgtgcttctctgggcaacgtccatcaccaccaggcacagatggcgcacggtgcacactgccgagggggccggacaccacagtcaccagacagccggggcccaaccgctgggggccacacccggggcagatggacgtaccggcccatcgaggccctcatcaacgtcagctttcccggagcaaagggtgggagaacggccgagggcgagccctcatgggcgtgggtcttcagaagtggctatttgcagagacaggctcttcctgggcttcccgtctccacccgagtggctgcctgctggtggcaacaccatccaggcagggactcagggttcttgggacctggatttattgacctgctcagagaggagcccagcggccgtgcagatgggaaggcagctgctcagaaaacagggcgtctttatttgttcccgactttcctaggcaacaaattaccagaggccgccgactcgtttggggaaattgcttctgggaacagtgttatttttacctccgtcttgcaatcctctcacccacctggcaccccaccgcccagcgcacgcaagccaagtcccggagctgccatgctcgtctgtgaggaaacgctggagctgggtgcccagggctgctgggggtccacgagcccccggggccaggccgtgagcttggtcggtgggcccacggccggaggctccaggctgggaggggctggctgcaccatgggcctgctcatggccctccaggccagacgccccagggacggcacctgggctgaccctcgaagatgctccagggctgtggagggctcgggcctcaccagggctgcccttgtgagtccagggccatcgggggtggaggaggacaccaggagggaaggctgcgtgcttgtgggctcctggaggtcgtccacccacagaagccgtgttctgattatcaacacgccctctggcaggaccccctggagccagggctccctcggcagcaccgggcgctacaaccagacccgggcaccaggcagccagcagcaggggctgtgctcggatgcagctctacacgaggattttgtgccggagcctactcctgccttctttcaataccctccacaagccttcagcaaaaccaaggttcgcgacttggggaggggaggcctttatgccttttccaaggaggagaaggtatctgaggcccagcgggtagaggcctacgagacccacggccttggcctgagtacaggccgacagaaccctgtgccgtccccctgtaagcctggatgcgtgtgccagggccttgcgctggacgcagaggcctggccgaggcaccctggacgcaggccctgtgcggccaaggaggcctgcctgggcccacctggctgcagcggggagctgagcctccctgaggaggaaggaatcgcacctggggcagcaacagcagctcctgcctgggtccctcatggccgcgtgagccgcttcctcactgtaaagctcttcacctatgtaactatgtatcaatgtaaacaggaacgtatcctccgcctctgcatctctggtgaatccgggcgatacgtgcggcgctcacgcttccgcaactttgcagcgctcatggtgagtacgggggtcccgggggtcctgcagctgggggctaggccgctgcgggggggcggccacccgtatggggactcccaggctggaaaagttgtggaatggcgagctggtgaccgggcttccgggctcagtgccggggaaagaaggttcctcagccagtcggagctgcagacctggccccggacacctcactgtgtaggaaagaaggttcctcagccagttggagctgcagacctagccccggacacctcactgtgcaggaaagaaggttcctcagccagtcggagctgcagacctggccccggacacctcacccgcagggaggaagattccttcaggcagctggcattccccaggtttgaagaggtcactttcccacctctcactgctgcagaaagagcaccctctgtccacggtggacactctctagccagccagggcctcgtcttggctggacggacaagaagtgtggcctcaggagggaagcaggagctctcgggcccgctggctgcctgcatcccgacacaggatctgaagacagtgctctccctgccccgctacccaggggagttcctgcaccccgtggtgtacgcgtgcacggccgtcatgctgctctgcctcctggcctccttcgtcacctacatcgtgcaccagagcgccatccgcatcagccgcaagggccggcacacgctcctgaatttctgcttccacgcggccctgaccttcactgtgttcgccggcggcatcaatcgcaccaagtaccccatcctgtgccaggcggtgggcatcgtgctgcactattctacactgtccaccatgctgtggataggagtgaccgccaggaacatctacaagcaggtgaccaagaaggcccctctgtgcctggacacagaccagccaccgtaccccaggcagcccctgctcaggttttacctcgtcagcggaggggtcccctttatcatctgtggggtcacggctgccacgaacatcaggaattacgggacagaggacgaggacacggcctgctggatggcctgggagcccagcctgggcgccttctacggcccagccgccatcatcaccctggtcacctgtgtgtacttcctgggcacctacgtgcagctgcggcgccacccagggcgcaggtacgagctgcgcacacagcccgaggagcagcggcggctggcgacacccgagggcggccgtgggatccggccaggcaccccacccgcacacgatgcccccggcgcctccgtgctgcagaacgagcactcattccaggcacagctgcgcgccgccgccttcacgctgttcctgttcacggccacgtgggccttcggggcgctggcggtgtcacagggccacttcctggacatggtcttcagctgcctgtacggcgccttctgcgtgaccctgggactcttcgtgctcatccaccactgcgccaagcgtgaggacgtgtggcagtgctggtgggcatgctgcccgccccgcaaggacgcccaccccgcacttgacgccaacggggccgcgctgggccgcgccgcctgcctgcactcgccgggactgggccagccacggggcttcgcgcacccaccgggcccctgcaagatgaccaacctgcaggccgcgcagggccacgccagttgcctgtcaccggccaccccgtgctgcgccaagatgcactgcgagccactgacggcggacgaggcgcacgtgcacctgcaggaggagggcgccttcgggcacgacccccacctgcacgggtgccttcagggcagaactaagccgccctactttagccggcacccagcagaggagcccgagtacgcctaccacatcccatccagcctggatggcagcccccgcagctcgcgcacagacagcccccccagctctctggatggcccggcggggacacacacgctggcctgctgcacccagggcgaccccttccccatggtcacccagcccgagggcagtgatgggagccctgccctctacagctgccccacgcagccgggcagggaggcagcgctcgggcccggccacttggagatgctgcggaggacacagtccctgccctttggtggccccagccagaacgggctgcccaagggtaaattgctagaaggcctgccgtttggcaccgacgggaccggcaacatccgaacgggaccctggaaaaacgaaactactgtgtagatgggggcagaggacacggtgttcctggaggagcttcagagcagagtggggggcccatctgccacatgaggtcactgggggtaccgaagtgaccccgcctttcagaagccgttcacacccctgccccttccttgtgatcacacccctgccccttccttgtgatcacacccctgccccttccttgtgatcacacccctgccccttccttgtgaaagacctcagcggggaaacgctccgggccacgcccactccccttatcccaattccgcgtgctggtcccgcacacggtcatccggtttctgtcctgtggtctccagtcctggggcaccctagaggcagagcaggggattccatcaaaggacccactgagaccccagcatggccctgcccgagatgccctgctgcccacggagtcctggcttcccctggtgtggccgggcagggccgagatcgcaggagggggctgccctgacctttcccagtgttcaatgtgtgtgtcttgcgttctactccgggggtggcggcggcaggtctgtccccagcattctcgctctgggcagaaccctcgggaccctccgctgtcgtgtgtctgagccacccctgcagcttcacagggcccctgcacacctctgcccactcagtgtgccctgtcagccctgtccttgtcgtagccccagccctgcagggctgagagcaccacagatgctgggggctgctctggactttggggatggctgtcagcctcagagggccaatggggggctttcacgggcccaaggcttgggaaaatgcccagacatcctttagtgaagactcgacttccaaaaccagccaccgctgggactggattccactccagtataggcacttagcaacacgaaggtttattccaaaaagaaaaggggctgacagacgggagattctcatggacaaaatccctttccctttttctcgtctccatgaacatctgggtaccaagccctgactcaaaggacagatgtggatgacagcaagacttctgtgaaagcaagtggcccgtccctaggtgggagggagtccagagggtcatgggtgtgaaactgtgcacagctttccctccctccctcttcctccttgtctgtgacacatgtgcacccacacacacacacacaaacacatgtgcatatcacacacatgcacacacacaaacacatgtgcatatcacacacgcgcacacacccaaacacgtgcatatcacacacatgcacacacacaaacacgtgcatatcacacacatgcacacaaacgtgcatatcacacacacgcacacacacccaaacacgtgcatatcacacacacgcacacacacaaacacgtgcatatcacacacaaacacacgtgcacacatacttaacacacacttgcacctgctgtgcacatgtgcacacacacgtagtagtgtgttttccagccacccacacactgggtttgcattggagattgtttcaccctgcaaacgtcaacgtcagcagactcgtcggtgcgctgtgctatccggttgggaggtctcaccaggagcagagcctccctaacgtgcacctccgagaagaggggtgtcggggagtgttcccagcacctgctcggtggaagggctctccggagactggcactcagtatctgagtatgaggagcctcacttcccggggtgtcggtaaacttgaccgtgactcagtaacccacagcgtgctcctcccagcaaaccccgtgtgtccttacaggtcgaccagacgggccgtcggaggaccaccaggtggctctgcctctgcctcaccttctcacctgcttccatagctgatgtgaacccgaatccccacgctgtgctgtgtacgcactgtaggtgcagaaccgtccacacaaaaatacagtcttggcattgtttgttctttgtgaggctggttaatagcatccccgtgtgtttttctcaccctcgatggggtagaggggcacctgaatgtgtggcccccgtctgtgtcctggatcctggggcagggctgctctccctggcccctgcagcccctcatgaactttccaccctcagtgcccccggctgagcagagaggcgtcccaccattcaaccaaagaaagtcaacattgaacattaaacctctgtgtgtttctatactga

SEQ ID NO: 532 - DNA, 4283 bp, Homo sapiens
  source 1..4283: mol_type = unassigned DNA
gtcgccgcgggaggtgcgcgcagaggcggcggcgctgctggccgggctgggccgctcgtgcgcggggctgtgactcaccggccggcgccgcagccccgcaatctgttgataactcggtcccagctcggccgctgccctcgcgaatggagagcgggtccccggcggggggagcgcagcgcgtctgtctccgggagcgcggcccggccgccccggcagccgcttcggccacagcagatgggagcagctcccggactgcgcccgccccgccgcggtcaccctgaggccaggggcccgggagcgcgacctcctggccgccgtctgggactttgaccttccagaggccatggaggctggcggggagcagggcgccacctgatcgcctccccctggacgcctcctccagcggcgctcacgcttccgcaactttgcagcgctcatggatctgaagacagtgctctccctgccccgctacccaggggagttcctgcaccccgtggtgtacgcgtgcacggccgtcatgctgctctgcctcctggcctccttcgtcacctacatcgtgcaccagagcgccatccgcatcagccgcaagggccggcacacgctcctgaatttctgcttccacgcggccctgaccttcactgtgttcgccggcggcatcaatcgcaccaagtaccccatcctgtgccaggcggtgggcatcgtgctgcactattctacactgtccaccatgctgtggataggagtgaccgccaggaacatctacaagcaggtgaccaagaaggcccctctgtgcctggacacagaccagccaccgtaccccaggcagcccctgctcaggttttacctcgtcagcggaggggtcccctttatcatctgtggggtcacggctgccacgaacatcaggaattacgggacagaggacgaggacacggcgtactgctggatggcctgggagcccagcctgggcgccttctacggcccagccgccatcatcaccctggtcacctgtgtgtacttcctgggcacctacgtgcagctgcggcgccacccagggcgcaggtacgagctgcgcacacagcccgaggagcagcggcggctggcgacacccgagggcggccgtgggatccggccaggcaccccacccgcacacgatgcccccggcgcctccgtgctgcagaacgagcactcattccaggcacagctgcgcgccgccgccttcacgctgttcctgttcacggccacgtgggccttcggggcgctggcggtgtcacagggccacttcctggacatggtcttcagctgcctgtacggcgccttctgcgtgaccctgggactcttcgtgctcatccaccactgcgccaagcgtgaggacgtgtggcagtgctggtgggcatgctgcccgccccgcaaggacgcccaccccgcacttgacgccaacggggccgcgctgggccgcgccgcctgcctgcactcgccgggactgggccagccacggggcttcgcgcacccaccgggcccctgcaagatgaccaacctgcaggccgcgcagggccacgccagttgcctgtcaccggccaccccgtgctgcgccaagatgcactgcgagccactgacggcggacgaggcgcacgtgcacctgcaggaggagggcgccttcgggcacgacccccacctgcacgggtgccttcagggcagaactaagccgccctactttagccggcacccagcagaggagcccgagtacgcctaccacatcccatccagcctggatggcagcccccgcagctcgcgcacagacagcccccccagctctctggatggcccggcggggacacacacgctggcctgctgcacccagggcgaccccttccccatggtcacccagcccgagggcagtgatgggagccctgccctctacagctgccccacgcagccgggcagggaggcagcgctcgggcccggccacttggagatgctgcggaggacacagtccctgccctttggtggccccagccagaacgggctgcccaagggtaaattgctagaaggcctgccgtttggcaccgacgggaccggcaacatccgaacgggaccctggaaaaacgaaactactgtgtagatgggggcagaggacacggtgttcctggaggagcttcagagcagagtggggggcccatctgccacatgaggtcactgggggtaccgaagtgaccccgcctttcagaagccgttcacacccctgccccttccttgtgatcacacccctgccccttccttgtgatcacacccctgccccttccttgtgatcacacccctgccccttccttgtgaaagacctcagcggggaaacgctccgggccacgcccactccccttatcccaattccgcgtgctggtcccgcacacggtcatccggtttctgtcctgtggtctccagtcctggggcaccctagaggcagagcaggggattccatcaaaggacccactgagaccccagcatggccctgcccgagatgccctgctgcccacggagtcctggcttcccctggtgtggccgggcagggccgagatcgcaggagggggctgccctgacctttcccagtgttcaatgtgtgtgtcttgcgttctactccgggggtggcggcggcaggtctgtccccagcattctcgctctgggcagaaccctcgggaccctccgctgtcgtgtgtctgagccacccctgcagcttcacagggcccctgcacacctctgcccactcagtgtgccctgtcagccctgtccttgtcgtagccccagccctgcagggctgagagcaccacagatgctgggggctgctctggactttggggatggctgtcagcctcagagggccaatggggggctttcacgggcccaaggcttgggaaaatgcccagacatcctttagtgaagactcgacttccaaaaccagccaccgctgggactggattccactccagtataggcacttagcaacacgaaggtttattccaaaaagaaaaggggctgacagacgggagattctcatggacaaaatccctttccctttttctcgtctccatgaacatctgggtaccaagccctgactcaaaggacagatgtggatgacagcaagacttctgtgaaagcaagtggcccgtccctaggtgggagggagtccagagggtcatgggtgtgaaactgtgcacagctttccctccctccctcttcctccttgtctgtgacacatgtgcacccacacacacacacacaaacacatgtgcatatcacacacatgcacacacacaaacacatgtgcatatcacacacgcgcacacacccaaacacgtgcatatcacacacatgcacacacacaaacacgtgcatatcacacacatgcacacaaacgtgcatatcacacacacgcacacacacccaaacacgtgcatatcacacacacgcacacacacaaacacgtgcatatcacacacaaacacacgtgcacacatacttaacacacacttgcacctgctgtgcacatgtgcacacacacgtagtagtgtgttttccagccacccacacactgggtttgcattggagattgtttcaccctgcaaacgtcaacgtcagcagactcgtcggtgcgctgtgctatccggttgggaggtctcaccaggagcagagcctccctaacgtgcacctccgagaagaggggtgtcggggagtgttcccagcacctgctcggtggaagggctctccggagactggcactcagtatctgagtatgaggagcctcacttcccggggtgtcggtaaacttgaccgtgactcagtaacccacagcgtgctcctcccagcaaaccccgtgtgtccttacaggtcgaccagacgggccgtcggaggaccaccaggtggctctgcctctgcctcaccttctcacctgcttccatagctgatgtgaacccgaatccccacgctgtgctgtgtacgcactgtaggtgcagaaccgtccacacaaaaatacagtcttggcattgtttgttctttgtgaggctggttaatagcatccccgtgtgtttttctcaccctcgatggggtagaggggcacctgaatgtgtggcccccgtctgtgtcctggatcctggggcagggctgctctccctggcccctgcagcccctcatgaactttccaccctcagtgcccccggctgagcagagaggcgtcccaccattcaaccaaagaaagtcaacattgaacattaaacctctgtgtgtttctatactga

SEQ ID NO: 533 - DNA, 3438 bp, Homo sapiens
  source 1..3438: mol_type = unassigned DNA
cccgtggggggctcatcctacccacagtaagagcatcctggcgtgaccccactgaggacttcacctcctctcccttggtggacacctatccaggtgggcatcgtgctgcactattctacactgtccaccatgctgtggataggagtgaccgccaggaacatctacaagcaggtgaccaagaaggcccctctgtgcctggacacagaccagccaccgtaccccaggcagcccctgctcaggttttacctcgtcagcggaggggtcccctttatcatctgtggggtcacggctgccacgaacatcaggaattacgggacagaggacgaggacacggcgtactgctggatggcctgggagcccagcctgggcgccttctacggcccagccgccatcatcaccctggtcacctgtgtgtacttcctgggcacctacgtgcagctgcggcgccacccagggcgcaggtacgagctgcgcacacagcccgaggagcagcggcggctggcgacacccgagggcggccgtgggatccggccaggcaccccacccgcacacgatgcccccggcgcctccgtgctgcagaacgagcactcattccaggcacagctgcgcgccgccgccttcacgctgttcctgttcacggccacgtgggccttcggggcgctggcggtgtcacagggccacttcctggacatggtcttcagctgcctgtacggcgccttctgcgtgaccctgggactcttcgtgctcatccaccactgcgccaagcgtgaggacgtgtggcagtgctggtgggcatgctgcccgccccgcaaggacgcccaccccgcacttgacgccaacggggccgcgctgggccgcgccgcctgcctgcactcgccgggactgggccagccacggggcttcgcgcacccaccgggcccctgcaagatgaccaacctgcaggccgcgcagggccacgccagttgcctgtcaccggccaccccgtgctgcgccaagatgcactgcgagccactgacggcggacgaggcgcacgtgcacctgcaggaggagggcgccttcgggcacgacccccacctgcacgggtgccttcagggcagaactaagccgccctactttagccggcacccagcagaggagcccgagtacgcctaccacatcccatccagcctggatggcagcccccgcagctcgcgcacagacagcccccccagctctctggatggcccggcggggacacacacgctggcctgctgcacccagggcgaccccttccccatggtcacccagcccgagggcagtgatgggagccctgccctctacagctgccccacgcagccgggcagggaggcagcgctcgggcccggccacttggagatgctgcggaggacacagtccctgccctttggtggccccagccagaacgggctgcccaagggtaaattgctagaaggcctgccgtttggcaccgacgggaccggcaacatccgaacgggaccctggaaaaacgaaactactgtgtagatgggggcagaggacacggtgttcctggaggagcttcagagcagagtggggggcccatctgccacatgaggtcactgggggtaccgaagtgaccccgcctttcagaagccgttcacacccctgccccttccttgtgatcacacccctgccccttccttgtgatcacacccctgccccttccttgtgatcacacccctgccccttccttgtgaaagacctcagcggggaaacgctccgggccacgcccactccccttatcccaattccgcgtgctggtcccgcacacggtcatccggtttctgtcctgtggtctccagtcctggggcaccctagaggcagagcaggggattccatcaaaggacccactgagaccccagcatggccctgcccgagatgccctgctgcccacggagtcctggcttcccctggtgtggccgggcagggccgagatcgcaggagggggctgccctgacctttcccagtgttcaatgtgtgtgtcttgcgttctactccgggggtggcggcggcaggtctgtccccagcattctcgctctgggcagaaccctcgggaccctccgctgtcgtgtgtctgagccacccctgcagcttcacagggcccctgcacacctctgcccactcagtgtgccctgtcagccctgtccttgtcgtagccccagccctgcagggctgagagcaccacagatgctgggggctgctctggactttggggatggctgtcagcctcagagggccaatggggggctttcacgggcccaaggcttgggaaaatgcccagacatcctttagtgaagactcgacttccaaaaccagccaccgctgggactggattccactccagtataggcacttagcaacacgaaggtttattccaaaaagaaaaggggctgacagacgggagattctcatggacaaaatccctttccctttttctcgtctccatgaacatctgggtaccaagccctgactcaaaggacagatgtggatgacagcaagacttctgtgaaagcaagtggcccgtccctaggtgggagggagtccagagggtcatgggtgtgaaactgtgcacagctttccctccctccctcttcctccttgtctgtgacacatgtgcacccacacacacacacacaaacacatgtgcatatcacacacatgcacacacacaaacacatgtgcatatcacacacgcgcacacacccaaacacgtgcatatcacacacatgcacacacacaaacacgtgcatatcacacacatgcacacaaacgtgcatatcacacacacgcacacacacccaaacacgtgcatatcacacacacgcacacacacaaacacgtgcatatcacacacaaacacacgtgcacacatacttaacacacacttgcacctgctgtgcacatgtgcacacacacgtagtagtgtgttttccagccacccacacactgggtttgcattggagattgtttcaccctgcaaacgtcaacgtcagcagactcgtcggtgcgctgtgctatccggttgggaggtctcaccaggagcagagcctccctaacgtgcacctccgagaagaggggtgtcggggagtgttcccagcacctgctcggtggaagggctctccggagactggcactcagtatctgagtatgaggagcctcacttcccggggtgtcggtaaacttgaccgtgactcagtaacccacagcgtgctcctcccagcaaaccccgtgtgtccttacaggtcgaccagacgggccgtcggaggaccaccaggtggctctgcctctgcctcaccttctcacctgcttccatagctgatgtgaacccgaatccccacgctgtgctgtgtacgcactgtaggtgcagaaccgtccacacaaaaatacagtcttggcattgtt

SEQ ID NO: 534 - DNA, 682 bp, Homo sapiens
  source 1..682: mol_type = unassigned DNA
ttcatattttcctaacctgtgtggtctttgtgggaggaataacccagactaggaatgccagcatctgccaagcagttgggataattcttcactattccacccttgccacagtactatgggtaggagtgacagctcgaaatatctacaaacaagtcactaaaaaagctaaaagatgccaggatcctgatgaaccaccacctccaccaagaccaatgctcagattttacctgattggtggtggtatccccatcattgtttgcggcataactgcagcagcgaacattaagaattacggcagtcggccaaacgcaccctagctgtacagcagtcatgacgctggcatctgcttggcttctggggagccctcgggaaacttacaatcatggcagaaggtgaaggagaagcagtgtccattctccagtatggttttgggggagtatggcttcctacctactgcggaccacctgtcaactctgggctgtaacatgagagaattgtgaacttctgtcttgtttgagccatggtttcattctctttttcagccatgtagcctgtgctgtaactcagtgccacattagcaactagtgaaagtcaatgtgggtaaatttgtcattcttcaggttagaacatttcttccttttattcttgtgtttttggctaaataaactgggaaattatagta

SEQ ID NO: 535 - DNA, 4566 bp, Homo sapiens
  source 1..4566: mol_type = unassigned DNA
ggcggcggcagaggaggaggaggaggcggtgctcgcgccgggcggtagagcggcgctgggacccatgcggccgtgacccccggctccctagaggcccagcgcagccgcagcggacaaaggagcatgtccgcgccggggaaggcccgtcctccggccgccataaggctccggtcgccgctgggcccgcgccgcgctcctgcccgcccgggctccggggcggcccgctaggccagtgcgccgccgctcgccccgcaggccccggcccgcagcatggagccacccggacgccggcggggccgcgcgcagccgccgctgttgctgccgctctcgctgttagcgctgctcgcgctgctgggaggcggcggcggcggcggcgccgcggcgctgcccgccggctgcaagcacgatgggcggccccgaggggctggcagggcggcgggcgccgccgagggcaaggtggtgtgcagcagcctggaactcgcgcaggtcctgcccccagatactctgcccaaccgcacggtcaccctgattctgagtaacaataagatatccgagctgaagaatggctcattttctgggttaagtctccttgaaagattggacctccgaaacaatcttattagtagtatagatccaggtgccttctggggactgtcatctctaaaaagattggatctgacaaacaatcgaataggatgtctgaatgcagacatatttcgaggactcaccaatctggttcggctaaacctttcggggaatttgttttcttcattatctcaaggaacttttgattatcttgcgtcattacggtctttggaattccagactgagtatcttttgtgtgactgtaacatactgtggatgcatcgctgggtaaaggagaagaacatcacggtacgggataccaggtgtgtttatcctaagtcactgcaggcccaaccagtcacaggcgtgaagcaggagctgttgacatgcgaccctccgcttgaattgccgtctttctacatgactccatctcatcgccaagttgtgtttgaaggagacagccttcctttccagtgcatggcttcatatattgatcaggacatgcaagtgttgtggtatcaggatgggagaatagttgaaaccgatgaatcgcaaggtatttttgttgaaaagaacatgattcacaactgctccttgattgcaagtgccctaaccatttctaatattcaggctggatctactggaaattggggctgtcatgtccagaccaaacgtgggaataatacgaggactgtggatattgtggtattagagagttctgcacagtactgtcctccagagagggtggtaaacaacaaaggtgacttcagatggcccagaacattggcaggcattactgcatatctgcagtgtacgcggaacacccatggcagtgggatatatcccggaaacccacaggatgagagaaaagcttggcgcagatgtgatagaggtggcttttgggcagatgatgattattctcgctgtcagtatgcaaatgatgtcactagagttctttatatgtttaatcagatgcccctcaatcttaccaatgccgtggcaacagctcgacagttactggcttacactgtggaagcagccaacttttctgacaaaatggatgttatatttgtggcagaaatgattgaaaaatttggaagatttaccaaggaggaaaaatcaaaagagctaggtgacgtgatggttgacattgcaagtaacatcatgttggctgatgaacgtgtcctgtggctggcgcagagggaagctaaagcctgcagtaggattgtgcagtgtcttcagcgcattgctacctaccggctagccggtggagctcacgtttattcaacatattcacccaatattgctctggaagcttatgtcatcaagtctactggcttcacggggatgacctgtaccgtgttccagaaagtggcagcctctgatcgtacaggactttcggattatgggaggcgggatccagagggaaacctggataagcagctgagctttaagtgcaatgtttcaaatacattttcgagtctggcactaaagaatactattgtggaggcttctattcagcttcctccttcccttttctcaccaaagcaaaaaagagaactcagaccaactgatgactctctttacaagcttcaactcattgcattccgcaatggaaagctttttccagccactggaaattcaacaaatttggctgatgatggaaaacgacgtactgtggttacccctgtgattctcaccaaaatagatggtgtgaatgtagatacccaccacatccctgttaatgtgacactgcgtcgaattgcacatggagcagatgctgttgcagcccggtgggatttcgatttgctgaacggacaaggaggctggaagtcagatgggtgccatatactctattcagatgaaaatatcactacgattcagtgctactcccttagtaactatgcagttttaatggatttgacgggatctgaactatacacccaggcggccagcctcctgcatcctgtggtttatactaccgctatcattctcctcttatgtctcttagccgtcattgtcagttacatataccatcacagtttgattagaatcagcctcaagagctggcacatgcttgtgaacttgtgctttcatattttcctaacctgtgtggtctttgtgggaggaataacccagactaggaatgccagcatctgccaagcagttgggataattcttcactattccacccttgccacagtactatgggtaggagtgacagctcgaaatatctacaaacaagtcactaaaaaagctaaaagatgccaggatcctgatgaaccaccacctccaccaagaccaatgctcagattttacctgattggtggtggtatccccatcattgtttgcggcataactgcagcagcgaacattaagaattacggcagtcggccaaacgcaccctattgctggatggcatgggaaccctccttgggagccttctatgggccagccagcttcatcacttttgtaaactgcatgtactttctgagcatatttattcagttgaaaagacaccctgagcgcaaatatgagcttaaggagcccacggaggagcaacagagattggcagccaatgaaaatggcgaaataaatcatcaggattcaatgtctttgtctctgatttctacatcagccttggaaaatgagcacacttttcattctcagctcttgggggccagccttactttgctcttatatgttgcactgtggatgtttggggctttggctgtttctttgtattaccctttggacttggtttttagcttcgtttttggagccacaagtttaagcttcagtgcgttcttcgtggtccaccattgtgttaatagggaggatgttagacttgcgtggatcatgacttgctgcccaggacggagctcgtattcagtgcaagtcaacgtccagccccccaactctaatgggacgaatggagaggcacccaaatgccccaatagcagtgcggagtcttcatgcacaaacaaaagtgcttcaagcttcaaaaattcctcccagggctgcaaattaacaaacttgcaggcggctgcagctcagtgccatgccaattctttacctttgaactccacccctcagcttgataatagtctgacagaacattcaatggacaatgatattaaaatgcacgtggcgcctttagaagttcagtttcgaacaaatgtgcactcaagccgccaccataaaaacagaagtaaaggacaccgggcaagccgactcacagtcctgagagaatatgcctacgatgtcccaacgagcgtggaaggaagcgtgcagaacggcttacctaaaagccggctgggcaataacgaaggacactcgaggagccgaagagcttatttagcctacagagagagacagtacaacccaccccagcaagacagcagcgatgcttgtagcacacttcccaaaagtagcagaaattttgaaaagccagtttcaaccactagtaaaaaagatgcgttaaggaagccagctgtggttgaacttgaaaatcagcaaaaatcttatggcctcaacttggccattcagaatggaccaattaaaagcaatgggcaggagggacccttgctcggtaccgatagcactggcaatgttaggactggattatggaaacacgaaactactgtgtaacattgctgggcttcctaggcagaaattcatataaactgtgatactcacattccttgaagctatgagcatttaaaaactgtttacagccaccatagggattcaaaagaatttggaataaactttgaagttttggattttacttatttttatccccaaattgttgctattttttaggatctgaaacaaaatctttctaaaacattgttttagttgtcaaagcaccaacaggacattttgggatgtgaaatgtaatttcttggaatctgtaatttgtacttaatatttcaggcttgtatttaatataataaataggtgtttgttattgtgtcg

SEQ ID NO: 536 - DNA, 3968 bp, Homo sapiens
  source 1..3968: mol_type = unassigned DNA
tgtcatcatacccctaaaattccactattggtaataatcaggcttcagtatctttaagagtaaacctcctctggaaatttagaaatgccatagaaaacacttcagtgcctaaagatgtgttttgtcccctgtagaaaattctttgtttgacacctcctatgtgggagttgcctttaacctgtatttttacttttgtattttagagccctacctcattcttttgacctttgtgtcagagacacctccagcaatagtagagttgaccattttgagtcagcatctgatttgttttgaatttattggtttctatgcatcaaattcatttatactatttttacttacagtatttggtgtgacttgatagctcaaaagggttattttatgctttctgttccacttctgtctataaattttgctttcacagcgcagtcagcaaaactaatgggaaccatgaagccacttttctttttaagacgatcatttctgacgtttgtagttgggccaaacttgatcccacctcccagcacctcagagccactgcaaggtttatctggagaggggccaccctggctttctcctgcaaaagaagatttgggctttcaggtcaccaagtgtttgctgcagattggttctcattaaaataaactctggacagtggtccataattttattatcgacctttgattttcttgaggttggagaggcatccctttagaatgacagattttttcttggaatttcataattatataaaaaagcagtgattaaaaaaaagcaagttactggttaagaaagctggattatgtccttgatactccagtgacatatgacatttacttttcttaaactaaaatttaagcttctctcatttcctcacatcttcatctagaatttcatcctcaactagagttgcttcatgtataggtcatgtgataaatagaaactgtaagtgtatcatttgcatatattgcagttatcctatacttactgagcacctattatatcccatgaattgtgtccattcaattcctacgaaacccctagaggtggcgattgataattttctactattaaattgaggaaagttaatttcagagaggtcgcattatttcctcaaaatcacattcttaataagtaataatatagtgatttctactaattgcttgtcacacactaggcgatttgctaaatgcttaatgtggaccatcttacttaacctcacagtacttttatattactcttggttcccaagtgaggaagccagcactttaggtcttacgtgactttgctcagatcacccagcaggtaagaggtgaataccagtttaaaaatcaaggaaaatttcatttctgagttcaccctcttaaccatcaatatattattatattgctttgtgattgttacagtgtataaaagctctgaatcatatctcaggtctcttactctggaacttattctgtgtgtgctgtggccttcaccctgtagttaacctgtgccctctgtatattcctccttaaaaagaatgttagaaaatggactctaggccgggcatggtggctcatgcctgtaatcccagcacttttggaggctgaggtggatggatcacctgaggtcaggagttggagaccagcctggccaacatggcaaaaccctctctctactaaaaatacaaaaattagccaggcgtggtggtgcgtacctgtagtcccagctactcaggaggctgaggcaggagaatcacttgaacccaggaggcagaggttgcagtgagccgagatcacactgcagcactctatcctgggtgacagagcgaggctctgtcccaaaaaaaaaaaaaaaagaaaatgaactctaatgtataatgtcacatctatgaaaaacacacttttggtttaatgtctgggagccagttctgtcctgtattaagggtcgtctttggtataaatggtagtttgtgggcttcctagagccaattgttggtttgtgtatttgaggattgtgattccctgtcacatgtctattagaacacagtgttgccttagcaggcaacagagttgattattaggataggccttcctgctgctttcaaatcagacttctgagttacttaccaattttgaggtaagccttagtaggaacattttttttcttttatttattctttgatcttccttgtaggttgggataattcttcactattccacccttgccacagtactatgggtaggagtgacagctcgaaatatctacaaacaagtcactaaaaaagctaaaagatgccaggatcctgatgaaccaccacctccaccaagaccaatgctcagattttacctgattggtggtggtatccccatcattgtttgcggcataactgcagcagcgaacattaagaattacggcagtcggccaaacgcaccctattgctggatggcatgggaaccctccttgggagccttctatgggccagccagcttcatcacttttgtaaactgcatgtactttctgagcatatttattcagttgaaaagacaccctgagcgcaaatatgagcttaaggagcccacggaggagcaacagagattggcagccaatgaaaatggcgaaataaatcatcaggattcaatgtctttgtctctgatttctacatcagccttggaaaatgagcacacttttcattctcagctcttgggggccagccttactttgctcttatatgttgcactgtggatgtttggggctttggctgtttctttgtattaccctttggacttggtttttagcttcgtttttggagccacaagtttaagcttcagtgcgttcttcgtggtccaccattgtgttaatagggaggatgttagacttgcgtggatcatgacttgctgcccaggacggagctcgtattcagtgcaagtcaacgtccagccccccaactctaatgggacgaatggagaggcacccaaatgccccaatagcagtgcggagtcttcatgcacaaacaaaagtgcttcaagcttcaaaaattcctcccagggctgcaaattaacaaacttgcaggcggctgcagctcagtgccatgccaattctttacctttgaactccacccctcagcttgataatagtctgacagaacattcaatggacaatgatattaaaatgcacgtggcgcctttagaagttcagtttcgaacaaatgtgcactcaagccgccaccataaaaacagaagtaaaggacaccgggcaagccgactcacagtcctgagagaatatgcctacgatgtcccaacgagcgtggaaggaagcgtgcagaacggcttacctaaaagccggctgggcaataacgaaggacactcgaggagccgaagagcttatttagcctacagagagagacagtacaacccaccccagcaagacagcagcgatgcttgtagcacacttcccaaaagtagcagaaattttgaaaagccagtttcaaccactagtaaaaaagatgcgttaaggaagccagctgtggttgaacttgaaaatcagcaaaaatcttatggcctcaacttggccattcagaatggaccaattaaaagcaatgggcaggagggacccttgctcggtaccgatagcactggcaatgttaggactggattatggaaacacgaaactactgtgtaacattgctgggcttcctaggcagaaattcatataaactgtgatactcacattccttgaagctatgagcatttaaaaactgtttacagccaccatagggattcaaaagaatttggaataaactttgaagttttggattttacttatttttatccccaaattgttgctattttttaggatctgaaacaaaatctttctaaaacattgttttagttgtcaaagcaccaacaggacattttgggatgtgaaatgtaatttcttggaatctgtaatttgtacttaatatttcaggcttgtatttaatataa

SEQ ID NO: 537 - DNA, 3534 bp, Homo sapiens
  source 1..3534: mol_type = unassigned DNA
atgatgcgagtcatgccatgccaggtggatctgacaaacaatcgaataggatgtctgaatgcagacatatttcgaggactcaccaatctggttcggctaaacctttcggggaatttgttttcttcattatctcaaggaacttttgattatcttgcgtcattacggtctttggaattccagactgagtatcttttgtgtgactgtaacatactgtggatgcatcgctgggtaaaggagaagaacatcacggtacgggataccaggtgtgtttatcctaagtcactgcaggcccaaccagtcacaggcgtgaagcaggagctgttgacatgcgaccctccgcttgaattgccgtctttctacatgactccatctcatcgccaagttgtgtttgaaggagacagccttcctttccagtgcatggcttcatatattgatcaggacatgcaagtgttgtggtatcaggatgggagaatagttgaaaccgatgaatcgcaaggtatttttgttgaaaagaacatgattcacaactgctccttgattgcaagtgccctaaccatttctaatattcaggctggatctactggaaattggggctgtcatgtccagaccaaacgtgggaataatacgaggactgtggatattgtggtattagagagttctgcacagtactgtcctccagagagggtggtaaacaacaaaggtgacttcagatggcccagaacattggcaggcattactgcatatctgcagtgtacgcggaacacccatggcagtgggatatatcccggaaacccacaggatgagagaaaagcttggcgcagatgtgatagaggtggcttttgggcagatgatgattattctcgctgtcagtatgcaaatgatgtcactagagttctttatatgtttaatcagatgcccctcaatcttaccaatgccgtggcaacagctcgacagttactggcttacactgtggaagcagccaacttttctgacaaaatggatgttatatttgtggcagaaatgattgaaaaatttggaagatttaccaaggaggaaaaatcaaaagagctaggtgacgtgatggttgacattgcaagtaacatcatgttggctgatgaacgtgtcctgtggctggcgcagagggaagctaaagcctgcagtaggattgtgcagtgtcttcagcgcattgctacctaccggctagccggtggagctcacgtttattcaacatattcacccaatattgctctggaagcttatgtcatcaagtctactggcttcacggggatgacctgtaccgtgttccagaaagtggcagcctctgatcgtacaggactttcggattatgggaggcgggatccagagggaaacctggataagcagctgagctttaagtgcaatgtttcaaatacattttcgagtctggcactaaagcaaaaaagagaactcagaccaactgatgactctctttacaagcttcaactcattgcattccgcaatggaaagctttttccagccactggaaattcaacaaatttggctgatgatggaaaacgacgtactgtggttacccctgtgattctcaccaaaatagatggtgtgaatgtagatacccaccacatccctgttaatgtgacactgcgtcgaattgcacatggagcagatgctgttgcagcccggtgggatttcgatttgctgaacggacaaggaggctggaagtcagatgggtgccatatactctattcagatgaaaatatcactacgattcagtgctactcccttagtaactatgcagttttaatggatttgacgggatctgaactatacacccaggcggccagcctcctgcatcctgtggtttatactaccgctatcattctcctcttatgtctcttagccgtcattgtcagttacatataccatcacagtttgattagaatcagcctcaagagctggcacatgcttgtgaacttgtgctttcatattttcctaacctgtgtggtctttgtgggaggaataacccagactaggaatgccagcatctgccaagcagttgggataattcttcactattccacccttgccacagtactatgggtaggagtgacagctcgaaatatctacaaacaagtcactaaaaaagctaaaagatgccaggatcctgatgaaccaccacctccaccaagaccaatgctcagattttacctgattggtggtggtatccccatcattgtttgcggcataactgcagcagcgaacattaagaattacggcagtcggccaaacgcaccctattgctggatggcatgggaaccctccttgggagccttctatgggccagccagcttcatcacttttgtaaactgcatgtactttctgagcatatttattcagttgaaaagacaccctgagcgcaaatatgagcttaaggagcccacggaggagcaacagagattggcagccaatgaaaatggcgaaataaatcatcaggattcaatgtctttgtctctgatttctacatcagccttggaaaatgagcacacttttcattctcagctcttgggggccagccttactttgctcttatatgttgcactgtggatgtttggggctttggctgtttctttgtattaccctttggacttggtttttagcttcgtttttggagccacaagtttaagcttcagtgcgttcttcgtggtccaccattgtgttaatagggaggatgttagacttgcgtggatcatgacttgctgcccaggacggagctcgtattcagtgcaagtcaacgtccagccccccaactctaatgggacgaatggagaggcacccaaatgccccaatagcagtgcggagtcttcatgcacaaacaaaagtgcttcaagcttcaaaaattcctcccagggctgcaaattaacaaacttgcaggcggctgcagctcagtgccatgccaattctttacctttgaactccacccctcagcttgataatagtctgacagaacattcaatggacaatgatattaaaatgcacgtggcgcctttagaagttcagtttcgaacaaatgtgcactcaagccgccaccataaaaacagaagtaaaggacaccgggcaagccgactcacagtcctgagagaatatgcctacgatgtcccaacgagcgtggaaggaagcgtgcagaacggcttacctaaaagccggctgggcaataacgaaggacactcgaggagccgaagagcttatttagcctacagagagagacagtacaacccaccccagcaagacagcagcgatgcttgtagcacacttcccaaaagtagcagaaattttgaaaagccagtttcaaccactagtaaaaaagatgcgttaaggaagccagctgtggttgaacttgaaaatcagcaaaaatcttatggcctcaacttggccattcagaatggaccaattaaaagcaatgggcaggagggacccttgctcggtaccgatagcactggcaatgttaggactggattatggaaacacgaaactactgtg

SEQ ID NO: 538 - DNA, 280 bp, Homo sapiens
  source 1..280: mol_type = unassigned DNA
ttgcagcccggtgggatttcgatttgctgaacggacaaggaggctggaagtcagatgggtgccatatactctattcagatgaaaatatcactacgattcagtgctactcccttagtaactatgcagttttaatggttgggataattcttcactattccacccttgccacagtactatgggtaggagtgacagctcgaaatatctacaaacaagtcactaaaaaagctaaaagatgccaggatcctgatgaaccaccacctccaccaagaccaatgctcag

SEQ ID NO: 539 - DNA, 671 bp, Homo sapiens
  source 1..671: mol_type = unassigned DNA
gaaaattaactttgttaatttgaaacacttttcttgtttacttatttaactctttaaagtttgcatttctgttttatacttcttttaatctatgttatgtggtgttgacatttcgcttgactgatgatttttttaactgttaaattttgtatatccaatttaaaaaatgaagtcaacctaattataccacttttgtaactatctgacatatttttttctggtttctatgtactaatgtagtgagctttttttatgtatatatattttttcagaatactattgtggaggcttctattcagcttcctccttcccttttctcaccaaagcaaaaaagagaactcagaccaactgatgactctctttacaagcttcaactcattgcattccgcaatggaaagctttttccagccactggaaattcaacaaatttggctgatgatggaaaacgacgtactgtggttacccctgtgattctcaccaaaatagatggtgtgaatgtagatacccaccacatccctgttaatgtgacactgcgtcgaattgcacatggagcagatgctgttgcagcccggtgggatttcgatttgctgaacggacaaggaggctggaagtcagatgggtgccatatactctattcagatgaaaatatcactacgattcagtgctactcc

SEQ ID NO: 540 - DNA, 1572 bp, Homo sapiens
  source 1..1572: mol_type = unassigned DNA
atttctgtaatcatctgatactcttaggatgccactgaagaggaataactctaaataccctccgcttgaattgccgtctttctacatgactccatctcatcgccaagttgtgtttgaaggagacagccttcctttccagtgcatggcttcatatattgatcaggacatgcaagtgttgtggtatcaggatgggagaatagttgaaaccgatgaatcgcaaggtatttttgttgaaaagaacatgattcacaactgctccttgattgcaagtgccctaaccatttctaatattcaggctggatctactggaaattggggctgtcatgtccagaccaaacgtgggaataatacgaggactgtggatattgtggtattagagagttctgcacagtactgtcctccagagagggtggtaaacaacaaaggtgacttcagatggcccagaacattggcaggcattactgcatatctgcagtgtacgcggaacacccatggcagtgggatatatcccggaaacccacaggatgagagaaaagcttggcgcagatgtgatagaggtggcttttgggcagatgatgattattctcgctgtcagtatgcaaatgatgtcactagagttctttatatgtttaatcagatgcccctcaatcttaccaatgccgtggcaacagctcgacagttactggcttacactgtggaagcagccaacttttctgacaaaatggatgttatatttgtggcagaaatgattgaaaaatttggaagatttaccaaggaggaaaaatcaaaagagctaggtgacgtgatggttgacattgcaagtaacatcatgttggctgatgaacgtgtcctgtggctggcgcagagggaagctaaagcctgcagtaggattgtgcagtgtcttcagcgcattgctacctaccggctagccggtggagctcacgtttattcaacatattcacccaatattgctctggaagcttatgtcatcaagtctactggcttcacggggatgacctgtaccgtgttccagaaagtggcagcctctgatcgtacaggactttcggattatgggaggcgggatccagagggaaacctggataagcagctgagctttaagtgcaatgtttcaaatacattttcgagtctggcactaaaggggaaattccggtgaatatggaattagaagaagagaggttagaagccaagaaaaagattgtacaataaattcttcaactatggaatgtttttagatggttaattgttcacttctttggtatatatatattttttactgaatgctgaataatttgttatttaaaaatcctcaataaagaaatctgaaaaaattcagtgatcagtcagcattttcagttgttcctatgtgttattattttttttttctaaatgtgtttcctagtctcaaggaaatttctgctaagtgtactgaatctaaacctctattatgtttgtataatttcattcttttgttgtgtggaggtttgaattcatcataaatcaccttaaagttccataagcccaaattaattatactcatatttatgatatgct

SEQ ID NO: 541 - DNA, 2870 bp, Homo sapiens
  source 1..2870: mol_type = unassigned DNA
gggacccatgcggccgtgacccccggctccctagaggcccagcgcagccgcagcggacaaaggagcatgtccgcgccggggaaggcccgtcctccggccgccataaggctccggtcgccgctgggcccgcgccgcgctcctgcccgcccgggctccggggcggcccgctaggccagtgcgccgccgctcgccccgcaggccccggcccgcagcatggagccacccggacgccggcggggccgcgcgcagccgccgctgttgctgccgctctcgctgttagcgctgctcgcgctgctgggaggcggcggcggcggcggcgccgcggcgctgcccgccggctgcaagcacgatgggcggccccgaggggctggcagggcggcgggcgccgccgagggcaaggtggtgtgcagcagcctggaactcgcgcaggtcctgcccccagatactctgcccaaccgcacggtcaccctgattctgagtaacaataagatatccgagctgaagaatggctcattttctgggttaagtctccttgaaagattggacctccgaaacaatcttattagtagtatagatccaggtgccttctggggactgtcatctctaaaaagattggatctgacaaacaatcgaataggatgtctgaatgcagacatatttcgaggactcaccaatctggttcggctaaacctttcggggaatttgttttcttcattatctcaaggaacttttgattatcttgcgtcattacggtctttggaattccagactgagtatcttttgtgtgactgtaacatactgtggatgcatcgctgggtaaaggagaagaacatcacggtacgggataccaggtgtgtttatcctaagtcactgcaggcccaaccagtcacaggcgtgaagcaggagctgttgacatgcgaccctccgcttgaattgccgtctttctacatgactccatctcatcgccaagttgtgtttgaaggagacagccttcctttccagtgcatggcttcatatattgatcaggacatgcaagtgttgtggtatcaggatgggagaatagttgaaaccgatgaatcgcaaggtatttttgttgaaaagaacatgattcacaactgctccttgattgcaagtgccctaaccatttctaatattcaggctggatctactggaaattggggctgtcatgtccagaccaaacgtgggaataatacgaggactgtggatattgtggtattagagagttctgcacagtactgtcctccagagagggtggtaaacaacaaaggtgacttcagatggcccagaacattggcaggcattactgcatatctgcagtgtacgcggaacacccatggcagtgggatatatcccggaaacccacaggatgagagaaaagcttggcgcagatgtgatagaggtggcttttgggcagatgatgattattctcgctgtcagtatgcaaatgatgtcactagagttctttatatgtttaatcagatgcccctcaatcttaccaatgccgtggcaacagctcgacagttactggcttacactgtggaagcagccaacttttctgacaaaatggatgttatatttgtggcagaaatgattgaaaaatttggaagatttaccaaggaggaaaaatcaaaagagctaggtgacgtgatggttgacattgcaagtaacatcatgttggctgatgaacgtgtcctgtggctggcgcagagggaagctaaagcctgcagtaggattgtgcagtgtcttcagcgcattgctacctaccggctagccggtggagctcacgtttattcaacatattcacccaatattgctctggaagcttatgtcatcaagtctactggcttcacggggatgacctgtaccgtgttccagaaagtggcagcctctgatcgtacaggactttcggattatgggaggcgggatccagagggaaacctggataagcagctgagctttaagtgcaatgtttcaaatacattttcgagtctggcactaaaggtatgttacattctgcaatcatttaagactatttacagttaaattagaatgctccaaatgttctgcttcgcaaaataaccttattaaaagattttttttttgcaggaagataggtattattgcttttgctactgttttaaagaaaactaaccaggaagaactgcattacgactttcaagggccctaggcatttttgcctttgattccctttcttcacataaaaatatcagaaattacattttataactgcagtggtataaatgcaaatatactattgttacatgtgaaaaaatcttatttgacttaaaagtttatttatttgtttttttgctcctgattttaagacaataagatgttttcatgggcccctaaaagtatcatgagcctttggcactgcgcctgccaagcctagtggagaagtcaaccctgagaccaggtgtttaatcaagcaagctgtatatcaaaatttttggcagaaaacacaaatatgtcatatatctttttttaaaaaaagtatttcattgaagcaagcaaaatgaaagcatttttactgatttttaaaattggtgctttagatatatttgactacactgtattgaagcaaatagaggaggcacaactccagcaccctaatggaaccacatttttttcacttagctttctgtgggcatgtgtaattgtattctctgcggtttttaatctcacagtactttatttctgtcttgtccctcaataatatcacaaacaatattccagtcattttaatggctgcataataactgatccaacaggtgttaggtgttctggtttagtgtgagcactcaataaatattgaatgaatgaacgaa

SEQ ID NO: 542 - DNA, 733 bp, Homo sapiens
  source 1..733: mol_type = unassigned DNA
gagctgaagaatggctcattttctgggttaagtctccttgaaagattggacctccgaaacaatcttattagtagtatagatccaggtgccttctggggactgtcatctctaaaaagattggatctgacaaacaatcgaataggatgtctgaatgcagacatatttcgaggactcaccaatctggttcggctaaacctttcggggaatttgttttcttcattatctcaaggaacttttgattatcttgcgtcattacggtctttggaattccagactgagtatcttttgtgtgactgtaacatactgtggatgcatcgctgggtaaaggagaagaacatcacggtacgggataccagaccctccgcttgaattgccgtctttctacatgactccatctcatcgccaagttgtgtttgaaggagacagccttcctttccagtgcatggcttcatatattgatcaggacatgcaagtgttgtggtatcaggatgggagaatagttgaaaccgatgaatcgcaaggtatttttgttgaaaagaacatgattcacaactgctccttgattgcaagtgccctaaccatttctaatattcaggctggatctactggaaattggggctgtcatgtccagaccaaacgtgggaataatacgaggactgtggatattgtggtattagagagttctgcacagtactgtcctccagagagggtggtaaacaacaaaggtgacttc

SEQ ID NO: 543 - DNA, 554 bp, Homo sapiens
  source 1..554: mol_type = unassigned DNA
ggctcattttctgggttaagtctccttgaaagattggacctccgaaacaatcttattagtagtatagatccaggtgccttctggggactgtcatctctaaaaagattaaacctttcggggaatttgttttcttcattatctcaaggaacttttgattatcttgcgtcattacggtctttggaattccagactgagtatcttttgtgtgactgtaacatactgtggatgcatcgctgggtaaaggagaagaacatcacggtacgggataccaggtgtgtttatcctaagtcactgcaggcccaaccagtcacaggcgtgaagcaggagctgttgacatgcgaccctccgcttgaattgccgtctttctacatgactccatctcatcgccaagttgtgtttgaaggagacagccttcctttccagtgcatggcttcatatattgatcaggacatgcaagtgttgtggtatcaggatgggagaatagttgaaaccgatgaatcgcaaggtatttttgttgaaaagaacatgattcacaactgctccttgattgcaag

SEQ ID NO: 544 - DNA, 538 bp, Homo sapiens
  source 1..538: mol_type = unassigned DNA
aaaaagaatcaaggcagccactatacaaacatgaatgcaaggaccgcagcatgatctatgaaaacacttaaagtatggttttaaatgtaacccaaattcagcaggagtatacacaggattctgagtaacaataagatatccgagctgaagaatggctcattttctgggttaagtctccttgaaagattggacctccgaaacaatcttattagtagtatagatccaggtgccttctggggactgtcatctctaaaaagattggatctgacaaacaatcgaataggatgtctgaatgcagacatatttcgaggactcaccaatctggttcggctaaacctttcggggaatttgttttcttcattatctcaaggaacttttgattatcttgcgtcattacggtctttggaattccagactgagtatcttttgtgtgactgtaacatactgtggatgcatcgctgggtaaaggagaagaacatcacggtacgggataccaggtgtgtttatcctaagtcactgcaggcccaaccagtcacag

SEQ ID NO: 545 - DNA, 485 bp, Homo sapiens
  source 1..485: mol_type = unassigned DNA
cagcataagcgatgtaccaaactaaaacttggtactgtgttaaatggtagcagtagacatcaaggacttccttaatggcgttgaaattcaagaggcgagagctccaagtagcgttcctaagcatcgtccatagatcatgtggcgcttttatgactgaggaaatgacagtcctttggccgaagcattctggaattgcagattctgagtaacaataagatatccgagctgaagaatggctcattttctgggttaagtctccttgaaagattggacctccgaaacaatcttattagtagtatagatccaggtgccttctggggactgtcatctctaaaaagattggatctgacaaacaatcgaataggatgtctgaatgcagacatatttcgaggactcaccaatctggttcggctaaacctttcggggaatttgttttcttcattatctcaaggaacttttgattatcttgcgtcattacggtcttt

SEQ ID NO: 546 - DNA, 453 bp, Homo sapiens
  source 1..453: mol_type = unassigned DNA
gcggcggcggcggcggcgccgcggcgctgcccgccggctgcaagcacgatgggcggccccgaggggctggcagggcggcgggcgccgccgagggcaaggtggtgtgcagcagcctggaactcgcgcaggtcctgcccccagatactctgcccaaccgcacggtcaccctgattctgagtaacaataagatatccgagctgaagaatggctcattttctgggttaagtctccttgaaagattgctgtacaggaagcatggagctggcatctgctcggcttctaaggaggcctcaggaagcttacaatcatggtggaaggccaaacttgcatgtcacatggcgaaaacagaagcgaggatgtgatgtcaaggggaaaaacactagtataaactttgatattttattcagatgtctttaaatgtgatatatttgtaaatatatatttttcttagca

SEQ ID NO: 547 - DNA, 563 bp, Homo sapiens
  source 1..563: mol_type = unassigned DNA
aaaatgagatggttggtgaccccagaggacaaacctgggttgtgctttctgagccatctcctggtgctgagcacttggaccgcttcagctctccacgggtcaggctggacagccctgtgaccacagcttgtcactggagtgtcttttcttcagggcccctcttgagtaggaggagaccaggctttgaaggttcctgagaggagatgtacgggacctgaatacagctttcctgacctgcccctcataggagcctgcagggagggtctcgctctgtcacacaggctggagtgcagtggtgtgatcttggctcatcgtaacctccacctcccgggttcaagtgattctcatgcctcagcctcccgagtagctgggattacaggtggtgacttccaagagtgactccgtcggaggaaaatgactccccagtcgctgctgcagacgacactgttcctgctgagtctgctcttcctggtccaaggtgcccacggcaggggccacagggaagactttcgcttctgcagccagcggaaccagacacacaggagcagcctccactacaaacc

SEQ ID NO: 548 - DNA, 590 bp, Homo sapiens
  source 1..590: mol_type = unassigned DNA
attccaggcggggcctggactgagggaggaggcaggaagaaactcacaaagagttggcagatcacggatggagggcagcatctcccaacagcctgggcggccgctgagacccagagaacccaaggactcccctgggctcatccagcagcctctgcttcccaggagagaggtgctgaagtccacgaagagacagggtctcgctctgtcacacaggctggagtgcagtggtgtgatcttggctcatcgtaacctccacctcccgggttcaagtgattctcatgcctcagcctcccgagtagctgggattacaggtggtgacttccaagagtgactccgtcggaggaaaatgactccccagtcgctgctgcagacgacactgttcctgctgagtctgctcttcctggtccaaggcaggtgcccacggcaggggccacagggaagactttcgcttctgcagccagcggaaccagacacacaggagcagcctccactacaaacccacaccagacctgcgcatctccatcgagaactccgaagaggccctcacagtccatgcccctttccctgcagcccaccctgcttcccgatcc

SEQ ID NO: 549 - DNA, 553 bp, Homo sapiens
  source 1..553: mol_type = unassigned DNA
ttccaggcggggcctggactgagggaggaggcaggaagaaactcacaaagagttggcagatcacggatggagggcagcatctcccaacagcctgggcggccgctgagacccagagaacccaaggactcccctgggctcatccagcagcctctgcttcccaggagagaggtgctgaagtccacgaagagggtctcgctctgtcacacaggctggagtgcagtggtgtgatcttggctcatcgtaacctccacctcccgggttcaagtgattctcatgcctcagcctcccgagtagctgggattacaggtggtgacttccaagagtgactccgtcggaggaaaatgactccccagtcgctgctgcagacgacactgttcctgctgagtctgctcttcctggtccaaggtgcccacggcaggggccacagggaagactttcgcttctgcagccagcggaaccagacacacaggagcagcctccactacaaacccacaccagacctgcgcatctccatcgagaactccgaagaggccctcacagtccatgccccttt

SEQ ID NO: 550 - DNA, 574 bp, Homo sapiens
  source 1..574: mol_type = unassigned DNA
aactcacaaagagttggcagatcacggatggagggcagcatctcccaacagcctgggcggccgctgagacccagagaacccaaggactcccctgggctcatccagcagcctctgcttcccaggagagaggtgctgaagtccacgaagagggtctcgctctgtcacacaggctggagtgcagtggtgtgatcttggctcatcgtaacctccacctcccgggttcaagtgattctcatgcctcagcctcccgagtagctgggattacaggtggtgacttccaagagtgactccgtcggaggaaaatgactccccagtcgctgctgcagacgacactgttcctgctgagtctgctcttcctggtccaagcctctgcctcctcaggtgcccacggcaggggccacagggaagactttcgcttctgcagccagcggaaccagacacacaggagcagcctccactacaaacccacaccagacctgcgcatctccatcgagaactccgaagaggccctcacagtccatgcccctttccctgcagcccaccctgcttcccgatccttccctgaccccagggg

SEQ ID NO: 551 - DNA, 602 bp, Homo sapiens
  source 1..602: mol_type = unassigned DNA
cacaaagagttggcagatcacggatggagggcagcatctcccaacagcctgggcggccgctgagacccagagaacccaaggactcccctgggctcatccagcagcctctgcttcccaggagagaggtgctgaagtccacgaagaggtggtgacttccaagagtgactccgtcggaggaaaatgactccccagtcgctgctgcagacgacactgttcctgctgagtctgctcttcctggtccaaggtgcccacggcaggggccacagggaagactttcgcttctgcagccagcggaaccagacacacaggagcagcctccactacaaacccacaccagacctgcgcatctccatcgagaactccgaagaggccctcacagtccatgcccctttccctgcagcccaccctgcttcccgatccttccctgaccccaggggcctctaccacttctgcctctactggaaccgacatgctgggagattacatcttctctatggcaagcgtgacttcttgctgagtgacaaagcctctagcctcctctgcttccagcaccaggaggagagcctggctcagggccccccgctgttagccacttctgtcac

SEQ ID NO: 552 - DNA, 841 bp, Homo sapiens
  source 1..841: mol_type = unassigned DNA
acaaagagttggcagatcacggatggagggcagcatctcccaacagcctgggcggccgctgagacccagagaacccaaggactcccctgggctcatccagcagcctctgcttcccaggagagaggtgctgaagtccacgaagaggtggtgacttccaagagtgactccgtcggaggaaaatgactccccagtcgctgctgcagacgacactgttcctgctgagtctgctcttcctggtccaaggtgcccacggcaggggccacagggaagactttcgcttctgcagccagcggaaccagacacacaggagcagcctccactacaaacccacaccagacctgcgcatctccatcgagaactccgaagaggccctcacagtccatgcccctttccctgcagcccaccctgcttcccgatccttccctgaccccaggggcctctaccacttctgcctctactggaaccgacatgctgggagattacatcttctctatggcaagcgtgacttcttgctgagtgacaaagcctctagcctcctctgcttccagcaccaggaggagagcctggctcagggccccccgctgttagccacttctgtcacctcctggtggagccctcagaacatcagcctgcccagtgccgccagcttcaccttctccttccacagtcctccccacacggccgctcacaatgcctcggtggacatgtgcgagctcaaaagggacctccagctgctcagccagttcctgaagcatccccagaaggcctcaaggaggccctcggctgcccccgccagccattgcagagcctggagtcgaaactgacctctgtgagattcatg

SEQ ID NO: 553 - DNA, 548 bp, Homo sapiens
  source 1..548: mol_type = unassigned DNA
aaagagttggcagatcacggatggagggcagcatctcccaacagcctgggcggccgctgagacccagagaacccaaggactcccctgggctcatccagcagcctctgcttcccaggagagaggtgctgaagtccacgaagagggtctcgctctgtcacacaggctggagtgcagtggtgtgatcttggctcatcgtaacctccacctcccgggttcaagtgattctcatgcctcagcctcccgagtagctgggattacaggtggtgacttccaagagtgactccgtcggaggaaaatgactccccagtcgctgctgcagacgacactgttcctgctgagtctgctcttcctggtccaagccagcggaaccagacacacaggagcagcctccactacaaacccacaccagacctgcgcatctccatcgagaactccgaagaggccctcacagtccatgcccctttccctgcagcccaccctgcttcccgatccttccctgaccccaggggcctctaccacttctgcctctactggaaccgacatgctgg

SEQ ID NO: 554 - DNA, 3655 bp, Homo sapiens
  source 1..3655: mol_type = unassigned DNA
agatcacggatggagggcagcatctcccaacagcctgggcggccgctgagacccagagaacccaaggactcccctgggctcatccagcagcctctgcttcccaggagagaggtgctgaagtccacgaagaggtggtgacttccaagagtgactccgtcggaggaaaatgactccccagtcgctgctgcagacgacactgttcctgctgagtctgctcttcctggtccaaggcagcggaaccagacacacaggagcagcctccactacaaacccacaccagacctgcgcatctccatcgagaactccgaagaggccctcacagtccatgcccctttccctgcagcccaccctgcttcccgatccttccctgaccccaggggcctctaccacttctgcctctactggaaccgacatgctgggagattacatcttctctatggcaagcgtgacttcttgctgagtgacaaagcctctagcctcctctgcttccagcaccaggaggagagcctggctcagggccccccgctgttagccacttctgtcacctcctggtggagccctcagaacatcagcctgcccagtgccgccagcttcaccttctccttccacagtcctccccacacggccgctcacaatgcctcggtggacatgtgcgagctcaaaagggacctccagctgctcagccagttcctgaagcatccccagaaggcctcaaggaggccctcggctgcccccgccagccagcagttgcagagcctggagtcgaaactgacctctgtgagattcatgggggacatggtgtccttcgaggaggaccggatcaacgccacggtgtggaagctccagcccacagccggcctccaggacctgcacatccactcccggcaggaggaggagcagagcgagatcatggagtactcggtgctgctgcctcgaacactcttccagaggacgaaaggccggagcggggaggctgagaagagactcctcctggtggacttcagcagccaagccctgttccaggacaagaattccagccaagtcctgggtgagaaggtcttggggattgtggtacagaacaccaaagtagccaacctcacggagcccgtggtgctcactttccagcaccagctacagccgaagaatgtgactctgcaatgtgtgttctgggttgaagaccccacattgagcagcccggggcattggagcagtgctgggtgtgagaccgtcaggagagaaacccaaacatcctgcttctgcaaccacttgacctactttgcagtgctgatggtctcctcggtggaggtggacgccgtgcacaagcactacctgagcctcctctcctacgtgggctgtgtcgtctctgccctggcctgccttgtcaccattgccgcctacctctgctccagggtgcccctgccgtgcaggaggaaacctcgggactacaccatcaaggtgcacatgaacctgctgctggccgtcttcctgctggacacgagcttcctgctcagcgagccggtggccctgacaggctctgaggctggctgccgagccagtgccatcttcctgcacttctccctgctcacctgcctttcctggatgggcctcgaggggtacaacctctaccgactcgtggtggaggtctttggcacctatgtccctggctacctactcaagctgagcgccatgggctggggcttccccatctttctggtgacgctggtggccctggtggatgtggacaactatggccccatcatcttggctgtgcataggactccagagggcgtcatctacccttccatgtgctggatccgggactccctggtcagctacatcaccaacctgggcctcttcagcctggtgtttctgttcaacatggccatgctagccaccatggtggtgcagatcctgcggctgcgcccccacacccaaaagtggtcacatgtgctgacactgctgggcctcagcctggtccttggcctgccctgggccttgatcttcttctcctttgcttctggcaccttccagcttgtcgtcctctaccttttcagcatcatcacctccttccaaggcttcctcatcttcatctggtactggtccatgcggctgcaggcccggggtggcccctcccctctgaagagcaactcagacagcgccaggctccccatcagctcgggcagcacctcgtccagccgcatctaggcctccagcccacctgcccatgtgatgaagcagagattcggcctcgtcgcacactgcctgtggcccccgagcccggcccagccccaggccagtcagccgcagactttggaaagcccaacgaccatggagagatgggccgttgccatggtggacggactcccgggctgggcttttgaattggccttggggactactcggctctcactcagctcccacgggactcagaagtgcgccgccatgctgcctagggtactgtccccacatctgtcccaacccagctggaggcctggtctctccttacaacccctgggcccagccctcattgctgggggccaggccttggatcttgagggtctggcacatccttaatcctgtgcccctgcctgggacagaaatgtggctccagttgctctgtctctcgtggtcaccctgagggcactctgcatcctctgtcattttaacctcaggtggcacccagggcgaatggggcccagggcagaccttcagggccagagccctggcggaggagaggccctttgccaggagcacagcagcagctcgcctacctctgagcccaggccccctccctccctcagccccccagtcctccctccatcttccctggggttctcctcctctcccagggcctccttgctccttcgttcacagctgggggtccccgattccaatgctgttttttggggagtggtttccaggagctgcctggtgtctgctgtaaatgtttgtctactgcacaagcctcggcctgcccctgagccaggctcggtaccgatgcgtgggctgggctaggtccctctgtccatctgggcctttgtatgagctgcattgcccttgctcaccctgaccaagcacacgcctcagaggggccctcagcctctcctgaagccctcttgtggcaagaactgtggaccatgccagtcccgtctggtttccatcccaccactccaaggactgagactgacctcctctggtgacactggcctagggcctgacactctcctaagaggttctctccaagcccccaaatagctccaggcgccctcggccgcccatcatggttaattctgtccaacaaacacacacgggtagattgctggcctgttgtaggtggtagggacacagatgaccgacctggtcactcctcctgccaacattcagtctggtatgtgaggcgtgcgtgaagcaagaactcctggagctacagggacagggagccatcattcctgcctgggaatcctggaagacttcctgcaggagtcagcgttcaatcttgaccttgaagatgggaaggatgttctttttacgtaccaattcttttgtcttttgatattaaaaagaagtacatgttcattgtagagaatttggaaactgtagaagagaatcaagaagaaaaataaaaatcagctgttgtaatcacctagcaaactgg

SEQ ID NO: 555 - DNA, 3852 bp, Homo sapiens
  source 1..3852: mol_type = unassigned DNA
aacaagagagggtggcggctgcagtggctgtggggcagccggaaatggggcgagacagacaggcggagcctcacctggggctgcccgccagcccagacaagctcagactgggtgcctgtggccctgggaggaggtggaaggggaggagcaggccacacaggcacaggccggtgagggacctgcccagacctggagggtctcgctctgtcacacaggctggagtgcagtggtgtgatcttggctcatcgtaacctccacctcccgggttcaagtgattctcatgcctcagcctcccgagtagctgggattacaggtggtgacttccaagagtgactccgtcggaggaaaatgactccccagtcgctgctgcagacgacactgttcctgctgagtctgctcttcctggtccaaggtgcccacggcaggggccacagggaagactttcgcttctgcagccagcggaaccagacacacaggagcagcctccactacaaacccacaccagacctgcgcatctccatcgagaactccgaagaggccctcacagtccatgcccctttccctgcagcccaccctgcttcccgatccttccctgaccccaggggcctctaccacttctgcctctactggaaccgacatgctgggagattacatcttctctatggcaagcgtgacttcttgctgagtgacaaagcctctagcctcctctgcttccagcaccaggaggagagcctggctcagggccccccgctgttagccacttctgtcacctcctggtggagccctcagaacatcagcctgcccagtgccgccagcttcaccttctccttccacagtcctccccacacggccgctcacaatgcctcggtggacatgtgcgagctcaaaagggacctccagctgctcagccagttcctgaagcatccccagaaggcctcaaggaggccctcggctgcccccgccagccagcagttgcagagcctggagtcgaaactgacctctgtgagattcatgggggacatggtgtccttcgaggaggaccggatcaacgccacggtgtggaagctccagcccacagccggcctccaggacctgcacatccactcccggcaggaggaggagcagagcgagatcatggagtactcggtgctgctgcctcgaacactcttccagaggacgaaaggccggagcggggaggctgagaagagactcctcctggtggacttcagcagccaagccctgttccaggacaagaattccagccaagtcctgggtgagaaggtcttggggattgtggtacagaacaccaaagtagccaacctcacggagcccgtggtgctcactttccagcaccagctacagccgaagaatgtgactctgcaatgtgtgttctgggttgaagaccccacattgagcagcccggggcattggagcagtgctgggtgtgagaccgtcaggagagaaacccaaacatcctgcttctgcaaccacttgacctactttgcagtgctgatggtctcctcggtggaggtggacgccgtgcacaagcactacctgagcctcctctcctacgtgggctgtgtcgtctctgccctggcctgccttgtcaccattgccgcctacctctgctccaggaggaaacctcgggactacaccatcaaggtgcacatgaacctgctgctggccgtcttcctgctggacacgagcttcctgctcagcgagccggtggccctgacaggctctgaggctggctgccgagccagtgccatcttcctgcacttctccctgctcacctgcctttcctggatgggcctcgaggggtacaacctctaccgactcgtggtggaggtctttggcacctatgtccctggctacctactcaagctgagcgccatgggctggggcttccccatctttctggtgacgctggtggccctggtggatgtggacaactatggccccatcatcttggctgtgcataggactccagagggcgtcatctacccttccatgtgctggatccgggactccctggtcagctacatcaccaacctgggcctcttcagcctggtgtttctgttcaacatggccatgctagccaccatggtggtgcagatcctgcggctgcgcccccacacccaaaagtggtcacatgtgctgacactgctgggcctcagcctggtccttggcctgccctgggccttgatcttcttctcctttgcttctggcaccttccagcttgtcgtcctctaccttttcagcatcatcacctccttccaaggcttcctcatcttcatctggtactggtccatgcggctgcaggcccggggtggcccctcccctctgaagagcaactcagacagcgccaggctccccatcagctcgggcagcacctcgtccagccgcatctaggcctccagcccacctgcccatgtgatgaagcagagattcggcctcgtcgcacactgcctgtggcccccgagcccggcccagccccaggccagtcagccgcagactttggaaagcccaacgaccatggagagatgggccgttgccatggtggacggactcccgggctgggcttttgaattggccttggggactactcggctctcactcagctcccacgggactcagaagtgcgccgccatgctgcctagggtactgtccccacatctgtcccaacccagctggaggcctggtctctccttacaacccctgggcccagccctcattgctgggggccaggccttggatcttgagggtctggcacatccttaatcctgtgcccctgcctgggacagaaatgtggctccagttgctctgtctctcgtggtcaccctgagggcactctgcatcctctgtcattttaacctcaggtggcacccagggcgaatggggcccagggcagaccttcagggccagagccctggcggaggagaggccctttgccaggagcacagcagcagctcgcctacctctgagcccaggccccctccctccctcagccccccagtcctccctccatcttccctggggttctcctcctctcccagggcctccttgctccttcgttcacagctgggggtccccgattccaatgctgttttttggggagtggtttccaggagctgcctggtgtctgctgtaaatgtttgtctactgcacaagcctcggcctgcccctgagccaggctcggtaccgatgcgtgggctgggctaggtccctctgtccatctgggcctttgtatgagctgcattgcccttgctcaccctgaccaagcacacgcctcagaggggccctcagcctctcctgaagccctcttgtggcaagaactgtggaccatgccagtcccgtctggtttccatcccaccactccaaggactgagactgacctcctctggtgacactggcctagggcctgacactctcctaagaggttctctccaagcccccaaatagctccaggcgccctcggccgcccatcatggttaattctgtccaacaaacacacacgggtagattgctggcctgttgtaggtggtagggacacagatgaccgacctggtcactcctcctgccaacattcagtctggtatgtgaggcgtgcgtgaagcaagaactcctggagctacagggacagggagccatcattcctgcctgggaatcctggaagacttcctgcaggagtcagcgttcaatcttgaccttgaagatgggaaggatgttctttttacgtaccaattcttttgtcttttgatattaaaaagaagtacatgttcattgtagagaatttggaaactgtagaagagaatcaagaagaaaaataaaaatcagctgttgtaatcacct

SEQ ID NO: 556 - DNA, 4254 bp, Homo sapiens
  source 1..4254: mol_type = unassigned DNA
agacaggcggagcctcacctggggctgcccgccagcccagacaagctcagactgggtgcctgtggccctgggaggaggtggaaggggaggagcaggccacacaggcacaggccggtgagggacctgcccagacctggaggtggtgacttccaagagtgactccgtcggaggaaaatgactccccagtcgctgctgcagacgacactgttcctgctgagtctgctcttcctggtccaaggtgcccacggcaggggccacagggaagactttcgcttctgcagccagcggaaccagacacacaggagcagcctccactacaaacccacaccagacctgcgcatctccatcgagaactccgaagaggccctcacagtccatgcccctttccctgcagcccaccctgcttcccgatccttccctgaccccaggggcctctaccacttctgcctctactggaaccgacatgctgggagattacatcttctctatggcaagcgtgacttcttgctgagtgacaaagcctctagcctcctctgcttccagcaccaggaggagagcctggctcagggccccccgctgttagccacttctgtcacctcctggtggagccctcagaacatcagcctgcccagtgccgccagcttcaccttctccttccacagtcctccccacacggccgctcacaatgcctcggtggacatgtgcgagctcaaaagggacctccagctgctcagccagttcctgaagcatccccagaaggcctcaaggaggccctcggctgcccccgccagccagcagttgcagagcctggagtcgaaactgacctctgtgagattcatgggggacatggtgtccttcgaggaggaccggatcaacgccacggtgtggaagctccagcccacagccggcctccaggacctgcacatccactcccggcaggaggaggagcagagcgagatcatggagtactcggtgctgctgcctcgaacactcttccagaggacgaaaggccggagcggggaggctgagaagagactcctcctggtggacttcagcagccaagccctgttccaggacaagaattccagccaagtcctgggtgagaaggtcttggggattgtggtacagaacaccaaagtagccaacctcacggagcccgtggtgctcactttccagcaccagctacagccgaagaatgtgactctgcaatgtgtgttctgggttgaagaccccacattgagcagcccggggcattggagcagtgctgggtgtgagaccgtcaggagagaaacccaaacatcctgcttctgcaaccacttgacctactttgcagtgctgatggtctcctcggtggaggtggacgccgtgcacaagcactacctgagcctcctctcctacgtgggctgtgtcgtctctgccctggcctgccttgtcaccattgccgcctacctctgctccagggtgcccctgccgtgcaggaggaaacctcgggactacaccatcaaggtgcacatgaacctgctgctggccgtcttcctgctggacacgagcttcctgctcagcgagccggtggccctgacaggctctgaggctggctgccgagccagtgccatcttcctgcacttctccctgctcacctgcctttcctggatgggcctcgaggggtacaacctctaccgactcgtggtggaggtctttggcacctatgtccctggctacctactcaagctgagcgccatgggctggggcttccccatctttctggtgacgctggtggccctggtggatgtggacaactatggccccatcatcttggctgtgcataggactccagagggcgtcatctacccttccatgtgctggatccgggactccctggtcagctacatcaccaacctgggcctcttcagcctggtgtttctgttcaacatggccatgctagccaccatggtggtgcagatcctgcggctgcgcccccacacccaaaagtggtcacatgtgctgacactgctgggcctcagcctggtccttggcctgccctgggccttgatcttcttctcctttgcttctggcaccttccagcttgtcgtcctctaccttttcagcatcatcacctccttccaaggcttcctcatcttcatctggtactggtccatgcggctgcaggcccggggtggcccctcccctctgaagagcaactcagacagcgccaggctccccatcagctcgggcagcacctcgtccagccgcatctaggcctccagcccacctgcccatgtgatgaagcagagattcggcctcgtcgcacactgcctgtggcccccgagcccggcccagccccaggccagtcagccgcagactttggaaagcccaacgaccatggagagatgggccgttgccatggtggacggactcccgggctgggcttttgaattggccttggggactactcggctctcactcagctcccacgggactcagaagtgcgccgccatgctgcctagggtactgtccccacatctgtcccaacccagctggaggcctggtctctccttacaacccctgggcccagccctcattgctgggggccaggccttggatcttgagggtctggcacatccttaatcctgtgcccctgcctgggacagaaatgtggctccagttgctctgtctctcgtggtcaccctgagggcactctgcatcctctgtcattttaacctcaggtggcacccagggcgaatggggcccagggcagaccttcagggccagagccctggcggaggagaggccctttgccaggagcacagcagcagctcgcctacctctgagcccaggccccctccctccctcagccccccagtcctccctccatcttccctggggttctcctcctctcccagggcctccttgctccttcgttcacagctgggggtccccgattccaatgctgttttttggggagtggtttccaggagctgcctggtgtctgctgtaaatgtttgtctactgcacaagcctcggcctgcccctgagccaggctcggtaccgatgcgtgggctgggctaggtccctctgtccatctgggcctttgtatgagctgcattgcccttgctcaccctgaccaagcacacgcctcagaggggccctcagcctctcctgaagccctcttgtggcaagaactgtggaccatgccagtcccgtctggtttccatcccaccactccaaggactgagactgacctcctctggtgacactggcctagggcctgacactctcctaagaggttctctccaagcccccaaatagctccaggcgccctcggccgcccatcatggttaattctgtccaacaaacacacacgggtagattgctggcctgttgtaggtggtagggacacagatgaccgacctggtcactcctcctgccaacattcagtctggtatgtgaggcgtgcgtgaagcaagaactcctggagctacagggacagggagccatcattcctgcctgggaatcctggaagacttcctgcaggagtcagcgttcaatcttgaccttgaagatgggaaggatgttctttttacgtaccaattcttttgtcttttgatattaaaaagaagtacatgttcattgtagagaatttggaaactgtagaagagaatcaagaagaaaaataaaaatcagctgttgtaatcacctagcaaactggcgtaagcattttgggtcatttccttctgagctttttcctgtgcttctattgaaagagtcactgatactaatacaaataccttggggccaatcaggaaacatgaaagagagaagagggctgtgtgtgaagaaaaaaaaaaaatcgactgctggaaacctcatcaaccagggcacaggggaagataaatggcaacttggtgtctgtgctggggaggcaatggggagtggtggggcctgtggcgaactggagactcccaaccccatgctgagagcgtggctgctcatcagctccagctggtcactaccttgcagggatgagggcccatgtagccagaccacctgccttttatgagaaatgggaaatccagactgtggtttgacatcccctgattttaaaattttggcgaatccaaaacattttctggccaaagagattacagtcaaaagctgcctggtcctgggatttatgcaaccagtttactgatcactctgcagcaggtgggctgcaagaattaaatcactggacttctctcccatccctgcctttaa

SEQ ID NO: 557 - DNA, 555 bp, Homo sapiens
  source 1..555: mol_type = unassigned DNA
cagactgggtgcctgtggccctgggaggaggtggaaggggaggagcaggccacacaggcacaggccggtgagggacctgcccagacctggagggtctcgctctgtcacacaggctggagtgcagtggtgtgatcttggctcatcgtaacctccacctcccgggttcaagtgattctcatgcctcagcctcccgagtagctgggattacaggtggtgacttccaagagtgactccgtcggaggaaaatgactccccagtcgctgctgcagacgacactgttcctgctgagtctgctcttcctggtccaagcctctgcctcctcaggtgcccacggcaggggccacagggaagactttcgcttctgcagccagcggaaccagacacacaggagcagcctccactacaaacccacaccagacctgcgcatctccatcgagaactccgaagaggccctcacagtccatgcccctttccctgcagcccaccctgcttcccgatccttccctgaccccaggggcctctaccacttctgcctctactggaaccgacatgctg

SEQ ID NO: 558 - DNA, 533 bp, Homo sapiens
  source 1..533: mol_type = unassigned DNA
agactgggtgcctgtggccctgggaggaggtggaaggggaggagcaggccacacaggcacaggccggtgagggacctgcccagacctggagggtctcgctctgtcacacaggctggagtgcagtggtgtgatcttggctcatcgtaacctccacctcccgggttcaagtgattctcatgcctcagcctcccgagtagctgggattacaggtggtgacttccaagagtgactccgtcggaggaaaatgactccccagtcgctgctgcagacgacactgttcctgctgagtctgctcttcctggtccaagccagcggaaccagacacacaggagcagcctccactacaaacccacaccagacctgcgcatctccatcgagaactccgaagaggccctcacagtccatgcccctttccctgcagcccaccctgcttcccgatccttccctgaccccaggggcctctaccacttctgcctctactggaaccgacatgctgggagattacatcttctctatggcaagcgtgacttctt

SEQ ID NO: 559 - DNA, 534 bp, Homo sapiens
  source 1..534: mol_type = unassigned DNA
agactgggtgcctgtggccctgggaggaggtggaaggggaggagcaggccacacaggcacaggccggtgagggacctgcccagacctggaggtggtgacttccaagagtgactccgtcggaggaaaatgactccccagtcgctgctgcagacgacactgttcctgctgagtctgctcttcctggtccaagccagcggaaccagacacacaggagcagcctccactacaaacccacaccagacctgcgcatctccatcgagaactccgaagaggccctcacagtccatgcccctttccctgcagcccaccctgcttcccgatccttccctgaccccaggggcctctaccacttctgcctctactggaaccgacatgctgggagattacatcttctctatggcaagcgtgacttcttgctgagtgacaaagcctctagcctcctctgcttccagcaccaggaggagagcctggctcagggccccccgctgttagccacttctgtcacctcctggtggagccctcagaacatcagcc

SEQ ID NO: 560 - DNA, 1016 bp, Homo sapiens
  source 1..1016: mol_type = unassigned DNA
agactgggtgcctgtggccctgggaggaggtggaaggggaggagcaggccacacaggcacaggccggtgagggacctgcccagacctggagacagggtctcgctctgtcacacaggctggagtgcagtggtgtgatcttggctcatcgtaacctccacctcccgggttcaagtgattctcatgcctcagcctcccgagtagctgggattacaggtggtgacttccaagagtgactccgtcggaggaaaatgactccccagtcgctgctgcagacgacactgttcctgctgagtctgctcttcctggtccaaggtgcccacggcaggggccacagggaagactttcgcttctgcagccagcggaaccagacacacaggagcagcctccactacaaacccacaccagacctgcgcatctccatcgagaactccgaagaggccctcacagtccatgcccctttccctgcagcccaccctgcttcccgatccttccctgaccccaggggcctctaccacttctgcctctactggaaccgacatgctgggagattacatcttctctatggcaagcgtgacttcttgctgagtgacaaagcctctagcctcctctgcttccagcaccaggaggagagcctggctcagggccccccgctgttagccacttctgtcacctcctggtggagccctcagaacatcagcctgcccagtgccgccagcttcaccttctccttccacagtcctccccacacggccgctcacaatgcctcggtggacatgtgcgagctcaaaagggacctccagctgctcagccagttcctgaagcatccccagaaggcctcaaggaggccctcggctgcccccgccagccagcagttgcagagcctggagtcgaaactgacctctgtgagattcatgggggacatggtgtccttcgaggaggaccggatcaacgccacggtgtggaagctccagcccacagccggcctccaggacctgcacatccactcccggcaggag

SEQ ID NO: 561 - DNA, 3741 bp, Homo sapiens
  source 1..3741: mol_type = unassigned DNA
ggaaggggaggagcaggccacacaggcacaggccggtgagggacctgcccagacctggagggtctcgctctgtcacacaggctggagtgcagtggtgtgatcttggctcatcgtaacctccacctcccgggttcaagtgattctcatgcctcagcctcccgagtagctgggattacaggtggtgacttccaagagtgactccgtcggaggaaaatgactccccagtcgctgctgcagacgacactgttcctgctgagtctgctcttcctggtccaaggtgcccacggcaggggccacagggaagactttcgcttctgcagccagcggaaccagacacacaggagcagcctccactacaaacccacaccagacctgcgcatctccatcgagaactccgaagaggccctcacagtccatgcccctttccctgcagcccaccctgcttcccgatccttccctgaccccaggggcctctaccacttctgcctctactggaaccgacatgctgggagattacatcttctctatggcaagcgtgacttcttgctgagtgacaaagcctctagcctcctctgcttccagcaccaggaggagagcctggctcagggccccccgctgttagccacttctgtcacctcctggtggagccctcagaacatcagcctgcccagtgccgccagcttcaccttctccttccacagtcctccccacacggccgctcacaatgcctcggtggacatgtgcgagctcaaaagggacctccagctgctcagccagttcctgaagcatccccagaaggcctcaaggaggccctcggctgcccccgccagccagcagttgcagagcctggagtcgaaactgacctctgtgagattcatgggggacatggtgtccttcgaggaggaccggatcaacgccacggtgtggaagctccagcccacagccggcctccaggacctgcacatccactcccggcaggaggaggagcagagcgagatcatggagtactcggtgctgctgcctcgaacactcttccagaggacgaaaggccggagcggggaggctgagaagagactcctcctggtggacttcagcagccaagccctgttccaggacaagaattccagccaagtcctgggtgagaaggtcttggggattgtggtacagaacaccaaagtagccaacctcacggagcccgtggtgctcactttccagcaccagctacagccgaagaatgtgactctgcaatgtgtgttctgggttgaagaccccacattgagcagcccggggcattggagcagtgctgggtgtgagaccgtcaggagagaaacccaaacatcctgcttctgcaaccacttgacctactttgcagtgctgatggtctcctcggtggaggtggacgccgtgcacaagcactacctgagcctcctctcctacgtgggctgtgtcgtctctgccctggcctgccttgtcaccattgccgcctacctctgctccagggtgcccctgccgtgcaggaggaaacctcgggactacaccatcaaggtgcacatgaacctgctgctggccgtcttcctgctggacacgagcttcctgctcagcgagccggtggccctgacaggctctgaggctggctgccgagccagtgccatcttcctgcacttctccctgctcacctgcctttcctggatgggcctcgaggggtacaacctctaccgactcgtggtggaggtctttggcacctatgtccctggctacctactcaagctgagcgccatgggctggggcttccccatctttctggtgacgctggtggccctggtggatgtggacaactatggccccatcatcttggctgtgcataggactccagagggcgtcatctacccttccatgtgctggatccgggactccctggtcagctacatcaccaacctgggcctcttcagcctggtgtttctgttcaacatggccatgctagccaccatggtggtgcagatcctgcggctgcgcccccacacccaaaagtggtcacatgtgctgacactgctgggcctcagcctggtccttggcctgccctgggccttgatcttcttctcctttgcttctggcaccttccagcttgtcgtcctctaccttttcagcatcatcacctccttccaaggcttcctcatcttcatctggtactggtccatgcggctgcaggcccggggtggcccctcccctctgaagagcaactcagacagcgccaggctccccatcagctcgggcagcacctcgtccagccgcatctaggcctccagcccacctgcccatgtgatgaagcagagattcggcctcgtcgcacactgcctgtggcccccgagcccggcccagccccaggccagtcagccgcagactttggaaagcccaacgaccatggagagatgggccgttgccatggtggacggactcccgggctgggcttttgaattggccttggggactactcggctctcactcagctcccacgggactcagaagtgcgccgccatgctgcctagggtactgtccccacatctgtcccaacccagctggaggcctggtctctccttacaacccctgggcccagccctcattgctgggggccaggccttggatcttgagggtctggcacatccttaatcctgtgcccctgcctgggacagaaatgtggctccagttgctctgtctctcgtggtcaccctgagggcactctgcatcctctgtcattttaacctcaggtggcacccagggcgaatggggcccagggcagaccttcagggccagagccctggcggaggagaggccctttgccaggagcacagcagcagctcgcctacctctgagcccaggccccctccctccctcagccccccagtcctccctccatcttccctggggttctcctcctctcccagggcctccttgctccttcgttcacagctgggggtccccgattccaatgctgttttttggggagtggtttccaggagctgcctggtgtctgctgtaaatgtttgtctactgcacaagcctcggcctgcccctgagccaggctcggtaccgatgcgtgggctgggctaggtccctctgtccatctgggcctttgtatgagctgcattgcccttgctcaccctgaccaagcacacgcctcagaggggccctcagcctctcctgaagccctcttgtggcaagaactgtggaccatgccagtcccgtctggtttccatcccaccactccaaggactgagactgacctcctctggtgacactggcctagggcctgacactctcctaagaggttctctccaagcccccaaatagctccaggcgccctcggccgcccatcatggttaattctgtccaacaaacacacacgggtagattgctggcctgttgtaggtggtagggacacagatgaccgacctggtcactcctcctgccaacattcagtctggtatgtgaggcgtgcgtgaagcaagaactcctggagctacagggacagggagccatcattcctgcctgggaatcctggaagacttcctgcaggagtcagcgttcaatcttgaccttgaagatgggaaggatgttctttttacgtaccaattcttttgtcttttgatattaaaaagaagtacatgttcattgtagagaatttggaaactgtagaagagaatcaagaagaaaaataaaaatcagctgttgtaatcacctagcaaa

SEQ ID NO: 562 - DNA, 563 bp, Homo sapiens
  source 1..563: mol_type = unassigned DNA
acacaggcacaggccggtgagggacctgcccagacctggaggagcgacgatgcctcactgcctgaccagaggcacctgacaccaggcctggcatccgagcagctgccactcagacctcacaggccagggccaagggagctgctgatgcaagaggcacaattttaggggcaagagcagcaagtaggatggtcttgaggtggtgacttccaagagtgactccgtcggaggaaaatgactccccagtcgctgctgcagacgacactgttcctgctgagtctgctcttcctggtccaaggtgcccacggcaggggccacagggaagactttcgcttctgcagccagcggaaccagacacacaggagcagcctccactacaaacccacaccagacctgcgcatctccatcgagaactccgaagaggccctcacagtccatgcccctttccctgcagcccaccctgcttcccgatccttccctgaccccaggggcctctaccacttctgcctctactggaaccgacatgctgggagattacatcttctctatggcaagcgtgacttctt

SEQ ID NO: 563 - DNA, 571 bp, Homo sapiens
  source 1..571: mol_type = unassigned DNA
acacaggcacaggccggtgagggacctgcccagacctggagggtctcgctctgtcacacaggctggagtgcagtggtgtgatcttggctcatcgtaacctccacctcccgggttcaagtgattctcatgcctcagcctcccgagtagctgggattacaggtggtgacttccaagagtgactccgtcggaggaaaatgactccccagtcgctgctgcagacgacactgttcctgctgagtctgctcttcctggtccaagcctctgcctcctcaggtgcccacggcaggggccacagggaagactttcgcttctgcagccagcggaaccagacacacaggagcagcctccactacaaacccacaccagacctgcgcatctccatcgagaactccgaagaggccctcacagtccatgcccctttccctgcagcccaccctgcttcccgatccttccctgaccccaggggcctctaccacttctgcctctactggaaccgacatgctgggagattacatcttctctatggcaagcgtgacttcttgctgagtgacaaagcctctagcctcctctg

SEQ ID NO: 564 - DNA, 507 bp, Homo sapiens
  source 1..507: mol_type = unassigned DNA
acaggccggtgagggacctgcccagacctggaggtggtgacttccaagagtgactccgtcggaggaaaatgactccccagtcgctgctgcagacgacactgttcctgctgagtctgctcttcctggtccaagcctctgcctcctcaggtgcccacggcaggggccacagggaagactttcgcttctgcagccagcggaaccagacacacaggagcagcctccactacaaacccacaccagacctgcgcatctccatcgagaactccgaagaggccctcacagtccatgcccctttccctgcagcccaccctgcttcccgatccttccctgaccccaggggcctctaccacttctgcctctactggaaccgacatgctgggagattacatcttctctatggcaagcgtgacttcttgctgagtgacaaagcctctagcctcctctgcttccagcaccaggaggagagcctggctcagggccccccgctgttagccacttctgtcacct

SEQ ID NO: 565 - DNA, 937 bp, Homo sapiens
  source 1..937: mol_type = unassigned DNA
gcttgtcttctctgggccaggcccctccatggtggctgaggactctttggaacagggaactgtcgtggaagaaagggcccggccctgccactgcctcctgtgggaccctgggccaggctcccctgctgtccaggcctgtttccctgtctgttccatgaaggagaggcaggggcagtggtctgtaaacccataagctgcagcagtaggcccctcccctggtctcatgggccacacacgccagccagccagagctcttcattttaccaagagagaagtggtggcagtcctggtgtccagggtctcgctctgtcacacaggctggagtgcagtggtgtgatcttggctcatcgtaacctccacctcccgggttcaagtgattctcatgcctcagcctcccgagtagctgggattacaggtggtgacttccaagagtgactccgtcggaggaaaatgactccccagtcgctgctgcagacgacactgttcctgctgagtctgctcttcctggtccaaggtgcccacggcaggggccacagggaagactttcgcttctgcagccagcggaaccagacacacaggagcagcctccactacaaacccacaccagacctgcgcatctccatcgagaactccgaagaggccctcacagtccatgcccctttccctgcagcccaccctgcttcccgatccttccctgaccccaggggcctctaccacttctgcctctactggaaccgacatgctgggagattacatcttctctatggcaagcgtgacttcttgctgagtgacaaagcctctagcctcctctgcttccagcaccaggaggagagcctggctcagggccccccgctgttagccacttctgtcacctcctggtggagccctcagaacatcagcctgcccagtgccgccagcttcaccttctccttccaca

SEQ ID NO: 566 - DNA, 451 bp, Homo sapiens
  source 1..451: mol_type = unassigned DNA
agtttcaactgcagctcttcattttaccaagagagaagtggtggcagtcctggtgtccaggtggtgacttccaagagtgactccgtcggaggaaaatgactccccagtcgctgctgcagacgacactgttcctgctgagtctgctcttcctggtccaaggtgcccacggcaggggccacagggaagactttcgcttctgcagccagcggaaccagacacacaggagcagcctccactacaaacccacaccagacctgcgcatctccatcgagaactccgaagaggccctcacagtccatgcccctttccctgcagcccaccctgcttcccgatccttccctgaccccaggggcctctaccacttctgcctctactggaaccgacatgctgggagattacatcttctctatggcaagcgtgacttcttgctgagtgacaaagcctctagcct

SEQ ID NO: 567 - DNA, 567 bp, Homo sapiens
  source 1..567: mol_type = unassigned DNA
aatcatctatcctcattgctcggaggaggagggcagacaggagcctctgcagggagtggtctcgctctgtcacacaggctggagtgcagtggtgtgatcttggctcatcgtaacctccacctcccgggttcaagtgattctcatgcctcagcctcccgagtagctgggattacaggtggtgacttccaagagtgactccgtcggaggaaaatgactccccagtcgctgctgcagacgacactgttcctgctgagtctgctcttcctggtccaaggtgcccacggcaggggccacagggaagactttcgcttctgcagccagcggaaccagacacacaggagcagcctccactacaaacccacaccagacctgcgcatctccatcgagaactccgaagaggccctcacagtccatgcccctttccctgcagcccaccctgcttcccgatccttccctgaccccaggggcctctaccacttctgcctctactggaaccgacatgctgggagattacatcttctctatggcaagcgtgacttcttgctgagtgacaaagcctctagcctc

SEQ ID NO: 568 - DNA, 594 bp, Homo sapiens
  source 1..594: mol_type = unassigned DNA
aatcatctatcctcattgctcggaggaggagggcagacaggagcctctgcagggagtgtggtgacttccaagagtgactccgtcggaggaaaatgactccccagtcgctgctgcagacgacactgttcctgctgagtctgctcttcctggtccaaggtgcccacggcaggggccacagggaagactttcgcttctgcagccagcggaaccagacacacaggagcagcctccactacaaacccacaccagacctgcgcatctccatcgagaactccgaagaggccctcacagtccatgcccctttccctgcagcccaccctgcttcccgatccttccctgaccccaggggcctctaccacttctgcctctactggaaccgacatgctgggagattacatcttctctatggcaagcgtgacttcttgctgagtgacaaagcctctagcctcctctgcttccagcaccaggaggagagcctggctcagggccccccgctgttagccacttctgtcacctcctggtggagccctcagaacatcagcctgcccagtgccgccagcttcaccttctccttccacagtcctccccacacgg

SEQ ID NO: 569 - DNA, 487 bp, Homo sapiens
  source 1..487: mol_type = unassigned DNA
agttgtcgccctgacctggggggtgggcggacagcatccaagggccctgttgccgtggcaaccccggcctctctgtgggaactttggggagactggccctgggaggcgacagatggaggctgaggaagcagagtgatccccggccccttcctgtccctgaacactgtctgcctggatgaggggagatgggctgggagcctcccacgctctccagctcactcggcaggcagcggggaccagggctggcaggttaagcctctgggggtggatcctgaaaggtggtccagccgcctggccctgcgtgggaccctccacctggcagcaggtggtgacttccaagagtgactccgtcggaggaaaatgactccccagtcgctgctgcagacgacactgttcctgctgagtctgctcttcctggtccaaggtgcccacggcaggggccacagggaagactttcgcttctgcagccagcggaaccagacacaca

SEQ ID NO: 570 - DNA, 622 bp, Homo sapiens
  source 1..622: mol_type = unassigned DNA
gtgggaactttggggagactggccctgggaggcgacagatggaggctgaggaagcagagtgatccccggccccttcctgtccctgaacactgtctgcctggatgaggggtggtgacttccaagagtgactccgtcggaggaaaatgactccccagtcgctgctgcagacgacactgttcctgctgagtctgctcttcctggtccaaggtgcccacggcaggggccacagggaagactttcgcttctgcagccagcggaaccagacacacaggagcagcctccactacaaacccacaccagacctgcgcatctccatcgagaactccgaagaggccctcacagtccatgcccctttccctgcagcccaccctgcttcccgatccttccctgaccccaggggcctctaccacttctgcctctactggaaccgacatgctgggagattacatcttctctatggcaagcgtgacttcttgctgagtgacaaagcctctagcctcctctgcttccagcaccaggaggagagcctggctcagggccccccgctgttagccacttctgtcacctcctggtggagccctcagaacatcagcctgcccagtgccgccagcttcaccttctc

SEQ ID NO: 571 - DNA, 536 bp, Homo sapiens
  source 1..536: mol_type = unassigned DNA
gaactttggggagactggccctgggaggcgacagatggaggctgaggaagcagagtgatccccggccccttcctgtccctgaacactgtctgcctggatgaggggtgaggctgaggtgcccccttgcccggcgctgagtcatgggcatcccccaggatcactgcctcagcgctctcagccctgccccctcctggtctccctctgagaaatccatgactcacatatatcgtccgtcatccccagtcaagctcagggaggagggaggagcccagctggggcaggagaggggtgtctccccaccaaacaaacccggtccctccctctccgcactagctgtctgccctgccctgccgtaggagatgggctgggagcctcccacgctctccagctcactcggcaggcagcggggaccagggctggcaggttaagcctctgggggtggatcctgaaaggtggtccagccgcctggccctgcgtgggaccctccacctggcagcagggtctcgctctgtcacacaggctggagtgcagtggtg

SEQ ID NO: 572 - DNA, 4042 bp, Homo sapiens
  source 1..4042: mol_type = unassigned DNA
actttggggagactggccctgggaggcgacagatggaggctgaggaagcagagtgatccccggccccttcctgtccctgaacactgtctgcctggatgaggggtgaggctgaggtgcccccttgcccggcgctgagtcatgggcatcccccaggatcactgcctcagcgctctcagccctgccccctcctggtctccctctgagaaatccatgactcacatatatcgtccgtcatccccagtcaagctcagggaggagggaggagcccagctggggcaggagaggggtgtctccccaccaaacaaacccggtccctccctctccgcactagctgtctgccctgccctgccgtaggagatgggctgggagcctcccacgctctccagctcactcggcaggcagcggggaccagggctggcaggttaagcctctgggggtggatcctgaaaggtggtccagccgcctggccctgcgtgggaccctccacctggcagcaggtggtgacttccaagagtgactccgtcggaggaaaatgactccccagtcgctgctgcagacgacactgttcctgctgagtctgctcttcctggtccaaggtgcccacggcaggggccacagggaagactttcgcttctgcagccagcggaaccagacacacaggagcagcctccactacaaacccacaccagacctgcgcatctccatcgagaactccgaagaggccctcacagtccatgcccctttccctgcagcccaccctgcttcccgatccttccctgaccccaggggcctctaccacttctgcctctactggaaccgacatgctgggagattacatcttctctatggcaagcgtgacttcttgctgagtgacaaagcctctagcctcctctgcttccagcaccaggaggagagcctggctcagggccccccgctgttagccacttctgtcacctcctggtggagccctcagaacatcagcctgcccagtgccgccagcttcaccttctccttccacagtcctccccacacggccgctcacaatgcctcggtggacatgtgcgagctcaaaagggacctccagctgctcagccagttcctgaagcatccccagaaggcctcaaggaggccctcggctgcccccgccagccagcagttgcagagcctggagtcgaaactgacctctgtgagattcatgggggacatggtgtccttcgaggaggaccggatcaacgccacggtgtggaagctccagcccacagccggcctccaggacctgcacatccactcccggcaggaggaggagcagagcgagatcatggagtactcggtgctgctgcctcgaacactcttccagaggacgaaaggccggagcggggaggctgagaagagactcctcctggtggacttcagcagccaagccctgttccaggacaagaattccagccaagtcctgggtgagaaggtcttggggattgtggtacagaacaccaaagtagccaacctcacggagcccgtggtgctcactttccagcaccagctacagccgaagaatgtgactctgcaatgtgtgttctgggttgaagaccccacattgagcagcccggggcattggagcagtgctgggtgtgagaccgtcaggagagaaacccaaacatcctgcttctgcaaccacttgacctactttgcagtgctgatggtctcctcggtggaggtggacgccgtgcacaagcactacctgagcctcctctcctacgtgggctgtgtcgtctctgccctggcctgccttgtcaccattgccgcctacctctgctccaggaggaaacctcgggactacaccatcaaggtgcacatgaacctgctgctggccgtcttcctgctggacacgagcttcctgctcagcgagccggtggccctgacaggctctgaggctggctgccgagccagtgccatcttcctgcacttctccctgctcacctgcctttcctggatgggcctcgaggggtacaacctctaccgactcgtggtggaggtctttggcacctatgtccctggctacctactcaagctgagcgccatgggctggggcttccccatctttctggtgacgctggtggccctggtggatgtggacaactatggccccatcatcttggctgtgcataggactccagagggcgtcatctacccttccatgtgctggatccgggactccctggtcagctacatcaccaacctgggcctcttcagcctggtgtttctgttcaacatggccatgctagccaccatggtggtgcagatcctgcggctgcgcccccacacccaaaagtggtcacatgtgctgacactgctgggcctcagcctggtccttggcctgccctgggccttgatcttcttctcctttgcttctggcaccttccagcttgtcgtcctctaccttttcagcatcatcacctccttccaaggcttcctcatcttcatctggtactggtccatgcggctgcaggcccggggtggcccctcccctctgaagagcaactcagacagcgccaggctccccatcagctcgggcagcacctcgtccagccgcatctaggcctccagcccacctgcccatgtgatgaagcagagattcggcctcgtcgcacactgcctgtggcccccgagcccggcccagccccaggccagtcagccgcagactttggaaagcccaacgaccatggagagatgggccgttgccatggtggacggactcccgggctgggcttttgaattggccttggggactactcggctctcactcagctcccacgggactcagaagtgcgccgccatgctgcctagggtactgtccccacatctgtcccaacccagctggaggcctggtctctccttacaacccctgggcccagccctcattgctgggggccaggccttggatcttgagggtctggcacatccttaatcctgtgcccctgcctgggacagaaatgtggctccagttgctctgtctctcgtggtcaccctgagggcactctgcatcctctgtcattttaacctcaggtggcacccagggcgaatggggcccagggcagaccttcagggccagagccctggcggaggagaggccctttgccaggagcacagcagcagctcgcctacctctgagcccaggccccctccctccctcagccccccagtcctccctccatcttccctggggttctcctcctctcccagggcctccttgctccttcgttcacagctgggggtccccgattccaatgctgttttttggggagtggtttccaggagctgcctggtgtctgctgtaaatgtttgtctactgcacaagcctcggcctgcccctgagccaggctcggtaccgatgcgtgggctgggctaggtccctctgtccatctgggcctttgtatgagctgcattgcccttgctcaccctgaccaagcacacgcctcagaggggccctcagcctctcctgaagccctcttgtggcaagaactgtggaccatgccagtcccgtctggtttccatcccaccactccaaggactgagactgacctcctctggtgacactggcctagggcctgacactctcctaagaggttctctccaagcccccaaatagctccaggcgccctcggccgcccatcatggttaattctgtccaacaaacacacacgggtagattgctggcctgttgtaggtggtagggacacagatgaccgacctggtcactcctcctgccaacattcagtctggtatgtgaggcgtgcgtgaagcaagaactcctggagctacagggacagggagccatcattcctgcctgggaatcctggaagacttcctgcaggagtcagcgttcaatcttgaccttgaagatgggaaggatgttctttttacgtaccaattcttttgtcttttgatattaaaaagaagtacatgttcattgtagagaatttggaaactgtagaagagaatcaagaagaaaaataaaaatcagctgttgtaatcacctagcaaa

SEQ ID NO: 573 - DNA, 592 bp, Homo sapiens
  source 1..592: mol_type = unassigned DNA
tttggggagactggccctgggaggcgacagatggaggctgaggaagcagagtgatccccggccccttcctgtccctgaacactgtctgcctggatgagggggtctcgctctgtcacacaggctggagtgcagtggtgtgatcttggctcatcgtaacctccacctcccgggttcaagtgattctcatgcctcagcctcccgagtagctgggattacaggtggtgacttccaagagtgactccgtcggaggaaaatgactccccagtcgctgctgcagacgacactgttcctgctgagtctgctcttcctggtccaaggtgcccacggcaggggccacagggaagactttcgcttctgcagccagcggaaccagacacacaggagcagcctccactacaaacccacaccagacctgcgcatctccatcgagaactccgaagaggccctcacagtccatgcccctttccctgcagcccaccctgcttcccgatccttccctgaccccaggggcctctaccacttctgcctctactggaaccgacatgctgggagattacatcttctctatggcaagcgtgacttcttgctgagt

SEQ ID NO: 574 - DNA, 545 bp, Homo sapiens
  source 1..545: mol_type = unassigned DNA
ctgggaggcgacagatggaggctgaggaagcagagtgatccccggccccttcctgtccctgaacactgtctgcctggatgaggggtggtgacttccaagagtgactccgtcggaggaaaatgactccccagtcgctgctgcagacgacactgttcctgctgagtctgctcttcctggtccaagccagcggaaccagacacacaggagcagcctccactacaaacccacaccagacctgcgcatctccatcgagaactccgaagaggccctcacagtccatgcccctttccctgcagcccaccctgcttcccgatccttccctgaccccaggggcctctaccacttctgcctctactggaaccgacatgctgggagattacatcttctctatggcaagcgtgacttcttgctgagtgacaaagcctctagcctcctctgcttccagcaccaggaggagagcctggctcagggccccccgctgttagccacttctgtcacctcctggtggagccctcagaacatcagcctgcccagtgccgccagct

SEQ ID NO: 575 - DNA, 560 bp, Homo sapiens
  source 1..560: mol_type = unassigned DNA
agatggaggctgaggaagcagagtgatccccggccccttcctgtccctgaacactgtctgcctggatgagggctgtctgccctgccctgccgtaggagatgggctgggagcctcccacgctctccagctcactcggcaggcagcggggaccagggctggcaggttaagcctctgggggtggatcctgaaaggtggtccagccgcctggccctgcgtgggaccctccacctggcagcagggtctcgctctgtcacacaggctggagtgcagtggtgtgatcttggctcatcgtaacctccacctcccgggttcaagtgattctcatgcctcagcctcccgagtagctgggattacaggtggtgacttccaagagtgactccgtcggaggaaaatgactccccagtcgctgctgcagacgacactgttcctgctgagtctgctcttcctggtccaaggtgcccacggcaggggccacagggaagactttcgcttctgcagccagcggaaccagacacacaggagcagcctccactacaaacccacaccagacctgcgcatct

SEQ ID NO: 576 - DNA, 593 bp, Homo sapiens
  source 1..593: mol_type = unassigned DNA
atggaggctgaggaagcagagtgatccccggccccttcctgtccctgaacactgtctgcctggatgagggctgtctgccctgccctgccgtaggagatgggctgggagcctcccacgctctccagctcactcggcaggcagcggggaccagggctggcaggttaagcctctgggggtggatcctgaaaggtggtccagccgcctggccctgcgtgggaccctccacctggcagcaggtggtgacttccaagagtgactccgtcggaggaaaatgactccccagtcgctgctgcagacgacactgttcctgctgagtctgctcttcctggtccaaggtgcccacggcaggggccacagggaagactttcgcttctgcagccagcggaaccagacacacaggagcagcctccactacaaacccacaccagacctgcgcatctccatcgagaactccgaagaggccctcacagtccatgcccctttccctgcagcccaccctgcttcccgatccttccctgaccccaggggcctctaccacttctgcctctactggaaccgacatgctgggagattacatcttctctatggcaagc

SEQ ID NO: 577 - DNA, 690 bp, Homo sapiens
  source 1..690: mol_type = unassigned DNA
cacatatatcgtccgtcatccccagtcaagctcagggaggagggaggagcccagctggggcaggagaggggtgtctccccaccaaacaaacccggtccctccctctccgcactagctgtctgccctgccctgccgtaggagatgggctgggagcctcccacgctctccagctcactcggcaggcagcggggaccagggctggcaggttaagcctctgggggtggatcctgaaaggtggtccagccgcctggccctgcgtgggaccctccacctggcagcaggtacccaaacaagggctggacagcaggtggtgacttccaagagtgactccgtcggaggaaaatgactccccagtcgctgctgcagacgacactgttcctgctgagtctgctcttcctggtccaaggtgcccacggcaggggccacagggaagactttcgcttctgcagccagcggaaccagacacacaggagcagcctccactacaaacccacaccagacctgcgcatctccatcgagaactccgaagaggccctcacagtccatgcccctttccctgcagcccaccctgcttcccgatccttccctgaccccaggggcctctaccacttctgcctctactggaaccgacatgctgggagattacatcttctctatggcaagcgtgacttcttgctgagtgacaaagcc

SEQ ID NO: 578 - DNA, 3925 bp, Homo sapiens
  source 1..3925: mol_type = unassigned DNA
agggaggagggaggagcccagctggggcaggagaggggtgtctccccaccaaacaaacccggtccctccctctccgcactagctgtctgccctgccctgccgtaggagatgggctgggagcctcccacgctctccagctcactcggcaggcagcggggaccagggctggcaggttaagcctctgggggtggatcctgaaaggtggtccagccgcctggccctgcgtgggaccctccacctggcagcaggtacccaaacaagggctggacagcagggtctcgctctgtcacacaggctggagtgcagtggtgtgatcttggctcatcgtaacctccacctcccgggttcaagtgattctcatgcctcagcctcccgagtagctgggattacaggtggtgacttccaagagtgactccgtcggaggaaaatgactccccagtcgctgctgcagacgacactgttcctgctgagtctgctcttcctggtccaaggtgcccacggcaggggccacagggaagactttcgcttctgcagccagcggaaccagacacacaggagcagcctccactacaaacccacaccagacctgcgcatctccatcgagaactccgaagaggccctcacagtccatgcccctttccctgcagcccaccctgcttcccgatccttccctgaccccaggggcctctaccacttctgcctctactggaaccgacatgctgggagattacatcttctctatggcaagcgtgacttcttgctgagtgacaaagcctctagcctcctctgcttccagcaccaggaggagagcctggctcagggccccccgctgttagccacttctgtcacctcctggtggagccctcagaacatcagcctgcccagtgccgccagcttcaccttctccttccacagtcctccccacacggccgctcacaatgcctcggtggacatgtgcgagctcaaaagggacctccagctgctcagccagttcctgaagcatccccagaaggcctcaaggaggccctcggctgcccccgccagccagcagttgcagagcctggagtcgaaactgacctctgtgagattcatgggggacatggtgtccttcgaggaggaccggatcaacgccacggtgtggaagctccagcccacagccggcctccaggacctgcacatccactcccggcaggaggaggagcagagcgagatcatggagtactcggtgctgctgcctcgaacactcttccagaggacgaaaggccggagcggggaggctgagaagagactcctcctggtggacttcagcagccaagccctgttccaggacaagaattccagccaagtcctgggtgagaaggtcttggggattgtggtacagaacaccaaagtagccaacctcacggagcccgtggtgctcactttccagcaccagctacagccgaagaatgtgactctgcaatgtgtgttctgggttgaagaccccacattgagcagcccggggcattggagcagtgctgggtgtgagaccgtcaggagagaaacccaaacatcctgcttctgcaaccacttgacctactttgcagtgctgatggtctcctcggtggaggtggacgccgtgcacaagcactacctgagcctcctctcctacgtgggctgtgtcgtctctgccctggcctgccttgtcaccattgccgcctacctctgctccaggaggaaacctcgggactacaccatcaaggtgcacatgaacctgctgctggccgtcttcctgctggacacgagcttcctgctcagcgagccggtggccctgacaggctctgaggctggctgccgagccagtgccatcttcctgcacttctccctgctcacctgcctttcctggatgggcctcgaggggtacaacctctaccgactcgtggtggaggtctttggcacctatgtccctggctacctactcaagctgagcgccatgggctggggcttccccatctttctggtgacgctggtggccctggtggatgtggacaactatggccccatcatcttggctgtgcataggactccagagggcgtcatctacccttccatgtgctggatccgggactccctggtcagctacatcaccaacctgggcctcttcagcctggtgtttctgttcaacatggccatgctagccaccatggtggtgcagatcctgcggctgcgcccccacacccaaaagtggtcacatgtgctgacactgctgggcctcagcctggtccttggcctgccctgggccttgatcttcttctcctttgcttctggcaccttccagcttgtcgtcctctaccttttcagcatcatcacctccttccaaggcttcctcatcttcatctggtactggtccatgcggctgcaggcccggggtggcccctcccctctgaagagcaactcagacagcgccaggctccccatcagctcgggcagcacctcgtccagccgcatctaggcctccagcccacctgcccatgtgatgaagcagagattcggcctcgtcgcacactgcctgtggcccccgagcccggcccagccccaggccagtcagccgcagactttggaaagcccaacgaccatggagagatgggccgttgccatggtggacggactcccgggctgggcttttgaattggccttggggactactcggctctcactcagctcccacgggactcagaagtgcgccgccatgctgcctagggtactgtccccacatctgtcccaacccagctggaggcctggtctctccttacaacccctgggcccagccctcattgctgggggccaggccttggatcttgagggtctggcacatccttaatcctgtgcccctgcctgggacagaaatgtggctccagttgctctgtctctcgtggtcaccctgagggcactctgcatcctctgtcattttaacctcaggtggcacccagggcgaatggggcccagggcagaccttcagggccagagccctggcggaggagaggccctttgccaggagcacagcagcagctcgcctacctctgagcccaggccccctccctccctcagccccccagtcctccctccatcttccctggggttctcctcctctcccagggcctccttgctccttcgttcacagctgggggtccccgattccaatgctgttttttggggagtggtttccaggagctgcctggtgtctgctgtaaatgtttgtctactgcacaagcctcggcctgcccctgagccaggctcggtaccgatgcgtgggctgggctaggtccctctgtccatctgggcctttgtatgagctgcattgcccttgctcaccctgaccaagcacacgcctcagaggggccctcagcctctcctgaagccctcttgtggcaagaactgtggaccatgccagtcccgtctggtttccatcccaccactccaaggactgagactgacctcctctggtgacactggcctagggcctgacactctcctaagaggttctctccaagcccccaaatagctccaggcgccctcggccgcccatcatggttaattctgtccaacaaacacacacgggtagattgctggcctgttgtaggtggtagggacacagatgaccgacctggtcactcctcctgccaacattcagtctggtatgtgaggcgtgcgtgaagcaagaactcctggagctacagggacagggagccatcattcctgcctgggaatcctggaagacttcctgcaggagtcagcgttcaatcttgaccttgaagatgggaaggatgttctttttacgtaccaattcttttgtcttttgatattaaaaagaagtacatgttcattgtagagaatttggaaactgtagaagagaatcaagaagaaaaataaaaatcagctgttgtaa

SEQ ID NO: 579 - DNA, 804 bp, Homo sapiens
  source 1..804: mol_type = unassigned DNA
gggcaggagaggggtgtctccccaccaaacaaacccggtccctccctctccgcactagctgtctgccctgccctgccgtaggagatgggctgggagcctcccacgctctccagctcactcggcaggcagcggggaccagggctggcaggttaagcctctgggggtggatcctgaaaggtggtccagccgcctggccctgcgtgggaccctccacctggcagcaggtggtgacttccaagagtgactccgtcggaggaaaatgactccccagtcgctgctgcagacgacactgttcctgctgagtctgctcttcctggtccaagccagcggaaccagacacacaggagcagcctccactacaaacccacaccagacctgcgcatctccatcgagaactccgaagaggccctcacagtccatgcccctttccctgcagcccaccctgcttcccgatccttccctgaccccaggggcctctaccacttctgcctctactggaaccgacatgctgggagattacatcttctctatggcaagcgtgacttcttgctgagtgacaaagcctctagcctcctctgcttccagcaccaggaggagagcctggctcagggccccccgctgttagccacttctgtcacctcctggtggagccctcagaacatcagcctgcccagtgccgccagcttcaccttctccttccacagtcctccccacacggccgctcacaatgcctcggtggacatgtgcgagctcaaaagggacctccagctgctcagccagttcctgaagcatccccagaaggcc

SEQ ID NO: 580 - DNA, 3858 bp, Homo sapiens
  source 1..3858: mol_type = unassigned DNA
aaacaaacccggtccctccctctccgcactagctgtctgccctgccctgccgtaggagatgggctgggagcctcccacgctctccagctcactcggcaggcagcggggaccagggctggcaggttaagcctctgggggtggatcctgaaaggtggtccagccgcctggccctgcgtgggaccctccacctggcagcagggtctcgctctgtcacacaggctggagtgcagtggtgtgatcttggctcatcgtaacctccacctcccgggttcaagtgattctcatgcctcagcctcccgagtagctgggattacaggtggtgacttccaagagtgactccgtcggaggaaaatgactccccagtcgctgctgcagacgacactgttcctgctgagtctgctcttcctggtccaaggtgcccacggcaggggccacagggaagactttcgcttctgcagccagcggaaccagacacacaggagcagcctccactacaaacccacaccagacctgcgcatctccatcgagaactccgaagaggccctcacagtccatgcccctttccctgcagcccaccctgcttcccgatccttccctgaccccaggggcctctaccacttctgcctctactggaaccgacatgctgggagattacatcttctctatggcaagcgtgacttcttgctgagtgacaaagcctctagcctcctctgcttccagcaccaggaggagagcctggctcagggccccccgctgttagccacttctgtcacctcctggtggagccctcagaacatcagcctgcccagtgccgccagcttcaccttctccttccacagtcctccccacacggccgctcacaatgcctcggtggacatgtgcgagctcaaaagggacctccagctgctcagccagttcctgaagcatccccagaaggcctcaaggaggccctcggctgcccccgccagccagcagttgcagagcctggagtcgaaactgacctctgtgagattcatgggggacatggtgtccttcgaggaggaccggatcaacgccacggtgtggaagctccagcccacagccggcctccaggacctgcacatccactcccggcaggaggaggagcagagcgagatcatggagtactcggtgctgctgcctcgaacactcttccagaggacgaaaggccggagcggggaggctgagaagagactcctcctggtggacttcagcagccaagccctgttccaggacaagaattccagccaagtcctgggtgagaaggtcttggggattgtggtacagaacaccaaagtagccaacctcacggagcccgtggtgctcactttccagcaccagctacagccgaagaatgtgactctgcaatgtgtgttctgggttgaagaccccacattgagcagcccggggcattggagcagtgctgggtgtgagaccgtcaggagagaaacccaaacatcctgcttctgcaaccacttgacctactttgcagtgctgatggtctcctcggtggaggtggacgccgtgcacaagcactacctgagcctcctctcctacgtgggctgtgtcgtctctgccctggcctgccttgtcaccattgccgcctacctctgctccaggaggaaacctcgggactacaccatcaaggtgcacatgaacctgctgctggccgtcttcctgctggacacgagcttcctgctcagcgagccggtggccctgacaggctctgaggctggctgccgagccagtgccatcttcctgcacttctccctgctcacctgcctttcctggatgggcctcgaggggtacaacctctaccgactcgtggtggaggtctttggcacctatgtccctggctacctactcaagctgagcgccatgggctggggcttccccatctttctggtgacgctggtggccctggtggatgtggacaactatggccccatcatcttggctgtgcataggactccagagggcgtcatctacccttccatgtgctggatccgggactccctggtcagctacatcaccaacctgggcctcttcagcctggtgtttctgttcaacatggccatgctagccaccatggtggtgcagatcctgcggctgcgcccccacacccaaaagtggtcacatgtgctgacactgctgggcctcagcctggtccttggcctgccctgggccttgatcttcttctcctttgcttctggcaccttccagcttgtcgtcctctaccttttcagcatcatcacctccttccaaggcttcctcatcttcatctggtactggtccatgcggctgcaggcccggggtggcccctcccctctgaagagcaactcagacagcgccaggctccccatcagctcgggcagcacctcgtccagccgcatctaggcctccagcccacctgcccatgtgatgaagcagagattcggcctcgtcgcacactgcctgtggcccccgagcccggcccagccccaggccagtcagccgcagactttggaaagcccaacgaccatggagagatgggccgttgccatggtggacggactcccgggctgggcttttgaattggccttggggactactcggctctcactcagctcccacgggactcagaagtgcgccgccatgctgcctagggtactgtccccacatctgtcccaacccagctggaggcctggtctctccttacaacccctgggcccagccctcattgctgggggccaggccttggatcttgagggtctggcacatccttaatcctgtgcccctgcctgggacagaaatgtggctccagttgctctgtctctcgtggtcaccctgagggcactctgcatcctctgtcattttaacctcaggtggcacccagggcgaatggggcccagggcagaccttcagggccagagccctggcggaggagaggccctttgccaggagcacagcagcagctcgcctacctctgagcccaggccccctccctccctcagccccccagtcctccctccatcttccctggggttctcctcctctcccagggcctccttgctccttcgttcacagctgggggtccccgattccaatgctgttttttggggagtggtttccaggagctgcctggtgtctgctgtaaatgtttgtctactgcacaagcctcggcctgcccctgagccaggctcggtaccgatgcgtgggctgggctaggtccctctgtccatctgggcctttgtatgagctgcattgcccttgctcaccctgaccaagcacacgcctcagaggggccctcagcctctcctgaagccctcttgtggcaagaactgtggaccatgccagtcccgtctggtttccatcccaccactccaaggactgagactgacctcctctggtgacactggcctagggcctgacactctcctaagaggttctctccaagcccccaaatagctccaggcgccctcggccgcccatcatggttaattctgtccaacaaacacacacgggtagattgctggcctgttgtaggtggtagggacacagatgaccgacctggtcactcctcctgccaacattcagtctggtatgtgaggcgtgcgtgaagcaagaactcctggagctacagggacagggagccatcattcctgcctgggaatcctggaagacttcctgcaggagtcagcgttcaatcttgaccttgaagatgggaaggatgttctttttacgtaccaattcttttgtcttttgatattaaaaagaagtacatgttcattgtagagaatttggaaactgtagaagagaatcaagaagaaaaataaaaatcagctgttgtaatcacctagc

SEQ ID NO: 581 - DNA, 944 bp, Homo sapiens
  source 1..944: mol_type = unassigned DNA
aacaaacccggtccctccctctccgcactagctgtctgccctgccctgccgtaggagatgggctgggagcctcccacgctctccagctcactcggcaggcagcggggaccagggctggcaggttaagcctctgggggtggatcctgaaaggtggtccagccgcctggccctgcgtgggaccctccacctggcagcagggtctcgctctgtcacacaggctggagtgcagtggtgtgatcttggctcatcgtaacctccacctcccgggttcaagtgattctcatgcctcagcctcccgagtagctgggattacaggtggtgacttccaagagtgactccgtcggaggaaaatgactccccagtcgctgctgcagacgacactgttcctgctgagtctgctcttcctggtccaagcctctgcctcctcaggtgcccacggcaggggccacagggaagactttcgcttctgcagccagcggaaccagacacacaggagcagcctccactacaaacccacaccagacctgcgcatctccatcgagaactccgaagaggccctcacagtccatgcccctttccctgcagcccaccctgcttcccgatccttccctgaccccaggggcctctaccacttctgcctctactggaaccgacatgctgggagattacatcttctctatggcaagcgtgacttcttgctgagtgacaaagcctctagcctcctctgcttccagcaccaggaggagagcctggctcagggccccccgctgttagccacttctgtcacctcctggtggagccctcagaacatcagcctgcccagtgccgccagcttcaccttctccttccacagtcctccccacacggccgctcacaatgcctcggtggacatgtgcgagctcaaaagggacctccagctgctcagccagttcctgaagcatccc

SEQ ID NO: 582 - DNA, 896 bp, Homo sapiens
  source 1..896: mol_type = unassigned DNA
aaacccggtccctccctctccgcactagctgtctgccctgccctgccgtaggagatgggctgggagcctcccacgctctccagctcactcggcaggcagcggggaccagggctggcaggttaagcctctgggggtggatcctgaaaggtggtccagccgcctggccctgcgtgggaccctccacctggcagcagggtctcgctctgtcacacaggctggagtgcagtggtgtgatcttggctcatcgtaacctccacctcccgggttcaagtgattctcatgcctcagcctcccgagtagctgggattacaggtggtgacttccaagagtgactccgtcggaggaaaatgactccccagtcgctgctgcagacgacactgttcctgctgagtctgctcttcctggtccaagccagcggaaccagacacacaggagcagcctccactacaaacccacaccagacctgcgcatctccatcgagaactccgaagaggccctcacagtccatgcccctttccctgcagcccaccctgcttcccgatccttccctgaccccaggggcctctaccacttctgcctctactggaaccgacatgctgggagattacatcttctctatggcaagcgtgacttcttgctgagtgacaaagcctctagcctcctctgcttccagcaccaggaggagagcctggctcagggccccccgctgttagccacttctgtcacctcctggtggagccctcagaacatcagcctgcccagtgccgccagcttcaccttctccttccacagtcctccccacacggccgctcacaatgcctcggtggacatgtgcgagctcaaaagggacctccagctgctcagccagttcctgaagcatccccagaaggcctcaa

SEQ ID NO: 583 - DNA, 568 bp, Homo sapiens
  source 1..568: mol_type = unassigned DNA
ctctccgcactagctgtctgccctgccctgccgtaggagatgggctgggagcctcccacgctctccagctcactcggcaggcagcggggaccagggctggcaggttaagcctctgggggtggatcctgaaaggtggtccagccgcctggccctgcgtgggaccctccacctggcagcagggtctcgctctgtcacacaggctggagtgcagtggtgtgatcttggctcatcgtaacctccacctcccgggttcaagtgattctcatgcctcagcctcccgagtagctgggattacaggtggtgacttccaagagtgactccgtcggaggaaaatgactccccagtcgctgctgcagacgacactgttcctgctgagtctgctcttcctggtccaaggcaggtgcccacggcaggggccacagggaagactttcgcttctgcagccagcggaaccagacacacaggagcagcctccactacaaacccacaccagacctgcgcatctccatcgagaactccgaagaggccctcacagtccatgcccctttccctgcagcccaccctgctt

SEQ ID NO: 584 - DNA, 640 bp, Homo sapiens
  source 1..640: mol_type = unassigned DNA
actagctgtctgccctgccctgccgtaggagatgggctgggagcctcccacgctctccagctcactcggcaggcagcggggaccagggctggcaggttaagcctctgggggtggatcctgaaaggtggtccagccgcctggccctgcgtgggaccctccacctggcagcaggtggtgacttccaagagtgactccgtcggaggaaaatgactccccagtcgctgctgcagacgacactgttcctgctgagtctgctcttcctggtccaagcctctgcctcctcaggtgcccacggcaggggccacagggaagactttcgcttctgcagccagcggaaccagacacacaggagcagcctccactacaaacccacaccagacctgcgcatctccatcgagaactccgaagaggccctcacagtccatgcccctttccctgcagcccaccctgcttcccgatccttccctgaccccaggggcctctaccacttctgcctctactggaaccgacatgctgggagattacatcttctctatggcaagcgtgacttcttgctgagtgacaaagcctctagcctcctctgcttccagcaccaggaggagagcctggctcagggccccccgctgttagccacttctgt

SEQ ID NO: 585 - DNA, 591 bp, Homo sapiens
  source 1..591: mol_type = unassigned DNA
agctgtctgccctgccctgccgtaggagatgggctgggagcctcccacgctctccagctcactcggcaggcagcggggaccagggctggcaggttaagcctctgggggtggatcctgaaaggtggtccagccgcctggccctgcgtgggaccctccacctggcagcagggtctcgctctgtcacacaggctggagtgcagtggtgtgatcttggctcatcgtaacctccacctcccgggttcaagtgattctcatgcctcagcctcccgagtagctgggattacaggtggtgacttccaagagtgactccgtcggaggaaaatgactccccagtcgctgctgcagacgacactgttcctgctgagtctgctcttcctggtccaagcccctgccacggggtcccatctgcagcctctgcctcctcaggtgcccacggcaggggccacagggaagactttcgcttctgcagccagcggaaccagacacacaggagcagcctccactacaaacccacaccagacctgcgcatctccatcgagaactccgaagaggccctcacagtccatgcccctttccctgcagcccaccctg

SEQ ID NO: 586 - DNA, 547 bp, Homo sapiens
  source 1..547: mol_type = unassigned DNA
agctgtctgccctgccctgccgtaggagatgggctgggagcctcccacgctctccagctcactcggcaggcagcggggaccagggctggcaggttaagcctctgggggtggatcctgaaaggtggtccagccgcctggccctgcgtgggaccctccacctggcagcaggtggtgacttccaagagtgactccgtcggaggaaaatgactccccagtcgctgctgcagacgacactgttcctgctgagtctgctcttcctggtccaagcctctgcctcctcaggtgcccacggcaggggccacagggaagactttcgcttctgcagccagcggaaccagacacacaggagcagcctccactacaaacccacaccagacctgcgcatctccatcgagaactccgaagaggccctcacagtccatgcccctttccctgcagcccaccctgcttcccgatccttccctgaccccaggggcctctaccacttctgcctctactggaaccgacatgctgggagattacatcttctctatggcaagcgtgactt

SEQ ID NO: 587 - DNA, 594 bp, Homo sapiens
  source 1..594: mol_type = unassigned DNA
agctgtctgccctgccctgccgtaggagatgggctgggagcctcccacgctctccagctcactcggcaggcagcggggaccagggctggcagggtctcgctctgtcacacaggctggagtgcagtggtgtgatcttggctcatcgtaacctccacctcccgggttcaagtgattctcatgcctcagcctcccgagtagctgggattacaggtggtgacttccaagagtgactccgtcggaggaaaatgactccccagtcgctgctgcagacgacactgttcctgctgagtctgctcttcctggtccaaggtgcccacggcaggggccacagggaagactttcgcttctgcagccagcggaaccagacacacaggagcagcctccactacaaacccacaccagacctgcgcatctccatcgagaactccgaagaggccctcacagtccatgcccctttccctgcagcccaccctgcttcccgatccttccctgaccccaggggcctctaccacttctgcctctactggaaccgacatgctgggagattacatcttctctatggcaagcgtgacttcttgctgagtgacaaagcct

SEQ ID NO: 588 - DNA, 565 bp, Homo sapiens
  source 1..565: mol_type = unassigned DNA
agctcactcggcaggcagcggggaccagggctggcaggttaagcctctgggggtggatcctgaaaggtggtccagccgcctggccctgcgtgggaccctccacctggcagcagacagggtctcgctctgtcacacaggctggagtgcagtggtgtgatcttggctcatcgtaacctccacctcccgggttcaagtgattctcatgcctcagcctcccgagtagctgggattacaggtggtgacttccaagagtgactccgtcggaggaaaatgactccccagtcgctgctgcagacgacactgttcctgctgagtctgctcttcctggtccaagcctctgcctcctcaggtgcccacggcaggggccacagggaagactttcgcttctgcagccagcggaaccagacacacaggagcagcctccactacaaacccacaccagacctgcgcatctccatcgagaactccgaagaggccctcacagtccatgcccctttccctgcagcccaccctgcttcccgatccttccctgaccccaggggcctctaccacttctgcctctact

SEQ ID NO: 589 - DNA, 551 bp, Homo sapiens
  source 1..551: mol_type = unassigned DNA
agctcactcggcaggcagcggggaccagggctggcaggttaagcctctgggggtggatcctgaaaggtggtccagccgcctggccctgcgtgggaccctccacctggcagcagggtctcgctctgtcacacaggctggagtgcagtggtgtgatcttggctcatcgtaacctccacctcccgggttcaagtgattctcatgcctcagcctcccgagtagctgggattacaggtggtgacttccaagagtgactccgtcggaggaaaatgactccccagtcgctgctgcagacgacactgttcctgctgagtctgctcttcctggtccaagcccaccctgcttcccgatccttccctgaccccaggggcctctaccacttctgcctctactggaaccgacatgctgggagattacatcttctctatggcaagcgtgacttcttgctgagtgacaaagcctctagcctcctctgcttccagcaccaggaggagagcctggctcagggccccccgctgttagccacttctgtcacctcctggtggagccctcag

SEQ ID NO: 590 - DNA, 593 bp, Homo sapiens
  source 1..593: mol_type = unassigned DNA
ttgttgctggagaaactgaggctcagagtggtacagtcactgggcccagcaagctggggtctgctctttaggctgtgagatcagtgctcctactacacagatgggagaaccgaggctctgggagggcaggtggcttgcccaaggtcacctagcacatccagggtctcgctctgtcacacaggctggagtgcagtggtgtgatcttggctcatcgtaacctccacctcccgggttcaagtgattctcatgcctcagcctcccgagtagctgggattacaggtggtgacttccaagagtgactccgtcggaggaaaatgactccccagtcgctgctgcagacgacactgttcctgctgagtctgctcttcctggtccaagccagcggaaccagacacacaggagcagcctccactacaaacccacaccagacctgcgcatctccatcgagaactccgaagaggccctcacagtccatgcccctttccctgcagcccaccctgcttcccgatccttccctgaccccaggggcctctaccacttctgcctctactggaaccgacatgctgggagattacatcttctctatggcaagc

SEQ ID NO: 591 - DNA, 579 bp, Homo sapiens
  source 1..579: mol_type = unassigned DNA
gtctctggctgctgggttaaggctcaagcttgggagcagcttcacgtgtgagggagacgagggggaggtggcgcccagtcgaggggaaggacaggagagaggtggcagagctgcagcagggttggtgtaggggttggcctcctggcaaggcccagcatgacaaaggcagacagggtctcgctctgtcacacaggctggagtgcagtggtgtgatcttggctcatcgtaacctccacctcccgggttcaagtgattctcatgcctcagcctcccgagtagctgggattacaggtggtgacttccaagagtgactccgtcggaggaaaatgactccccagtcgctgctgcagacgacactgttcctgctgagtctgctcttcctggtccaaggtgcccacggcaggggccacagggaagactttcgcttctgcagccagcggaaccagacacacaggagcagcctccactacaaacccacaccagacctgcgcatctccatcgagaactccgaagaggccctcacagtccatgcccctttccctgcagcccaccctgcttcccgatccttccctgacccca

SEQ ID NO: 592 - DNA, 478 bp, Homo sapiens
  source 1..478: mol_type = unassigned DNA
agtcgaggggaaggacaggagagaggtggcagagctgcagcagggttggtgtaggggttggcctcctggcaaggcccagcatgacaaaggcagggtctcgctctgtcacacaggctggagtgcagtggtgtgatcttggctcatcgtaacctccacctcccgggttcaagtgattctcatgcctcagcctcccgagtagctgggattacaggtggtgacttccaagagtgactccgtcggaggaaaatgactccccagtcgctgctgcagacgacactgttcctgctgagtctgctcttcctggtccaaggtgcccacggcaggggccacagggaagactttcgcttctgcagccagcggaaccagacacacaggagcagcctccactacaaacccacaccagacctgcgcatctccatcgagaactccgaagaggccctcacagtccatgcccctttccctgcagcccaccctgctt

SEQ ID NO: 593 - DNA, 582 bp, Homo sapiens
  source 1..582: mol_type = unassigned DNA
gtaggggttggcctcctggcaaggcccagcatgacaaaggcaggtggtgacttccaagagtgactccgtcggaggaaaatgactccccagtcgctgctgcagacgacactgttcctgctgagtctgctcttcctggtccaagcctctgcctcctcaggtgcccacggcaggggccacagggaagactttcgcttctgcagccagcggaaccagacacacaggagcagcctccactacaaacccacaccagacctgcgcatctccatcgagaactccgaagaggccctcacagtccatgcccctttccctgcagcccaccctgcttcccgatccttccctgaccccaggggcctctaccacttctgcctctactggaaccgacatgctgggagattacatcttctctatggcaagcgtgacttcttgctgagtgacaaagcctctagcctcctctgcttccagcaccaggaggagagcctggctcagggccccccgctgttagccacttctgtcacctcctggtggagccctcagaacatcagcctgcccagtgccgccagcttcaccttctccttccacagt

SEQ ID NO: 594 - DNA, 548 bp, Homo sapiens
  source 1..548: mol_type = unassigned DNA
acttgggaacaggacaagttacggagccacgttgctttgctgggtctgagccggggtgtgacgtagtccctgcagctgccaacggttgccagggcaacggttgccaggggctgctgtcacctgcgccccttctcccgcgctggcggctggggcttctcagcctctattccctggctgtcccctttgtttgaagctccagtgagggagcagtggctggggtggcccagcttcaaagtctctgtcctcttgaaaaaaggtggtcgggggacattgacccaccagccccgcaggctactgcctgcaaacaagaacccctcatctgccacgcacgttcttaatgtatctatagtctgcctgatgccacaaaggagtccagggtctcgctctgtcacacaggctggagtgcagtggtgtgatcttggctcatcgtaacctccacctcccgggttcaagtgattctcatgcctcagcctcccgagtagctgggattacaggtggtgacttccaagagtgactccgtcggaggaaaatgactccccagtcgctgc

SEQ ID NO: 595 - DNA, 576 bp, Homo sapiens
  source 1..576: mol_type = unassigned DNA
cacctgcgccccttctcccgcgctggcggctggggcttctcagcctctattccctggctgtcccctttgtttgaagctccagtgagggagcagtggctggggtggcccagcttcaaagtctctgtcctcttgaaaaaaggtggtcgggggacattgacccaccagccccgcaggctactgcctgcaaacaagaacccctcatctgccacgcacgttcttaatgtatctatagtctgcctgatgccacaaaggagtccagggtctcgctctgtcacacaggctggagtgcagtggtgtgatcttggctcatcgtaacctccacctcccgggttcaagtgattctcatgcctcagcctcccgagtagctgggattacaggtggtgacttccaagagtgactccgtcggaggaaaatgactccccagtcgctgctgcagacgacactgttcctgctgagtctgctcttcctggtccaaggtgcccacggcaggggccacagggaagactttcgcttctgcagccagcggaaccagacacacaggagcagcctccactacaaacccacaccagacctgcg

SEQ ID NO: 596 - DNA, 575 bp, Homo sapiens
  source 1..575: mol_type = unassigned DNA
acctgcgccccttctcccgcgctggcggctggggcttctcagcctctattccctggctgtcccctttgtttgaagctccagtgagggagcagtggctggggtggcccagcttcaaagtctctgtcctcttgaaaaaaggtggtcgggggacattgacccaccagccccgcaggctactgcctgcaaacaagaacccctcatctgccacgcacgttcttaatgtatctatagtctgcctgatgccacaaaggagtccaggtggtgacttccaagagtgactccgtcggaggaaaatgactccccagtcgctgctgcagacgacactgttcctgctgagtctgctcttcctggtccaaggtgcccacggcaggggccacagggaagactttcgcttctgcagccagcggaaccagacacacaggagcagcctccactacaaacccacaccagacctgcgcatctccatcgagaactccgaagaggccctcacagtccatgcccctttccctgcagcccaccctgcttcccgatccttccctgaccccaggggcctctaccacttctgcctctactgg

SEQ ID NO: 597 - DNA, 720 bp, Homo sapiens
  source 1..720: mol_type = unassigned DNA
acctgcgccccttctcccgcgctggcggctggggcttctcagcctctattccctggctgtcccctttgtttgaagctccagtgagggagcagtggctggggtggcccagcttcaaagtctctgtcctcttgaaaaaaggtggtcgggggacattgacccaccagccccgcaggctactgcctgcaaacaagaacccctcatctgccacgcacgttcttaatgtatctatagtctgcctgatgccacaaaggagtccaggtggtgacttccaagagtgactccgtcggaggaaaatgactccccagtcgctgctgcagacgacactgttcctgctgagtctgctcttcctggtccaagccagcggaaccagacacacaggagcagcctccactacaaacccacaccagacctgcgcatctccatcgagaactccgaagaggccctcacagtccatgcccctttccctgcagcccaccctgcttcccgatccttccctgaccccaggggcctctaccacttctgcctctactggaaccgacatgctgggagattacatcttctctatggcaagcgtgacttcttgctgagtgacaaagcctctagcctcctctgcttccagcaccaggaggagagcctggctcagggccccccgctgttagccacttctgtcacctcctggtggagccctcagaacatcagcctgcccagtgccgccagctt

SEQ ID NO: 598 - DNA, 315 bp, Homo sapiens
  source 1..315: mol_type = unassigned DNA
tctcccgcgctggcggctggggcttctcagcctctattccctggctgtcccctttgtttgaagctccagtgagggagcagtggctggggtggcccagcttcaaagtctctgtcctcttgaaaaaaggtggtcgggggacattgacccaccagccccgcaggctactgcctgcaaacaagaacccctcatctgccacgcacgttcttaatgtatctatagtctgcctgatgccacaaaggagtccagacagggtctcgctctgtcacacaggctggagtgcagtggtgtgatcttggctcatcgtaacctccacct

SEQ ID NO: 599 - DNA, 572 bp, Homo sapiens
  source 1..572: mol_type = unassigned DNA
tctcccgcgctggcggctggggcttctcagcctctattccctggctgtcccctttgtttgaagctccagtgagggagcagtggctggggtggcccagcttcaaagtctctgtcctcttgaaaaaaggtggtcgggggacattgacccaccagccccgcaggctactgcctgcaaacaagaacccctcatctgccacgcacgttcttaatgtatctatagtctgcctgatgccacaaaggagtccaggtggtgacttccaagagtgactccgtcggaggaaaatgactccccagtcgctgctgcagacgacactgttcctgctgagtctgctcttcctggtccaaggcagcggaaccagacacacaggagcagcctccactacaaacccacaccagacctgcgcatctccatcgagaactccgaagaggccctcacagtccatgcccctttccctgcagcccaccctgcttcccgatccttccctgaccccaggggcctctaccacttctgcctctactggaaccgacatgctgggagattacatcttctctatggcaagcgtgacttcttgc

SEQ ID NO: 600 - DNA, 2688 bp, Homo sapiens
  source 1..2688: mol_type = unassigned DNA
tctcccgcgctggcggctggggcttctcagcctctattccctggctgtcccctttgtttgaagctccagtgagggagcagtggctggggtggcccagcttcaaagtctctgtcctcttgaaaaaaggtggtcgggggacattgacccaccagccccgcaggctactgcctgcaaacaagaacccctcatctgccacgcacgttcttaatgtatctatagtctgcctgatgccacaaaggagtccaggtggtgacttccaagagtgactccgtcggaggaaaatgactccccagtcgctgctgcagacgacactgttcctgctgagtctgctcttcctggtccaagccagcggaaccagacacacaggagcagcctccactacaaacccacaccagacctgcgcatctccatcgagaactccgaagaggccctcacagtccatgcccctttccctgcagcccaccctgcttcccgatccttccctgaccccaggggcctctaccacttctgcctctactggaaccgacatgctgggagattacatcttctctatggcaagcgtgacttcttgctgagtgacaaagcctctagcctcctctgcttccagcaccaggaggagagcctggctcagggccccccgctgttagccacttctgtcacctcctggtggagccctcagaacatcagcctgcccagtgccgccagcttcaccttctccttccacagtcctccccacacggccgctcacaatgcctcggtggacatgtgcgagctcaaaagggacctccagctgctcagccagttcctgaagcatccccagaaggcctcaaggaggccctcggctgcccccgccagccagcagttgcagagcctggagtcgaaactgacctctgtgagattcatgggggacatggtgtccttcgaggaggaccggatcaacgccacggtgtggaagctccagcccacagccggcctccaggacctgcacatccactcccggcaggaggaggagcagagcgagatcatggagtactcggtgctgctgcctcgaacactcttccagaggacgaaaggccggagcggggaggctgagaagagactcctcctggtggacttcagcagccaagccctgttccaggacaagaattccagccaagtcctgggtgagaaggtcttggggattgtggtacagaacaccaaagtagccaacctcacggagcccgtggtgctcactttccagcaccagctacagccgaagaatgtgactctgcaatgtgtgttctgggttgaagaccccacattgagcagcccggggcattggagcagtgctgggtgtgagaccgtcaggagagaaacccaaacatcctgcttctgcaaccacttgacctactttgcagtgctgatggtctcctcggtggaggtggacgccgtgcacaagcactacctgagcctcctctcctacgtgggctgtgtcgtctctgccctggcctgccttgtcaccattgccgcctacctctgctccaggaggaaacctcgggactacaccatcaaggtgcacatgaacctgctgctggccgtcttcctgctggacacgagcttcctgctcagcgagccggtggccctgacaggctctgaggctggctgccgagccagtgccatcttcctgcacttctccctgctcacctgcctttcctggatgggcctcgaggggtacaacctctaccgactcgtggtggaggtctttggcacctatgtccctggctacctactcaagctgagcgccatgggctggggcttccccatctttctggtgacgctggtggccctggtggatgtggacaactatggccccatcatcttggctgtgcataggactccagagggcgtcatctacccttccatgtgctggatccgggactccctggtcagctacatcaccaacctgggcctcttcagcctggtgtttctgttcaacatggccatgctagccaccatggtggtgcagatcctgcggctgcgcccccacacccaaaagtggtcacatgtgctgacactgctgggcctcagcctggtccttggcctgccctgggccttgatcttcttctcctttgcttctggcaccttccagcttgtcgtcctctaccttttcagcatcatcacctccttccaaggcttcctcatcttcatctggtactggtccatgcggctgcaggcccggggtggcccctcccctctgaagagcaactcagacagcgccaggctccccatcagctcgggcagcacctcgtccagccgcatctaggcctccagcccacctgcccatgtgatgaagcagagattcggcctcgtcgcacactgcctgtggcccccgagcccggcccagccccaggccagtcagccgcagactttggaaagcccaacgaccatggagagatgggccgttgccatggtggacggactcccgggctgggcttttgaattggccttggggactactcggctctcactcagctcccacgggactcagaagtgcgccgccatgctgcctagggtactgtccccacatctgtcccaacccagctggaggcctggtctctccttacaacccctgggcccagccctcattgctgggggccaggccttggatcttgagggtctggcacatccttaatcctgtgcccctgcctg

SEQ ID NO: 601 - DNA, 618 bp, Homo sapiens
  source 1..618: mol_type = unassigned DNA
tggggcttctcagcctctattccctggctgtcccctttgtttgaagctccagtgagggagcagtggctggggtggcccagcttcaaagtctctgtcctcttgaaaaaaggtggtcgggggacattgacccaccagccccgcaggctactgcctgcaaacaagaacccctcatctgccacgcacgttcttaatgtatctatagtctgcctgatgccacaaaggagtccaggtggtgacttccaagagtgactccgtcggaggaaaatgactccccagtcgctgctgcagacgacactgttcctgctgagtctgctcttcctggtccaagcctctgcctcctcaggtgcccacggcaggggccacagggaagactttcgcttctgcagccagcggaaccagacacacaggagcagcctccactacaaacccacaccagacctgcgcatctccatcgagaactccgaagaggccctcacagtccatgcccctttccctgcagcccaccctgcttcccgatccttccctgaccccaggggcctctaccacttctgcctctactggaaccgacatgctgggagattacatcttctctatggcaagcgtgacttcttgctgagt

SEQ ID NO: 602 - DNA, 632 bp, Homo sapiens
  source 1..632: mol_type = unassigned DNA
attccctggctgtcccctttgtttgaagctccagtgagggagcagtggctggggtggcccagcttcaaagtctctgtcctcttgaaaaaaggtggtcgggggacattgacccaccagccccgcaggctactgcctgcaaacaagaacccctcatctgccacgcacgttcttaatgtatctatagtctgcctgatgccacaaaggagtccagggtctcgctctgtcacacaggctggagtgcagtggtgtgatcttggctcatcgtaacctccacctcccgggttcaagtgattctcatgcctcagcctcccgagtagctgggattacaggtggtgacttccaagagtgactccgtcggaggaaaatgactccccagtcgctgctgcagacgacactgttcctgctgagtctgctcttcctggtccaagccagcggaaccagacacacaggagcagcctccactacaaacccacaccagacctgcgcatctccatcgagaactccgaagaggccctcacagtccatgcccctttccctgcagcccaccctgcttcccgatccttccctgaccccaggggcctctaccacttctgcctctactggaaccgacatgctgggagattacatcttct

SEQ ID NO: 603 - DNA, 558 bp, Homo sapiens
  source 1..558: mol_type = unassigned DNA
gtcccctttgtttgaagctccagtgagggagcagtggctggggtggcccagcttcaaagtctctgtcctcttgaaaaaaggtggtcgggggacattgacccaccagccccgcaggctactgcctgcaaacaagaacccctcatctgccacgcacgttcttaatgtatctatagtctgcctgatgccacaaaggagtccagggtctcgctctgtcacacaggctggagtgcagtggtgtgatcttggctcatcgtaacctccacctcccgggttcaagtgattctcatgcctcagcctcccgagtagctgggattacaggtggtgacttccaagagtgactccgtcggaggaaaatgactccccagtcgctgctgcagacgacactgttcctgctgagtctgctcttcctggtccaagcctctagcctcctctgcttccagcaccaggaggagagcctggctcagggccccccgctgttagccacttctgtcacctcctggtggagccctcagaacatcagcctgcccagtgccgccagcttcaccttctccttccaca

SEQ ID NO: 604 - DNA, 699 bp, Homo sapiens
  source 1..699: mol_type = unassigned DNA
tgtttgaagctccagtgagggagcagtggctggggtggcccagcttcaaagtctctgtcctcttgaaaaaaggtggtcgggggacattgacccaccagccccgcaggctactgcctgcaaacaagaacccctcatctgccacgcacgttcttaatgtatctatagtctgcctgatgccacaaaggagtccagggtctcgctctgtcacacaggctggagtgcagtggtgtgatcttggctcatcgtaacctccacctcccgggttcaagtgattctcatgcctcagcctcccgagtagctgggattacaggtggtgacttccaagagtgactccgtcggaggaaaatgactccccagtcgctgctgcagacgacactgttcctgctgagtctgctcttcctggtccaagcctctgcctcctcaggtgcccacggcaggggccacagggaagactttcgcttctgcagccagcggaaccagacacacaggagcagcctccactacaaacccacaccagacctgcgcatctccatcgagaactccgaagaggccctcacagtccatgcccctttccctgcagcccaccctgcttcccgatccttccctgaccccaggggcctctaccacttctgcctctactggaaccgacatgctgggagattacatcttctctatggcaagcgtgacttcttgctgagt

SEQ ID NO: 605 - DNA, 558 bp, Homo sapiens
  source 1..558: mol_type = unassigned DNA
gtttgaagctccagtgagggagcagtggctggggtggcccagcttcaaagtctctgtcctcttgaaaaaaggtggtcgggggacattgacccaccagccccgcaggctactgcctgcaaacaagaacccctcatctgccacgcacgttcttaatgtatctatagtctgcctgatgccacaaaggagtccagacagggtctcgctctgtcacacaggcatgaaccactgcgctcggccccactgtcccttgatggttactttgtgggcaggcaggggtgaggatggaagggcaagggcccgtcctgaggctgcagagaaggtcttggtgaaggaggatgaggtctgaatagggtgagagagcagagactggaaagggactgaagatcaagagccccaggaagaattcttcctcagcatcagtgtagactgtttatttcctttcacagaggaggaaactggggcacagagaggatgcccaaagctgcacagctagccaatgggagagccaggatttgaacccagcagctgattggagtggggtaggggtgaggggcggag

SEQ ID NO: 606 - DNA, 3820 bp, Homo sapiens
  source 1..3820: mol_type = unassigned DNA
ccagcttcaaagtctctgtcctcttgaaaaaaggtggtcgggggacattgacccaccagccccgcaggctactgcctgcaaacaagaacccctcatctgccacgcacgttcttaatgtatctatagtctgcctgatgccacaaaggagtccagggtctcgctctgtcacacaggctggagtgcagtggtgtgatcttggctcatcgtaacctccacctcccgggttcaagtgattctcatgcctcagcctcccgagtagctgggattacaggtggtgacttccaagagtgactccgtcggaggaaaatgactccccagtcgctgctgcagacgacactgttcctgctgagtctgctcttcctggtccaaggtgcccacggcaggggccacagggaagactttcgcttctgcagccagcggaaccagacacacaggagcagcctccactacaaacccacaccagacctgcgcatctccatcgagaactccgaagaggccctcacagtccatgcccctttccctgcagcccaccctgcttcccgatccttccctgaccccaggggcctctaccacttctgcctctactggaaccgacatgctgggagattacatcttctctatggcaagcgtgacttcttgctgagtgacaaagcctctagcctcctctgcttccagcaccaggaggagagcctggctcagggccccccgctgttagccacttctgtcacctcctggtggagccctcagaacatcagcctgcccagtgccgccagcttcaccttctccttccacagtcctccccacacggccgctcacaatgcctcggtggacatgtgcgagctcaaaagggacctccagctgctcagccagttcctgaagcatccccagaaggcctcaaggaggccctcggctgcccccgccagccagcagttgcagagcctggagtcgaaactgacctctgtgagattcatgggggacatggtgtccttcgaggaggaccggatcaacgccacggtgtggaagctccagcccacagccggcctccaggacctgcacatccactcccggcaggaggaggagcagagcgagatcatggagtactcggtgctgctgcctcgaacactcttccagaggacgaaaggccggagcggggaggctgagaagagactcctcctggtggacttcagcagccaagccctgttccaggacaagaattccagccaagtcctgggtgagaaggtcttggggattgtggtacagaacaccaaagtagccaacctcacggagcccgtggtgctcactttccagcaccagctacagccgaagaatgtgactctgcaatgtgtgttctgggttgaagaccccacattgagcagcccggggcattggagcagtgctgggtgtgagaccgtcaggagagaaacccaaacatcctgcttctgcaaccacttgacctactttgcagtgctgatggtctcctcggtggaggtggacgccgtgcacaagcactacctgagcctcctctcctacgtgggctgtgtcgtctctgccctggcctgccttgtcaccattgccgcctacctctgctccaggaggaaacctcgggactacaccatcaaggtgcacatgaacctgctgctggccgtcttcctgctggacacgagcttcctgctcagcgagccggtggccctgacaggctctgaggctggctgccgagccagtgccatcttcctgcacttctccctgctcacctgcctttcctggatgggcctcgaggggtacaacctctaccgactcgtggtggaggtctttggcacctatgtccctggctacctactcaagctgagcgccatgggctggggcttccccatctttctggtgacgctggtggccctggtggatgtggacaactatggccccatcatcttggctgtgcataggactccagagggcgtcatctacccttccatgtgctggatccgggactccctggtcagctacatcaccaacctgggcctcttcagcctggtgtttctgttcaacatggccatgctagccaccatggtggtgcagatcctgcggctgcgcccccacacccaaaagtggtcacatgtgctgacactgctgggcctcagcctggtccttggcctgccctgggccttgatcttcttctcctttgcttctggcaccttccagcttgtcgtcctctaccttttcagcatcatcacctccttccaaggcttcctcatcttcatctggtactggtccatgcggctgcaggcccggggtggcccctcccctctgaagagcaactcagacagcgccaggctccccatcagctcgggcagcacctcgtccagccgcatctaggcctccagcccacctgcccatgtgatgaagcagagattcggcctcgtcgcacactgcctgtggcccccgagcccggcccagccccaggccagtcagccgcagactttggaaagcccaacgaccatggagagatgggccgttgccatggtggacggactcccgggctgggcttttgaattggccttggggactactcggctctcactcagctcccacgggactcagaagtgcgccgccatgctgcctagggtactgtccccacatctgtcccaacccagctggaggcctggtctctccttacaacccctgggcccagccctcattgctgggggccaggccttggatcttgagggtctggcacatccttaatcctgtgcccctgcctgggacagaaatgtggctccagttgctctgtctctcgtggtcaccctgagggcactctgcatcctctgtcattttaacctcaggtggcacccagggcgaatggggcccagggcagaccttcagggccagagccctggcggaggagaggccctttgccaggagcacagcagcagctcgcctacctctgagcccaggccccctccctccctcagccccccagtcctccctccatcttccctggggttctcctcctctcccagggcctccttgctccttcgttcacagctgggggtccccgattccaatgctgttttttggggagtggtttccaggagctgcctggtgtctgctgtaaatgtttgtctactgcacaagcctcggcctgcccctgagccaggctcggtaccgatgcgtgggctgggctaggtccctctgtccatctgggcctttgtatgagctgcattgcccttgctcaccctgaccaagcacacgcctcagaggggccctcagcctctcctgaagccctcttgtggcaagaactgtggaccatgccagtcccgtctggtttccatcccaccactccaaggactgagactgacctcctctggtgacactggcctagggcctgacactctcctaagaggttctctccaagcccccaaatagctccaggcgccctcggccgcccatcatggttaattctgtccaacaaacacacacgggtagattgctggcctgttgtaggtggtagggacacagatgaccgacctggtcactcctcctgccaacattcagtctggtatgtgaggcgtgcgtgaagcaagaactcctggagctacagggacagggagccatcattcctgcctgggaatcctggaagacttcctgcaggagtcagcgttcaatcttgaccttgaagatgggaaggatgttctttttacgtaccaattcttttgtcttttgatattaaaaagaagtacatgttcattgtagagaatttggaaactgtagaagagaatcaagaagaaaaataaaaatcagctgttgtaatcacctagcaaactgg

SEQ ID NO: 607 - DNA, 560 bp, Homo sapiens
  source 1..560: mol_type = unassigned DNA
ttcaaagtctctgtcctcttgaaaaaaggtggtcgggggacattgacccaccagccccgcaggctactgcctgcaaacaagaacccctcatctgccacgcacgttcttaatgtatctatagtctgcctgatgccacaaaggagtccaggtggtgacttccaagagtgactccgtcggaggaaaatgactccccagtcgctgctgcagacgacactgttcctgctgagtctgctcttcctggtccaagcccaccctgcttcccgatccttccctgaccccaggggcctctaccacttctgcctctactggaaccgacatgctgggagattacatcttctctatggcaagcgtgacttcttgctgagtgacaaagcctctagcctcctctgcttccagcaccaggaggagagcctggctcagggccccccgctgttagccacttctgtcacctcctggtggagccctcagaacatcagcctgcccagtgccgccagcttcaccttctccttccacagtcctccccacacggccgctcacaatgcctcggtggacatgtgcga

SEQ ID NO: 608 - DNA, 525 bp, Homo sapiens
  source 1..525: mol_type = unassigned DNA
aagtccagggcgtgaggggactggaagtgcaggaaagagccaccagtggggctgggatccaaggtcacctggggtctcgctctgtcacacaggctggagtgcagtggtgtgatcttggctcatcgtaacctccacctcccgggttcaagtgattctcatgcctcagcctcccgagtagctgggattacaggtggtgacttccaagagtgactccgtcggaggaaaatgactccccagtcgctgctgcagacgacactgttcctgctgagtctgctcttcctggtccaaggtgcccacggcaggggccacagggaagactttcgcttctgcagccagcggaaccagacacacaggagcagcctccactacaaacccacaccagacctgcgcatctccatcgagaactccgaagaggccctcacagtccatgcccctttccctgcagcccaccctgcttcccgatccttccctgaccccaggggcctctaccacttctgcctctactggaaccgacatgctgggaga

SEQ ID NO: 609 - DNA, 563 bp, Homo sapiens
  source 1..563: mol_type = unassigned DNA
accagtggggctgggatccaaggtcacctgggtgagttctgatgggctccctgatttgggcccttgggaggatggcgtccagctgaacccatggaaacacattgttggaagctttctttactgtgacttttcaagagatgtgctttctaagagtcagggtctcgctctgtcacacaggctggagtgcagtggtgtgatcttggctcatcgtaacctccacctcccgggttcaagtgattctcatgcctcagcctcccgagtagctgggattacaggtggtgacttccaagagtgactccgtcggaggaaaatgactccccagtcgctgctgcagacgacactgttcctgctgagtctgctcttcctggtccaaggtgcccacggcaggggccacagggaagactttcgcttctgcagccagcggaaccagacacacaggagcagcctccactacaaacccacaccagacctgcgcatctccatcgagaactccgaagaggccctcacagtccatgcccctttccctgcagcccaccctgcttcccgatccttccctgacccca

SEQ ID NO: 610 - DNA, 586 bp, Homo sapiens
  source 1..586: mol_type = unassigned DNA
agacaactgaggtccggctgtggtttgagagggaagacagtctagaggggtcaggggagacggttcagcatcctctttgtcccttgctaccagcttggagggtctcgctctgtcacacaggctggagtgcagtggtgtgatcttggctcatcgtaacctccacctcccgggttcaagtgattctcatgcctcagcctcccgagtagctgggattacaggtggtgacttccaagagtgactccgtcggaggaaaatgactccccagtcgctgctgcagacgacactgttcctgctgagtctgctcttcctggtccaaggtgcccacggcaggggccacagggaagactttcgcttctgcagccagcggaaccagacacacaggagcagcctccactacaaacccacaccagacctgcgcatctccatcgagaactccgaagaggccctcacagtccatgcccctttccctgcagcccaccctgcttcccgatccttccctgaccccaggggcctctaccacttctgcctctactggaaccgacatgctgggagattacatcttctctatggcaagcgtgacttcttg

SEQ ID NO: 611 - DNA, 554 bp, Homo sapiens
  source 1..554: mol_type = unassigned DNA
acttggtgagtggaagctgtgatcctccctctcctcttagaatctccctggattccagggcccttttcactgcaccagataagacccctgtttagtcccactcatcatctggtgtcctgccaggcatggggactgggaggatgtgggggcctgaggccaggacactgggactctcacagacgtgtcacaaggttgtcatcacagggaggaggaccagtgtgtgcaaaggcttggaggtggtgacttccaagagtgactccgtcggaggaaaatgactccccagtcgctgctgcagacgacactgttcctgctgagtctgctcttcctggtccaaggtgcccacggcaggggccacagggaagactttcgcttctgcagccagcggaaccagacacacaggagcagcctccactacaaacccacaccagacctgcgcatctccatcgagaactccgaagaggccctcacagtccatgcccctttccctgcagcccaccctgcttcccgatccttccctgaccccaggggcctctaccacttctgcctctactgga

SEQ ID NO: 612 - DNA, 586 bp, Homo sapiens
  source 1..586: mol_type = unassigned DNA
gtcacggggctaagtgctatccaaggcaaagggacaccaaggggcaaaggtggtgacttccaagagtgactccgtcggaggaaaatgactccccagtcgctgctgcagacgacactgttcctgctgagtctgctcttcctggtccaaggtgcccacggcaggggccacagggaagactttcgcttctgcagccagcggaaccagacacacaggagcagcctccactacaaacccacaccagacctgcgcatctccatcgagaactccgaagaggccctcacagtccatgcccctttccctgcagcccaccctgcttcccgatccttccctgaccccaggggcctctaccacttctgcctctactggaaccgacatgctgggagattacatcttctctatggcaagcgtgacttcttgctgagtgacaaagcctctagcctcctctgcttccagcaccaggaggagagcctggctcagggccccccgctgttagccacttctgtcacctcctggtggagccctcagaacatcagcctgcccagtgccgccagcttcaccttctccttccacagtcctccccacacgg

SEQ ID NO: 613 - DNA, 855 bp, Homo sapiens
  source 1..855: mol_type = unassigned DNA
gctatccaaggcaaagggacaccaaggggcaaaggtctgtgggtgggatgcctgtgctcgggggcgggcagtggtcactgtgtgtaaagggaagaaggaagcagtggatggccaggttcgtgggtcttcccggcaggagacagcagagaggcgcctgcccgggaagggttaatcccagagccgtccaggtcctgtccactcaacttccacctccatcctctgaggaaatgggttttccaggagcttggcctgggcagcggtgactcgtggctccacacggaagtgactcaggtcccccgggagaaagcgagccgtgggtccccactgcccaccgtgcagaggggcagggctgagccaggtggtgacttccaagagtgactccgtcggaggaaaatgactccccagtcgctgctgcagacgacactgttcctgctgagtctgctcttcctggtccaaggtgcccacggcaggggccacagggaagactttcgcttctgcagccagcggaaccagacacacaggagcagcctccactacaaacccacaccagacctgcgcatctccatcgagaactccgaagaggccctcacagtccatgcccctttccctgcagcccaccctgcttcccgatccttccctgaccccaggggcctctaccacttctgcctctactggaaccgacatgctgggagattacatcttctctatggcaagcgtgacttcttgctgagtgacaaagcctctagcctcctctgcttccagcaccaggaggagagcctggctcagggccccccgctgttagccacttctgtcacctcctggtggagccctcagaacatcagcctgcccagtgcc

SEQ ID NO: 614 - DNA, 536 bp, Homo sapiens
  source 1..536: mol_type = unassigned DNA
gtgtaaagggaagaaggaagcagtggatggccaggttcgtgggtcttcccggcaggagacagcagagaggcgcctgcccgggaagggttaatcccagagccgtccaggtggtgacttccaagagtgactccgtcggaggaaaatgactccccagtcgctgctgcagacgacactgttcctgctgagtctgctcttcctggtccaaggtgcccacggcaggggccacagggaagactttcgcttctgcagccagcggaaccagacacacaggagcagcctccactacaaacccacaccagacctgcgcatctccatcgagaactccgaagaggccctcacagtccatgcccctttccctgcagcccaccctgcttcccgatccttccctgaccccaggggcctctaccacttctgcctctactggaaccgacatgctgggagattacatcttctctatggcaagcgtgacttcttgctgagtgacaaagcctctagcctcctctgcttccagcaccaggaggagagcctggctcagg

SEQ ID NO: 615 - DNA, 578 bp, Homo sapiens
  source 1..578: mol_type = unassigned DNA
aatcccagagccgtccaggtcctgtccactcaacttccacctccatcctctgaggaaatgggttttccaggagcttggcctgggcagcggtgactcgtggctccacacggaagtgactcaggtcccccgggagaaagcgagccgtgggtccccactgcccaccgtgcagaggggcagggctgagccaggtggtgacttccaagagtgactccgtcggaggaaaatgactccccagtcgctgctgcagacgacactgttcctgctgagtctgctcttcctggtccaagcccctgccacggggtcccatctgcagcctctgcctcctcaggtgcccacggcaggggccacagggaagactttcgcttctgcagccagcggaaccagacacacaggagcagcctccactacaaacccacaccagacctgcgcatctccatcgagaactccgaagaggccctcacagtccatgcccctttccctgcagcccaccctgcttcccgatccttccctgaccccaggggcctctaccacttctgcctctactggaaccgacatgctgggagattacatcttctcta

SEQ ID NO: 616 - DNA, 734 bp, Homo sapiens
  source 1..734: mol_type = unassigned DNA
gcagaggcagggcccttgcctgtggggccgtggttggtactgagcgcctgatggctgaggccctgtagcgctggggatctgcggctccagaggcagagacaggtggtgacttccaagagtgactccgtcggaggaaaatgactccccagtcgctgctgcagacgacactgttcctgctgagtctgctcttcctggtccaaggtgcccacggcaggggccacagggaagactttcgcttctgcagccagcggaaccagacacacaggagcagcctccactacaaacccacaccagacctgcgcatctccatcgagaactccgaagaggccctcacagtccatgcccctttccctgcagcccaccctgcttcccgatccttccctgaccccaggggcctctaccacttctgcctctactggaaccgacatgctgggagattacatcttctctatggcaagcgtgacttcttgctgagtgacaaagcctctagcctcctctgcttccagcaccaggaggagagcctggctcagggccccccgctgttagccacttctgtcacctcctggtggagccctcagaacatcagcctgcccagtgccgccagcttcaccttctccttccacagtcctccccacacggccgctcacaatgcctcggtggacatgtgcgagctcaaaagggacctccagctgctcagccagttcctgaagcatccccagaaggcctcaaggagg

SEQ ID NO: 617 - DNA, 601 bp, Homo sapiens
  source 1..601: mol_type = unassigned DNA
gtggttggtactgagcgcctgatggctgaggccctgtagcgctggggatctgcggctccagaggcagagacaggtggtgacttccaagagtgactccgtcggaggaaaatgactccccagtcgctgctgcagacgacactgttcctgctgagtctgctcttcctggtccaagcctctgcctcctcaggtgcccacggcaggggccacagggaagactttcgcttctgcagccagcggaaccagacacacaggagcagcctccactacaaacccacaccagacctgcgcatctccatcgagaactccgaagaggccctcacagtccatgcccctttccctgcagcccaccctgcttcccgatccttccctgaccccaggggcctctaccacttctgcctctactggaaccgacatgctgggagattacatcttctctatggcaagcgtgacttcttgctgagtgacaaagcctctagcctcctctgcttccagcaccaggaggagagcctggctcagggccccccgctgttagccacttctgtcacctcctggtggagccctcagaacatcagcctgcccagtgccgccagcttcaccttct

SEQ ID NO: 618 - DNA, 533 bp, Homo sapiens
  source 1..533: mol_type = unassigned DNA
ggttggtactgagcgcctgatggctgaggccctgtagcgctggggatctgcggctccagaggcagagacagccatgcctactgacagtgaaggctcactttgaaggtggtgacttccaagagtgactccgtcggaggaaaatgactccccagtcgctgctgcagacgacactgttcctgctgagtctgctcttcctggtccaaggtgcccacggcaggggccacagggaagactttcgcttctgcagccagcggaaccagacacacaggagcagcctccactacaaacccacaccagacctgcgcatctccatcgagaactccgaagaggccctcacagtccatgcccctttccctgcagcccaccctgcttcccgatccttccctgaccccaggggcctctaccacttctgcctctactggaaccgacatgctgggagattacatcttctctatggcaagcgtgacttcttgctgagtgacaaagcctctagcctcctctgcttccagcaccaggaggagagcctggctcag

SEQ ID NO: 619 - DNA, 523 bp, Homo sapiens
  source 1..523: mol_type = unassigned DNA
agcgctggggatctgcggctccagaggcagagacagggccaatccaggagggctgaagtgacacggtggttctgctttgtccttcagccatgcctactgacagtgaaggctcactttgaaggtggtgacttccaagagtgactccgtcggaggaaaatgactccccagtcgctgctgcagacgacactgttcctgctgagtctgctcttcctggtccaaggtgcccacggcaggggccacagggaagactttcgcttctgcagccagcggaaccagacacacaggagcagcctccactacaaacccacaccagacctgcgcatctccatcgagaactccgaagaggccctcacagtccatgcccctttccctgcagcccaccctgcttcccgatccttccctgaccccaggggcctctaccacttctgcctctactggaaccgacatgctgggagattacatcttctctatggcaagcgtgacttcttgctgagtgacaaagcctctagcctcctctgcttcc

SEQ ID NO: 620 - DNA, 545 bp, Homo sapiens
  source 1..545: mol_type = unassigned DNA
acagagatacttagctgagactgatggcacctgcctctaagccgtttacaggtggtgacttccaagagtgactccgtcggaggaaaatgactccccagtcgctgctgcagacgacactgttcctgctgagtctgctcttcctggtccaaggtgcccacggcaggggccacagggaagactttcgcttctgcagccagcggaaccagacacacaggagcagcctccactacaaacccacaccagacctgcgcatctccatcgagaactccgaagaggccctcacagtccatgcccctttccctgcagcccaccctgcttcccgatccttccctgaccccaggggcctctaccacttctgcctctactggaaccgacatgctgggagattacatcttctctatggcaagcgtgacttcttgctgagtgacaaagcctctagcctcctctgcttccagcaccaggaggagagcctggctcagggccccccgctgttagccacttctgtcacctcctggtggagccctcagaacatcagcctgcccagt

SEQ ID NO: 621 - DNA, 602 bp, Homo sapiens
  source 1..602: mol_type = unassigned DNA
cgctacctgggcagaggggcccgagcctggagtcagggaggctggtgggtgtggagtcccaggaaccaccaccaagccccgcacatccctcctaaggaggcctggctgggccctctctgctccgtgtgtgtagccgaaggtgtctgcggagggtgctgagcaaggcacatcccaccccatcccgctggggctggcattgctggcgggttctgtaagacacaacccccacgggttggcctcatctgagtggccttggcagagtccactctgcttcttgaagcctcagtttcccctttgtaaagtaaagatcgaggcattcagagtcatgtcagggtggtagggggcagaatgggagggtcctgggacctgaatcggcagcctcggcgggggcctgtccacccctcccccaggtcctccccacacggccgctcacaatgcctcggtggacatgtgcgagctcaaaagggacctccagctgctcagccagttcctgaagcatccccagaaggcctcaaggaggccctcggctgcccccgccagccagcagttgcagagcctggagtcgaaactgacctctgtgagattcatgggggacatggtgt

SEQ ID NO: 622 - DNA, 561 bp, Homo sapiens
  source 1..561: mol_type = unassigned DNA
ctcggtggacatgtgcgagctcaaaagggacctccagctgctcagccagttcctgaagcatccccagaaggcctcaaggaggccctcggctgcccccgccagccagcagttgcagagcctggagtcgaaactgacctctgtgagattcatgggggacatggtgtccttcgaggaggaccggatcaacgccacggtgtggaagctccagcccacagccggcctccaggacctgcacatccactcccggcaggaggaggagcagagcgagatcatggagtactcggtgctgctgcctcgaacactcttccagaggacgaaaggccggagcggggaggctgagaagagactcctcctggtggacttcagcagccaagccctgttccaggacaagaattccagccaagtcctgggtgagaaggtctttggcacctatgtccctggctacctactcaagctgagcgccatgggctggggcttccccatctttctggtgacgctggtggccctggtggatgtggacaactatggccccatcatcttggctgtgcataggactccaga

SEQ ID NO: 623 - DNA, 3860 bp, Homo sapiens
  source 1..3860: mol_type = unassigned DNA
gagaaatccatgactcacatatatcgtccgtcatccccagtcaagctcagggaggagggaggagcccagctggggcaggagaggggtgtctccccaccaaacaaacccggtccctccctctccgcactagctgtctgccctgccctgccgtaggagatgggctgggagcctcccacgctctccagctcactcggcaggcagcggggaccagggctggcaggttaagcctctgggggtggatcctgaaaggtggtccagccgcctggccctgcgtgggaccctccacctggcagcaggtggtgacttccaagagtgactccgtcggaggaaaatgactccccagtcgctgctgcagacgacactgttcctgctgagtctgctcttcctggtccaagcctctgcctcctcaggtgcccacggcaggggccacagggaagactttcgcttctgcagccagcggaaccagacacacaggagcagcctccactacaaacccacaccagacctgcgcatctccatcgagaactccgaagaggccctcacagtccatgcccctttccctgcagcccaccctgcttcccgatccttccctgaccccaggggcctctaccacttctgcctctactggaaccgacatgctgggagattacatcttctctatggcaagcgtgacttcttgctgagtgacaaagcctctagcctcctctgcttccagcaccaggaggagagcctggctcagggccccccgctgttagccacttctgtcacctcctggtggagccctcagaacatcagcctgcccagtgccgccagcttcaccttctccttccacagtcctccccacacggccgctcacaatgcctcggtggacatgtgcgagctcaaaagggacctccagctgctcagccagttcctgaagcatccccagaaggcctcaaggaggccctcggctgcccccgccagccagcagttgcagagcctggagtcgaaactgacctctgtgagattcatgggggacatggtgtccttcgaggaggaccggatcaacgccacggtgtggaagctccagcccacagccggcctccaggacctgcacatccactcccggcaggaggaggagcagagcgagatcatggagtactcggtgctgctgcctcgaacactcttccagaggacgaaaggccggagcggggaggctgagaagagactcctcctggtggacttcagcagccaagccctgttccaggacaagaattccagccaagtcctgggtgagaaggtcttggggattgtggtacagaacaccaaagtagccaacctcacggagcccgtggtgctcactttccagcaccagctacagccgaagaatgtgactctgcaatgtgtgttctgggttgaagaccccacattgagcagcccggggcattggagcagtgctgggtgtgagaccgtcaggagagaaacccaaacatcctgcttctgcaaccacttgacctactttgcagtgctgatggtctcctcggtggaggtggacgccgtgcacaagcactacctgagcctcctctcctacgtgggctgtgtcgtctctgccctggcctgccttgtcaccattgccgcctacctctgctccaggaggaaacctcgggactacaccatcaaggtgcacatgaacctgctgctggccgtcttcctgctggacacgagcttcctgctcagcgagccggtggccctgacaggctctgaggctggctgccgagccagtgccatcttcctgcacttctccctgctcacctgcctttcctggatgggcctcgaggggtacaacctctaccgactcgtggtggaggtctttggcacctatgtccctggctacctactcaagctgagcgccatgggctggggcttccccatctttctggtgacgctggtggccctggtggatgtggacaactatggccccatcatcttggctgtgcataggactccagagggcgtcatctacccttccatgtgctggatccgggactccctggtcagctacatcaccaacctgggcctcttcagcctggtgtttctgttcaacatggccatgctagccaccatggtggtgcagatcctgcggctgcgcccccacacccaaaagtggtcacatgtgctgacactgctgggcctcagcctggtccttggcctgccctgggccttgatcttcttctcctttgcttctggcaccttccagcttgtcgtcctctaccttttcagcatcatcacctccttccaaggcttcctcatcttcatctggtactggtccatgcggctgcaggcccggggtggcccctcccctctgaagagcaactcagacagcgccaggctccccatcagctcgggcagcacctcgtccagccgcatctaggcctccagcccacctgcccatgtgatgaagcagagattcggcctcgtcgcacactgcctgtggcccccgagcccggcccagccccaggccagtcagccgcagactttggaaagcccaacgaccatggagagatgggccgttgccatggtggacggactcccgggctgggcttttgaattggccttggggactactcggctctcactcagctcccacgggactcagaagtgcgccgccatgctgcctagggtactgtccccacatctgtcccaacccagctggaggcctggtctctccttacaacccctgggcccagccctcattgctgggggccaggccttggatcttgagggtctggcacatccttaatcctgtgcccctgcctgggacagaaatgtggctccagttgctctgtctctcgtggtcaccctgagggcactctgcatcctctgtcattttaacctcaggtggcacccagggcgaatggggcccagggcagaccttcagggccagagccctggcggaggagaggccctttgccaggagcacagcagcagctcgcctacctctgagcccaggccccctccctccctcagccccccagtcctccctccatcttccctggggttctcctcctctcccagggcctccttgctccttcgttcacagctgggggtccccgattccaatgctgttttttggggagtggtttccaggagctgcctggtgtctgctgtaaatgtttgtctactgcacaagcctcggcctgcccctgagccaggctcggtaccgatgcgtgggctgggctaggtccctctgtccatctgggcctttgtatgagctgcattgcccttgctcaccctgaccaagcacacgcctcagaggggccctcagcctctcctgaagccctcttgtggcaagaactgtggaccatgccagtcccgtctggtttccatcccaccactccaaggactgagactgacctcctctggtgacactggcctagggcctgacactctcctaagaggttctctccaagcccccaaatagctccaggcgccctcggccgcccatcatggttaattctgtccaacaaacacacacgggtagattgctggcctgttgtaggtggtagggacacagatgaccgacctggtcactcctcctgccaacattcagtctggtatgtgaggcgtgcgtgaagcaagaactcctggagctacagggacagggagccatcattcctgcctgggaatcctggaagacttcctgcaggagtcagcgttcaatcttgaccttgaagatgggaaggatgttctttttacgtaccaattcttttgtcttttgatattaaaaagaagtacatgttcattgtagagaatttggaaactgtagaagagaatcaagaagaaaaataaaaatcagctgttgtaatcacctagcaaactgg

SEQ ID NO: 624 - DNA, 12636 bp, Homo sapiens
  source 1..12636: mol_type = unassigned DNA
ttcttaagcggcggcggcagcagcagcagcaagagaaggagaagcagccccagctatgactgccgcatgttaatagctgccgctgggtccctcggctgctgctggagacagagcctgactccgaagttgtgcaactgtggactgggagagacatttgaaccctcttttcttttcgctccccttttgcccccttggggtgtgtgaagcgaggaacgtaaaggaaggcgaacatttggctctctttttccttcccctttctccgtggctgtgtagcggaagaaagggaagagagactttttgttgttgtttccttgactggggtctccaccctcctgctgctttctctgcgcttcgattctcgttatttgccgcgtgtggttgggggtgtctgcacaggggccggccggtcttttgccccgggctcaatggctggattgtggaaactgcacccgccttcaggttgttgagcaactgatgggacgatctcagggaccggcgtttacgaaagaaatgtttaatttggtaaattggaggaaaaaaacatggatttttagcaattgaagagcaaattaaggtttcagatttgggatattggtgtttctgttttggagaaattattctttttctttttaatttgaagaaaaatcatcagtcttggaatacagaagagaaactagaaatatacgtattttgtttcacatttgaacagtcattcttgaggaatactccatacctgagtagacagccatgtggccatcgcagctactaattttcatgatgctcttagctccaataattcatgctttcagccgtgccccaattccaatggctgtggtccgcagagagctatcctgtgagagctatcctatagagcttcgctgtccaggaacagacgtcatcatgatagaaagtgccaactatggcaggactgatgacaaaatttgtgactctgaccctgctcagatggagaatatccgatgttatctgccagatgcctataagattatgtctcaaagatgcaataacagaacccagtgtgcagtggtggcaggtcctgatgtttttccagacccgtgtccaggaacctataaataccttgaagtgcagtatgaatgtgtcccttacaaagtggaacaaaaagtttttctttgtcctggactactaaaaggagtataccagagtgaacatttgtttgagtccgaccaccaatctggggcgtggtgcaaagaccctctgcaggcatctgacaagatttattatatgccctggactccctacagaactgataccctgactgagtattcatccaaggatgacttcattgctggaagaccaactacaacctacaagctccctcacagggtggatggcacaggatttgtagtgtatgatggagctttgttcttcaacaaagagcgcaccaggaacatagtaaagtttgatttgcggactaggataaagagtggagaggctatcatagcaaatgccaattaccatgatacctccccttaccgatggggaggcaaatctgacatagacctggcagtagatgagaatgggctatgggtaatctatgcaacagaacaaaacaatggtaaaattgtcattagtcaattgaacccttacaccctacggatcgaaggaacatgggatactgcatatgataaaaggtcagcttccaatgcctttatgatttgtggaattctgtatgtggtcaaatctgtatatgaggatgatgacaatgaggctactggaaataagattgactacatttacaacactgaccaaagcaaggatagtttggtggatgtaccctttcctaattcataccagtacattgcagctgtggattacaaccccagggacaacctactttatgtatggaataactatcacgtcgtgaaatattctttggattttggacctctggatagtagatcagggcaggcacatcatggacaagtttcatacatttctccgccaattcaccttgactctgagctagaaagaccctctgttaaagatatctctaccacaggacctcttggcatgggaagcactaccaccagtaccacccttcggaccacaactttgagcccaggaaggagtaccaccccgtcagtgtcaggaagaagaaaccggagtactagtaccccatctccagctgtcgaggtacttgatgacatgaccacacaccttccatcagcatcgtcccaaatcccagctctcgaagagagctgtgaggctgtggaagcccgagaaatcatgtggtttaagactcgtcaaggacagatagcaaagcagccatgccctgcaggaactataggtgtatcaacttatctatgccttgctcctgatggaatttgggatccccaaggtccagatctcagcaactgttcttctccttgggtcaatcatataacacagaagttgaaatctggtgaaacagctgccaacattgctagagagctggctgaacagacaagaaatcacttgaatgctggggacatcacctactctgtccgggccatggaccagctggtaggcctcctagatgtacagcttcggaacttgaccccaggtggaaaagatagtgctgcccggagtttgaacaagcttcagaaaagagagcgctcttgcagagcctatgtccaggcaatggtcgagacagttaacaacctccttcagccacaagctttgaatgcatggagagacctgactacgagtgatcagctgcgtgcggccaccatgttgcttcatactgtggaggaaagtgcttttgtgctggctgataaccttttgaagactgacattgtcagggagaatacagacaatattaaattggaagttgcaagactgagcacagaaggaaacttagaagacctaaaatttccagaaaacatgggccatggaagcactatccagctgtctgcaaataccttaaagcaaaatggccgaaatggagagatcagagtggcctttgtcctgtataacaacttgggtccttatttatccacggagaatgccagtatgaagttgggaacggaagctttgtccacaaatcattctgttattgtcaattcccctgttattacggcagcaataaacaaagagttcagtaacaaggtttatttggctgatcctgtggtatttactgttaaacatatcaagcagtcagaggaaaatttcaaccctaactgttcattttggagctactccaagcgtacaatgacaggttattggtcaacacaaggctgtcggctcctgacaacaaataagacacatactacatgctcttgtaaccacctaacaaattttgcagtactgatggcacatgtggaagttaagcacagtgatgcggtccatgacctccttctggatgtgatcacgtgggttggaattttgctgtcccttgtttgtctcctgatttgcatcttcacattttgctttttccgggggctccagagtgaccgtaacaccatccacaagaacctctgcatcagtctctttgtagcagagctgctcttcctgattgggatcaaccgaactgaccaaccaattgcctgtgctgttttcgctgccctgttacatttcttcttcttggctgccttcacctggatgttcctggagggggtgcagctttatatcatgctggtggaggtttttgagagtgaacattcacgtaggaaatacttttatctggtcggctatgggatgcctgcactcattgtggctgtgtcagctgcagtagactacaggagttatggaacagataaagtatgttggctccgacttgacacctacttcatttggagttttataggaccagcaactttgataattatgcttaatgtaatcttccttgggattgctttatataaaatgtttcatcatactgctatactgaaacctgaatcaggctgtcttgataacatcaactatgaggataacagacccttcatcaagtcatgggttataggtgcaatagctcttctctgcctattaggattgacctgggcctttggactcatgtatattaatgaaagcacagtcatcatggcctatctcttcaccattttcaattctctacagggaatgtttatatttattttccattgtgtcctacagaagaaggtacgaaaagagtatgggaaatgcctgcgaacacattgctgtagtggcaaaagtacagagagttccattggttcagggaaaacatctggttctcgaactcctggacgctactccacaggctcacagagccgaatccgtagaatgtggaatgacacggttcgaaagcagtcagagtcttcctttattactggagacataaacagttcagcgtcactcaacagagagccctacagagagacaagtatgggagtaaagctaaacattgcatatcaaataggggcttctgaacaatgccagggatacaagtgtcatggatactctaccactgaatggtaaccatggcaatagttacagcattgccagcggcgaatacctgagcaactgtgtgcaaatcatagaccgtggctataaccataacgagaccgccctagagaaaaagattctgaaggaactcacttccaactatatcccttcttacctgaacaaccatgagcgctccagtgaacagaacaggaatctgatgaacaagctggtgaataaccttggcagtggaagggaagatgatgccattgtcctggatgatgccacctcgtttaaccacgaggagagtttgggcctggaactcattcatgaggaatctgatgctcctttgctgcccccaagagtatactccaccgagaaccaccagccacaccattataccagaaggcggatcccccaagaccacagtgagagctttttccctttgctaaccaacgagcacacagaagatctccagtcaccccatagagactctctctataccagcatgccgacactggctggtgtggccgccacagagagtgttaccaccagcacccagaccgaacccccaccggccaaatgtggtgatgccgaagatgtttactacaaaagcatgccaaacctaggctccagaaaccacgtccatcagctgcatacttactaccagctaggtcgcggcagcagtgatggatttatagttcctccaaacaaagatgggacccctcccgagggaagttcaaaaggaccggctcatttggtcactagtctatagaagatgacacagaaattggaaccaacaaaactgctaacaccttgttgactgttctgagttgatataagcagtggtaataatgtgtgtactcctaaatctttatgctgtcctctaaagacaaacacaaactctcagacttttttttttttaatgggatttttaggtcagcccaggggagaaagataactgctaaaattcccctgtaccccatcctttcttgtcctttccccttcagatggagacttcattatgttaatgaacaagatatgaagaaaatggcactcattgtggccttgttgaattatgttgtgtatgttttaacatctctgatgctgtgttactaaaattacaaggacctgctttttaaaaggccagaacaattgtctgaaattagtaacaatgctgcatctagattggagtgctgcacaaacaaacataagagcaaagcaaaactgtatcacatagggtttttggtcactcacaacctgaattcaccacagctggaatagctgtggaaaacaaaataaaacaacaaaattaataatgaaatggaggggaattctagaattatatgctaaatgcatattttatgatttgctgtattaactgatgataaaactaatggcagaaaaagaagttgagcaatttctatgtaatgtacagatactagcattgcacatatagtctgctttctgttcctccagaatttgagtcctgttaatgtagtagaaaaaaaaaaaagaaattttctttttcttttgtgctggtcttgcaagtttgtctaccagtaagagagcaaagtttccttcctttcttctctttcttcattttctttttttcttttttgccttttattcctttaaaatttcgcctggcaaaaaataaataaatggaactatcactttataagaatcattttctagtaatgcaaacaaattattttttacaaaaaaacaaaataaataaaattagacttccttccctcactatatatctttatgcagtcagaatatttccaacagtgttttttgcaaattagagcaggacaaacttttatgtttacagggcacgtctgttgtaatgcaaagcatatttggcaagcagttcatcaccaggacactagctatgattctagaagtcaaaaggtgtctatagaactagtggggcttctgcatgtgaaaaacggttttccataggcattaaagtgctgaatgctcagtctgatcaacaagtgggcacctgcactaccactttttagaggaaattcactccctcgtaagcattggaaggtcaaattattttgaagtgatttttttaaaaaaaagtcttctgtttattaacaggaaaatttatttatttgacaggattttgagtaatgtaggaatacaaaaggtaaattagcagcacatataatttttttttaatttatgatccattttgtatggtctcaaagttggatgacctcattactaatatttgttgtaaaagtgaaacttgtttgccaaccaataaacaactgattgagatttagaagatattgtattgatgtatgtactatatgattaatcagtctttttatttttctcgcctttctttctttctgttttcaatacataaactttgctaatcctctgtggcccaaatgagccatgcaaaagaaatcaatctgcctagatgaataagctaagcacaaaatcatacaggtttgcagacaaagtaaaccagaaaaatggaatgggcatgtttattttggatgaaatcagatgcataacttaatgttgagcaggttaacatatatgttactatttgcttatctataaaccagctgcagtcactatgcttacctttaaaaccagattcaatcagagatataaatatgaaatttgggggctgggtgagtcatattttttcctcctttgtacattgcattttgatgttagaaattcaaattccctcaatttgctaaaagctgcaaagagaatattcattttataaagatataataagacttttattgtgtttttttcttattctatatatgagggaaatcggaaaagataaagaagttctttcaaagaaactttctagatctctcattactgcagatcctttatagcagtgtccaagtacagatcccctgttagggcaaagctaaaaggaacctgccaaattataatttctcctgtagtgtgttttatctcggggtttcctttttcaaaaatctaaacactatccatctataaatgactatcttaaatcaagtttagagaatggccaataatctgtatatagtttataaatacatgacaaaaaaatttctgctgagccagagtgcatcataaccttcacatcacctcaaaatattttatgtctcattcttttttagtgaattggcatgaatattttttaagtctacagattttatgttagaggagaatcacaagcgttaatgataattaggttttctcacaccacactatggcaatattagcacgtccaaggcttttaacccacccgatacatagaatacatttggcaataaaagaatcctttttagatgtgtttatggtaacttcagaaacacaaatgtggtctgtggattatgagcacttatgcttgttttgtcaaacagtaacctacatgaaagcaactctatcagtaagaagctggtttcacagaaaaatggggaaactacctcaattcagcttgctgattttctgacattgctacctccctgcccattatttttgtgtttctatatggaaatttgaagcaggtagcttctcaagctctacatagaccaaactgaagaaagatcacttgaatacacaaactggtgcagaagaacattcagcatataaagttactaccaagctcttgcatcaagaaaaaagagtgagatttttgaactctatacatcataaatggcatgctttcagagagacttaagatcccaaagattataacagagagaaatttcccctgcaagtattatgtaaccgtaattaaaaaaaatggataaaggagctaattttacatacatttcaatagaaatttgcatatatctaacatattcattttgtcctgtttacactagcaagggttgaattcctgaacttgaatctttttcttcatatacattttcttatagagctattgatgaattaattaatgattttttaattgttcttttttctaccaccttttgtgactcaattttttaagatcctgagacatttatgacctgcttatctgtatatttttatgtgttcatctgaatttccagtaagaagtaaatttccgtcaaacagatgtagtataccgctataatacagcttatttagccagctagaagtaaaacttatgccaccgaaacaaacaaatgattactttcttgtcaaataatatttttgtcacatttttagacttggttgtttttcctctttgaaatctagttcacatgacactttatcagggacactagctaatggacctcatgtttagttaattctgaaactgatggattgttgcacagcctctgctcctaactgataaatatttgcggcaaagtccaaattttgtgaaggagaaattggttggaattaaattttatgggcgtcccttcttgtttccactatattataattaaacacactgaagttgaataataaattactgtgctaaaataattgtaataacaaaaatgaactgacagaacaattatcttgaagtaacaataatcaggaaaatatctaacaaaaagcacgtaagggaaatatccttaacttcctgtaaaaaaaattcacattgactctaaattaagatgtagtttatcatctgtattttaaaatatccatcataactaaaaatgttgacatattaaggaaaggatctttaagatctaggtttaagattcttattagtattaacttaattggtatgacaaaacttttcataatagatataagcatataagggaattagtaacatttataaaggacccacatatttaattttaggcattgtcttcagcttccctggacccccaacacatgttgaaatgttattgactagcttgctttttttaaggaatgacattaaaaatttcgactgactttctacattactgtaaagatcaaaagggagaggaaaaatagtttacaagttttctaaagatcaactccagactaatctatatcatcccctaataatgaaaaaacaattagtttttagaagttgtctatcagtactgtaccgaagtgctactgcttggatttttttgttgtggttttaaagagatggggtcttgctctgtcacaaagactgaagggcagtggcacaatcccagctcactgcagcctcagactcttgggctcaagtgatcctgctgtctcagccttctgcgtagccatgatcacaggtttgagccacagcacttggcctgtgatgtattgcagagggaaaaaaaccaacactacagaagtataatgcatgtcaattcagatttagagagtgtaaaaaacaaaaacccaaagtccaactatttagttttgagcaaatctgaagatattggcatgaatatcctttcttctctaagaaaatttttgagataacaatatatatgaagttcccagtacattgtagaccaaggtgttaaaatttaattagttcatttttagtaattcataattttaacttaccacataaacaattactatgcatttctaagtaacgttttcaatatagcttatattagatttctgcacatcattaaattacgaagatggcacaaaagcaaagcagcaacattgcacaatagcttatggaagcatttttgtgcgaatggattttacataagaagcttttctgagctcataaaatatattcaatggatcccaacattaaatttaactttgcaatcagcaaatatgttctttataacatcttaaaaatattaaacaattaaattttcatttgtaggctagcagaacttaaatgtgttggtagttgcttctttcctgattaggccataagaagaaactttcctatttactaattaacactgattacactctctttggtttaaaagggaaactttcacctgtacacatacacactctgattccatttatttacagcctgcagaagaagtagcttgtttacgatatttaaaactttgtgatttctgcaataaaacaggtagttaatatagtttcgcataatctcattgaaagatattgctattccttctttatttaaaaaaaaatttaaaagtcagcacttctttcacatctagcacctataagttactattcaaatgtcttgatttcagctaagttttgatgtttctttttctcttaatagtatgtcaaaagcattgttctcatttgataatttgtgtcccgttacagtatttcaaaggtaaatgcaaactaatttttaggaaggcttgtgaaagaactttgatttatgtgaagaaatcaagaaagactatacatgaacaaatctctattgggataaacaagtctcttcaaccacaatatgaacaacggaagagcagaaaccaaacaagttagcaaacttatggtaaggtgacaggacctaaactagagttacagagaaaagttttccaggaaagaataatgaagtcatttgtagtgataaaaatcttatacactacaccaaatgttacagatgtattccgaaaagtaaaatgggagtttcctatattctgatttcattctgctaattccacgggaaacattaaatactttaaacactcttgagatatttcgtatctagctataccttgtctcaaggaaacatcaatattttataaatgtttcttaaatataagtattttgtctgaattcatcttcactctctaatctgctggctctattgaacaccaacagagttaatgcttttagtagctttgtaccttttaaagctctattatgaatctttctaatacatatgaaattaatattatattagaattatgtacattatacaaaataattcataaccaagaaatattcatactatagaataatttattattatatatatgaatattacattgagactgaacaaataaccactctgctccaaatattactctcaagttctctgcctttaattattatagtcaattcataaaattctacatacagttgtacatggtgggttatcaaagtactccataatccaaatgcatctaaaagtattccaaatgcgcctttcattctagaatactaaaggaaagcgtttgaaagaagaggaaagtaaagcagacttctaactatttaatttaaacattgccattcagattgaataatttttaaatgatgatgctccactctttgatctacagacaaggttacaaaagatttacaattagtccaaaatcagaggattttaaatcttaaaggagttaagtttgtctcaatgatccaagactacaaaatttcttgctacattggcaaggaaatatgtttaaagccgagaactaaaatagctttttaaaatttaaaaattcctctgtttcttctgaatgtaaaacaggcaaaatgatcctgacttcaaaatgaaatatattgattgctctcaaaagatgtttgacaaagttaagtcagtatcttcaatgctttaacagtaggtagaggtctttggggttggaactcaggatacagtgactaggacagagtgcattcttaggctaattagtgcctagtcctctggagtattttttaatgccctgaatttcaagttgtcaaactggtttacatattgaatgacattttgaatcaataaaaatgagaaaaaaacatttaaatttggttttcatgactcatttgagaataaagatttccttcatcaccctaagtaataaaagctgatatgtcttgaaacaactatagacaatcagaatgtgttcatttataaagtatcactggtttgtatattttaatgctgacctttgcctgtgaactagaaaatcaagatttgtagagtcaggttgatttgccttcatttaattcctgcaaatgcattggaagtggatggataacttggaactttttccatactgttttccccctcaccaagcattaaatctaattcaaaatatgtctttctaaaaaacaatagtttatttttaaaactaacaactaattgtgttattccttgttgataagaaagtcactttttagaaacaagaatatagctattgtggctttggtcgcttaggattctcatatatttacacatggcattattcttttcatatacacctaccagatttcaagctattggatatttcccttgtacaacctttacatcctttttttttccttaaatgctctgtacaatcacatgtaaagtcatgagctacaaacctcaataaaaatatcagtaaacaagaa

SEQ ID NO: 625 - DNA, 527 bp, Homo sapiens
  source 1..527: mol_type = unassigned DNA
gtcttttgccccgggctcaatggctggattgtggaaactgcacccgccttcaggttgttgagcaactgatgggacgatctcagggaccggcgtttacgaaagaaatgtttaatttggtaaattggaggaaaaaaacatggatttttagcaattgaagagcaaattaagccacagtggaaacagcaatccttcaatggccaccccttgctctttcacaaactagtgtgtgggcctggaatgtataacctcaccttccctgtcacaacaactcctccgtgaatttcacagcttctctgaaggtttcagcgcctccagcagaagtgaactgctcccacctttctttcttcagcagtctgtcaggaactctcaaaatgtgcacaatagtatctgcagtacttcatctttctcactagtttttaatatgtccacagcaaacatatctaagtttgtttggattaatttttgtaaaaaggatgattgcctgagcatgttttgtatattgatttatttcaccaacattaagtacc

SEQ ID NO: 626 - DNA, 6297 bp, Homo sapiens
  source 1..6297: mol_type = unassigned DNA
agaaagcggacaggagggcgacttttctccgtcaggctggaactggtgccgctggaggcgggagcgggctggaggacggacagggtctggaaatgtttaatttggtaaattggaggaaaaaaacatggatttttagcaattgaagagcaaattaaggtttcagatttgggatattggtgtttctgttttggagaaattattctttttctttttaatttgaagaaaaatcatcagtcttggaatacagaagagaaactagaaatatacgtattttgtttcacatttgaacagtcattcttgaggaatactccatacctgagtagacagccatgtggccatcgcagctactaattttcatgatgctcttagctccaataattcatgctttcagccgtgccccaattccaatggctgtggtccgcagagagctatcctgtgagagctatcctatagagcttcgctgtccaggaacagacgtcatcatgatagaaagtgccaactatggcaggactgatgacaaaatttgtgactctgaccctgctcagatggagaatatccgatgttatctgccagatgcctataagattatgtctcaaagatgcaataacagaacccagtgtgcagtggtggcaggtcctgatgtttttccagacccgtgtccaggaacctataaataccttgaagtgcagtatgaatgtgtcccttacaaagtggaacaaaaagtttttctttgtcctggactactaaaaggagtataccagagtgaacatttgtttgagtccgaccaccaatctggggcgtggtgcaaagaccctctgcaggcatctgacaagatttattatatgccctggactccctacagaactgataccctgactgagtattcatccaaggatgacttcattgctggaagaccaactacaacctacaagctccctcacagggtggatggcacaggatttgtagtgtatgatggagctttgttcttcaacaaagagcgcaccaggaacatagtaaagtttgatttgcggactaggataaagagtggagaggctatcatagcaaatgccaattaccatgatacctccccttaccgatggggaggcaaatctgacatagacctggcagtagatgagaatgggctatgggtaatctatgcaacagaacaaaacaatggtaaaattgtcattagtcaattgaacccttacaccctacggatcgaaggaacatgggatactgcatatgataaaaggtcagcttccaatgcctttatgatttgtggaattctgtatgtggtcaaatctgtatatgaggatgatgacaatgaggctactggaaataagattgactacatttacaacactgaccaaagcaaggatagtttggtggatgtaccctttcctaattcataccagtacattgcagctgtggattacaaccccagggacaacctactttatgtatggaataactatcacgtcgtgaaatattctttggattttggacctctggatagtagatcagggcaggcacatcatggacaagtttcatacatttctccgccaattcaccttgactctgagctagaaagaccctctgttaaagatatctctaccacaggacctcttggcatgggaagcactaccaccagtaccacccttcggaccacaactttgagcccaggaaggagtaccaccccgtcagtgtcaggaagaagaaaccggagtactagtaccccatctccagctgtcgaggtacttgatgacatgaccacacaccttccatcagcatcgtcccaaatcccagctctcgaagagagctgtgaggctgtggaagcccgagaaatcatgtggtttaagactcgtcaaggacagatagcaaagcagccatgccctgcaggaactataggtgtatcaacttatctatgccttgctcctgatggaatttgggatccccaaggtccagatctcagcaactgttcttctccttgggtcaatcatataacacagaagttgaaatctggtgaaacagctgccaacattgctagagagctggctgaacagacaagaaatcacttgaatgctggggacatcacctactctgtccgggccatggaccagctggtaggcctcctagatgtacagcttcggaacttgaccccaggtggaaaagatagtgctgcccggagtttgaacaagcttcagaaaagagagcgctcttgcagagcctatgtccaggcaatggtcgagacagttaacaacctccttcagccacaagctttgaatgcatggagagacctgactacgagtgatcagctgcgtgcggccaccatgttgcttcatactgtggaggaaagtgcttttgtgctggctgataaccttttgaagactgacattgtcagggagaatacagacaatattaaattggaagttgcaagactgagcacagaaggaaacttagaagacctaaaatttccagaaaacatgggccatggaagcactatccagctgtctgcaaataccttaaagcaaaatggccgaaatggagagatcagagtggcctttgtcctgtataacaacttgggtccttatttatccacggagaatgccagtatgaagttgggaacggaagctttgtccacaaatcattctgttattgtcaattcccctgttattacggcagcaataaacaaagagttcagtaacaaggtttatttggctgatcctgtggtatttactgttaaacatatcaagcagtcagaggaaaatttcaaccctaactgttcattttggagctactccaagcgtacaatgacaggttattggtcaacacaaggctgtcggctcctgacaacaaataagacacatactacatgctcttgtaaccacctaacaaattttgcagtactgatggcacatgtggaagttaagcacagtgatgcggtccatgacctccttctggatgtgatcacgtgggttggaattttgctgtcccttgtttgtctcctgatttgcatcttcacattttgctttttccgggggctccagagtgaccgtaacaccatccacaagaacctctgcatcagtctctttgtagcagagctgctcttcctgattgggatcaaccgaactgaccaaccaattgcctgtgctgttttcgctgccctgttacatttcttcttcttggctgccttcacctggatgttcctggagggggtgcagctttatatcatgctggtggaggtttttgagagtgaacattcacgtaggaaatacttttatctggtcggctatgggatgcctgcactcattgtggctgtgtcagctgcagtagactacaggagttatggaacagataaagtatgttggctccgacttgacacctacttcatttggagttttataggaccagcaactttgataattatgcttaatgtaatcttccttgggattgctttatataaaatgtttcatcatactgctatactgaaacctgaatcaggctgtcttgataacatcaactatgaggataacagacccttcatcaagtcatgggttataggtgcaatagctcttctctgcctattaggattgacctgggcctttggactcatgtatattaatgaaagcacagtcatcatggcctatctcttcaccattttcaattctctacagggaatgtttatatttattttccattgtgtcctacagaagaaggtacgaaaagagtatgggaaatgcctgcgaacacattgctgtagtggcaaaagtacagagagttccattggttcagggaaaacatctggttctcgaactcctggacgctactccacaggctcacagagccgaatccgtagaatgtggaatgacacggttcgaaagcagtcagagtcttcctttattactggagacataaacagttcagcgtcactcaacagagaggggcttctgaacaatgccagggatacaagtgtcatggatactctaccactgaatggtaaccatggcaatagttacagcattgccagcggcgaatacctgagcaactgtgtgcaaatcatagaccgtggctataaccataacgagaccgccctagagaaaaagattctgaaggaactcacttccaactatatcccttcttacctgaacaaccatgagcgctccagtgaacagaacaggaatctgatgaacaagctggtgaataaccttggcagtggaagggaagatgatgccattgtcctggatgatgccacctcgtttaaccacgaggagagtttgggcctggaactcattcatgaggaatctgatgctcctttgctgcccccaagagtatactccaccgagaaccaccagccacaccattataccagaaggcggatcccccaagaccacagtgagagctttttccctttgctaaccaacgagcacacagaagatctccagtcaccccatagagactctctctataccagcatgccgacactggctggtgtggccgccacagagagtgttaccaccagcacccagaccgaacccccaccggccaaatgtggtgatgccgaagatgtttactacaaaagcatgccaaacctaggctccagaaaccacgtccatcagctgcatacttactaccagctaggtcgcggcagcagtgatggatttatagttcctccaaacaaagatgggacccctcccgagggaagttcaaaaggaccggctcatttggtcactagtctatagaagatgacacagaaattggaaccaacaaaactgctaacaccttgttgactgttctgagttgatataagcagtggtaataatgtgtgtactcctaaatctttatgctgtcctctaaagacaaacacaaactctcagacttttttttttttaatgggatttttaggtcagcccaggggagaaagataactgctaaaattcccctgtaccccatcctttcttgtcctttccccttcagatggagacttcattatgttaatgaacaagatatgaagaaaatggcactcattgtggccttgttgaattatgttgtgtatgttttaacatctctgatgctgtgttactaaaattacaaggacctgctttttaaaaggccagaacaattgtctgaaattagtaacaatgctgcatctagattggagtgctgcacaaacaaacataagagcaaagcaaaactgtatcacatagggtttttggtcactcacaacctgaattcaccacagctggaatagctgtggaaaacaaaataaaacaacaaaattaataatgaaatggaggggaattctagaattatatgctaaatgcatattttatgatttgctgtattaactgatgataaaactaatggcagaaaaagaagttgagcaatttctatgtaatgtacagatactagcattgcacatatagtctgctttctgttcctccagaatttgagtcctgttaatgtagtagaaaaaaaaaaaagaaattttctttttcttttgtgctggtcttgcaagtttgtctaccagtaagagagcaaagtttccttcctttcttctctttcttcattttctttttttcttttttgccttttattcctttaaaatttcgcctggcaaaaaataaataaatggaactatcactttataagaatcattttctagtaatgcaaacaaattattttttacaaaaaaacaaaataaataaaattagacttccttccctcactatatatctttatgcagtcagaatatttccaacagtgttttttgcaaattagagcaggacaaacttttatgtttacagggcacgtctgttgtaatgcaaagcatatttggcaagcagttcatcaccaggacactagctatgattctagaagtcaaaaggtgtctatagaactagtggggcttctgcatgtgaaaaacggttttccataggcattaaagtgctgaatgctcagtctgatcaacaagtgggcacctgcactaccactttttagaggaaattcactccctcgtaagcattggaaggtcaaattattttgaagtgatttttttaaaaaaaagtcttctgtttattaacaggaaaatttatttatttgacaggattttgagtaatgtaggaatacaaaaggtaaattagcagcacatataatttttttttaatttatgatccattttgtatggtctcaaagttggatgacctcattactaatatttgttgtaaaagtgaaacttgtttgccaaccaataaacaactgattgagatttagaagatattgtattgatgtatgtactat

SEQ ID NO: 627 - DNA, 5069 bp, Homo sapiens
  source 1..5069: mol_type = unassigned DNA
gtttcagatttgggatattggtgtttctgttttggagaaattattctttttctttttaatttgaagaaaaatcatcagtcttggaatacagaagagaaactagaaatatacgtattttgtttcacatttgaacagtcattcttgaggaatactccatacctgagtagacagccatgtggccatcgcagctactaattttcatgatgctcttagctccaataattcatggtggcaagcacagtgaacgacatcctgcccttgctgctccattgcgacacgctgagcgcagcccaggaggcgctcttccacccagacatctgcttcagcagccagctgcagagcgcaccgctgctcatcgtggacaagggccccgtggagctaccagaggagttcgcggtccaggtgcccaaggagcacagattgcagcgcaagctttcagccgtgccccaattccaatggctgtggtccgcagagagctatcctgtgagagctatcctatagagcttcgctgtccaggaacagacgtcatcatgatagaaagtgccaactatggcaggactgatgacaaaatttgtgactctgaccctgctcagatggagaatatccgatgttatctgccagatgcctataagattatgtctcaaagatgcaataacagaacccagtgtgcagtggtggcaggtcctgatgtttttccagacccgtgtccaggaacctataaataccttgaagtgcagtatgaatgtgtcccttacaaagtggaacaaaaagtttttctttgtcctggactactaaaaggagtataccagagtgaacatttgtttgagtccgaccaccaatctggggcgtggtgcaaagaccctctgcaggcatctgacaagatttattatatgccctggactccctacagaactgataccctgactgagtattcatccaaggatgacttcattgctggaagaccaactacaacctacaagctccctcacagggtggatggcacaggatttgtagtgtatgatggagctttgttcttcaacaaagagcgcaccaggaacatagtaaagtttgatttgcggactaggataaagagtggagaggctatcatagcaaatgccaattaccatgatacctccccttaccgatggggaggcaaatctgacatagacctggcagtagatgagaatgggctatgggtaatctatgcaacagaacaaaacaatggtaaaattgtcattagtcaattgaacccttacaccctacggatcgaaggaacatgggatactgcatatgataaaaggtcagcttccaatgcctttatgatttgtggaattctgtatgtggtcaaatctgtatatgaggatgatgacaatgaggctactggaaataagattgactacatttacaacactgaccaaagcaaggatagtttggtggatgtaccctttcctaattcataccagtacattgcagctgtggattacaaccccagggacaacctactttatgtatggaataactatcacgtcgtgaaatattctttggattttggacctctggatagtagatcagggcaggcacatcatggacaagtttcatacatttctccgccaattcaccttgactctgagctagaaagaccctctgttaaagatatctctaccacaggacctcttggcatgggaagcactaccaccagtaccacccttcggaccacaactttgagcccaggaaggagtaccaccccgtcagtgtcaggaagaagaaaccggagtactagtaccccatctccagctgtcgaggtacttgatgacatgaccacacaccttccatcagcatcgtcccaaatcccagctctcgaagagagctgtgaggctgtggaagcccgagaaatcatgtggtttaagactcgtcaaggacagatagcaaagcagccatgccctgcaggaactataggtgtatcaacttatctatgccttgctcctgatggaatttgggatccccaaggtccagatctcagcaactgttcttctccttgggtcaatcatataacacagaagttgaaatctggtgaaacagctgccaacattgctagagagctggctgaacagacaagaaatcacttgaatgctggggacatcacctactctgtccgggccatggaccagctggtaggcctcctagatgtacagcttcggaacttgaccccaggtggaaaagatagtgctgcccggagtttgaacaagcttcagaaaagagagcgctcttgcagagcctatgtccaggcaatggtcgagacagttaacaacctccttcagccacaagctttgaatgcatggagagacctgactacgagtgatcagctgcgtgcggccaccatgttgcttcatactgtggaggaaagtgcttttgtgctggctgataaccttttgaagactgacattgtcagggagaatacagacaatattaaattggaagttgcaagactgagcacagaaggaaacttagaagacctaaaatttccagaaaacatgggccatggaagcactatccagctgtctgcaaataccttaaagcaaaatggccgaaatggagagatcagagtggcctttgtcctgtataacaacttgggtccttatttatccacggagaatgccagtatgaagttgggaacggaagctttgtccacaaatcattctgttattgtcaattcccctgttattacggcagcaataaacaaagagttcagtaacaaggtttatttggctgatcctgtggtatttactgttaaacatatcaagcagtcagaggaaaatttcaaccctaactgttcattttggagctactccaagcgtacaatgacaggttattggtcaacacaaggctgtcggctcctgacaacaaataagacacatactacatgctcttgtaaccacctaacaaattttgcagtactgatggcacatgtggaagttaagcacagtgatgcggtccatgacctccttctggatgtgatcacgtgggttggaattttgctgtcccttgtttgtctcctgatttgcatcttcacattttgctttttccgggggctccagagtgaccgtaacaccatccacaagaacctctgcatcagtctctttgtagcagagctgctcttcctgattgggatcaaccgaactgaccaaccaattgcctgtgctgttttcgctgccctgttacatttcttcttcttggctgccttcacctggatgttcctggagggggtgcagctttatatcatgctggtggaggtttttgagagtgaacattcacgtaggaaatacttttatctggtcggctatgggatgcctgcactcattgtggctgtgtcagctgcagtagactacaggagttatggaacagataaagtatgttggctccgacttgacacctacttcatttggagttttataggaccagcaactttgataattatgcttaatgtaatcttccttgggattgctttatataaaatgtttcatcatactgctatactgaaacctgaatcaggctgtcttgataacatcaactatgaggataacagacccttcatcaagtcatgggttataggtgcaatagctcttctctgcctattaggattgacctgggcctttggactcatgtatattaatgaaagcacagtcatcatggcctatctcttcaccattttcaattctctacagggaatgtttatatttattttccattgtgtcctacagaagaaggtacgaaaagagtatgggaaatgcctgcgaacacattgctgtagtggcaaaagtacagagagttccattggttcagggaaaacatctggttctcgaactcctggacgctactccacaggctcacagagccgaatccgtagaatgtggaatgacacggttcgaaagcagtcagagtcttcctttattactggagacataaacagttcagcgtcactcaacagagagccctacagagagacaagtatgggagtaaagctaaacattgcatatcaaataggggcttctgaacaatgccagggatacaagtgtcatggatactctaccactgaatggtaaccatggcaatagttacagcattgccagcggcgaatacctgagcaactgtgtgcaaatcatagaccgtggctataaccataacgagaccgccctagagaaaaagattctgaaggaactcacttccaactatatcccttcttacctgaacaaccatgagcgctccagtgaacagaacaggaatctgatgaacaagctggtgaataaccttggcagtggaagggaagatgatgccattgtcctggatgatgccacctcgtttaaccacgaggagagtttgggcctggaactcattcatgaggaatctgatgctcctttgctgcccccaagagtatactccaccgagaaccaccagccacaccattataccagaaggcggatcccccaagaccacagtgagagctttttccctttgctaaccaacgagcacacagaagatctccagtcaccccatagagactctctctataccagcatgccgacactggctggtgtggccgccacagagagtgttaccaccagcacccagaccgaacccccaccggccaaatgtggtgatgccgaagatgtttactacaaaagcatgccaaacctaggctccagaaaccacgtccatcagctgcatacttactaccagctaggtcgcggcagcagtgatggatttatagttcctccaaacaaagatgggacccctcccgagggaagttcaaaaggaccggctcatttggtcactagtctatagaagatgacacagaaattggaaccaacaaaactgctaacaccttgttgactgttctgagttgatataagcagtggtaataatgtgtgtactcctaaatctttatgctgtcctctaaagacaaacacaaactctcagacttttttttttttaatgggatttttaggtcagcccaggggagaaagataactgctaaaattcccctgtaccccatcctttcttgtcctttcccc

SEQ ID NO: 628 - DNA, 5042 bp, Homo sapiens
  source 1..5042: mol_type = unassigned DNA
gtttcagatttgggatattggtgtttctgttttggagaaattattctttttctttttaatttgaagaaaaatcatcagtcttggaatacagaagagaaactagaaatatacgtattttgtttcacatttgaacagtcattcttgaggaatactccatacctgagtagacagccatgtggccatcgcagctactaattttcatgatgctcttagctccaataattcatggtggcaagcacagtgaacgacatcctgcccttgctgctccattgcgacacgctgagcgcagcccaggaggcgctcttccacccagacatctgcttcagcagccagctgcagagcgcaccgctgctcatcgtggacaagggccccgtggagctaccagaggagttcgcggtccaggtgcccaaggagcacagattgcagcgcaagctttcagccgtgccccaattccaatggctgtggtccgcagagagctatcctgtgagagctatcctatagagcttcgctgtccaggaacagacgtcatcatgatagaaagtgccaactatggcaggactgatgacaaaatttgtgactctgaccctgctcagatggagaatatccgatgttatctgccagatgcctataagattatgtctcaaagatgcaataacagaacccagtgtgcagtggtggcaggtcctgatgtttttccagacccgtgtccaggaacctataaataccttgaagtgcagtatgaatgtgtcccttacaaagtggaacaaaaagtttttctttgtcctggactactaaaaggagtataccagagtgaacatttgtttgagtccgaccaccaatctggggcgtggtgcaaagaccctctgcaggcatctgacaagatttattatatgccctggactccctacagaactgataccctgactgagtattcatccaaggatgacttcattgctggaagaccaactacaacctacaagctccctcacagggtggatggcacaggatttgtagtgtatgatggagctttgttcttcaacaaagagcgcaccaggaacatagtaaagtttgatttgcggactaggataaagagtggagaggctatcatagcaaatgccaattaccatgatacctccccttaccgatggggaggcaaatctgacatagacctggcagtagatgagaatgggctatgggtaatctatgcaacagaacaaaacaatggtaaaattgtcattagtcaattgaacccttacaccctacggatcgaaggaacatgggatactgcatatgataaaaggtcagcttccaatgcctttatgatttgtggaattctgtatgtggtcaaatctgtatatgaggatgatgacaatgaggctactggaaataagattgactacatttacaacactgaccaaagcaaggatagtttggtggatgtaccctttcctaattcataccagtacattgcagctgtggattacaaccccagggacaacctactttatgtatggaataactatcacgtcgtgaaatattctttggattttggacctctggatagtagatcagggcaggcacatcatggacaagtttcatacatttctccgccaattcaccttgactctgagctagaaagaccctctgttaaagatatctctaccacaggacctcttggcatgggaagcactaccaccagtaccacccttcggaccacaactttgagcccaggaaggagtaccaccccgtcagtgtcaggaagaagaaaccggagtactagtaccccatctccagctgtcgaggtacttgatgacatgaccacacaccttccatcagcatcgtcccaaatcccagctctcgaagagagctgtgaggctgtggaagcccgagaaatcatgtggtttaagactcgtcaaggacagatagcaaagcagccatgccctgcaggaactataggtgtatcaacttatctatgccttgctcctgatggaatttgggatccccaaggtccagatctcagcaactgttcttctccttgggtcaatcatataacacagaagttgaaatctggtgaaacagctgccaacattgctagagagctggctgaacagacaagaaatcacttgaatgctggggacatcacctactctgtccgggccatggaccagctggtaggcctcctagatgtacagcttcggaacttgaccccaggtggaaaagatagtgctgcccggagtttgaacaagcttcagaaaagagagcgctcttgcagagcctatgtccaggcaatggtcgagacagttaacaacctccttcagccacaagctttgaatgcatggagagacctgactacgagtgatcagctgcgtgcggccaccatgttgcttcatactgtggaggaaagtgcttttgtgctggctgataaccttttgaagactgacattgtcagggagaatacagacaatattaaattggaagttgcaagactgagcacagaaggaaacttagaagacctaaaatttccagaaaacatgggccatggaagcactatccagctgtctgcaaataccttaaagcaaaatggccgaaatggagagatcagagtggcctttgtcctgtataacaacttgggtccttatttatccacggagaatgccagtatgaagttgggaacggaagctttgtccacaaatcattctgttattgtcaattcccctgttattacggcagcaataaacaaagagttcagtaacaaggtttatttggctgatcctgtggtatttactgttaaacatatcaagcagtcagaggaaaatttcaaccctaactgttcattttggagctactccaagcgtacaatgacaggttattggtcaacacaaggctgtcggctcctgacaacaaataagacacatactacatgctcttgtaaccacctaacaaattttgcagtactgatggcacatgtggaagttaagcacagtgatgcggtccatgacctccttctggatgtgatcacgtgggttggaattttgctgtcccttgtttgtctcctgatttgcatcttcacattttgctttttccgggggctccagagtgaccgtaacaccatccacaagaacctctgcatcagtctctttgtagcagagctgctcttcctgattgggatcaaccgaactgaccaaccaattgcctgtgctgttttcgctgccctgttacatttcttcttcttggctgccttcacctggatgttcctggagggggtgcagctttatatcatgctggtggaggtttttgagagtgaacattcacgtaggaaatacttttatctggtcggctatgggatgcctgcactcattgtggctgtgtcagctgcagtagactacaggagttatggaacagataaagtatgttggctccgacttgacacctacttcatttggagttttataggaccagcaactttgataattatgcttaatgtaatcttccttgggattgctttatataaaatgtttcatcatactgctatactgaaacctgaatcaggctgtcttgataacatcaagtcatgggttataggtgcaatagctcttctctgcctattaggattgacctgggcctttggactcatgtatattaatgaaagcacagtcatcatggcctatctcttcaccattttcaattctctacagggaatgtttatatttattttccattgtgtcctacagaagaaggtacgaaaagagtatgggaaatgcctgcgaacacattgctgtagtggcaaaagtacagagagttccattggttcagggaaaacatctggttctcgaactcctggacgctactccacaggctcacagagccgaatccgtagaatgtggaatgacacggttcgaaagcagtcagagtcttcctttattactggagacataaacagttcagcgtcactcaacagagagccctacagagagacaagtatgggagtaaagctaaacattgcatatcaaataggggcttctgaacaatgccagggatacaagtgtcatggatactctaccactgaatggtaaccatggcaatagttacagcattgccagcggcgaatacctgagcaactgtgtgcaaatcatagaccgtggctataaccataacgagaccgccctagagaaaaagattctgaaggaactcacttccaactatatcccttcttacctgaacaaccatgagcgctccagtgaacagaacaggaatctgatgaacaagctggtgaataaccttggcagtggaagggaagatgatgccattgtcctggatgatgccacctcgtttaaccacgaggagagtttgggcctggaactcattcatgaggaatctgatgctcctttgctgcccccaagagtatactccaccgagaaccaccagccacaccattataccagaaggcggatcccccaagaccacagtgagagctttttccctttgctaaccaacgagcacacagaagatctccagtcaccccatagagactctctctataccagcatgccgacactggctggtgtggccgccacagagagtgttaccaccagcacccagaccgaacccccaccggccaaatgtggtgatgccgaagatgtttactacaaaagcatgccaaacctaggctccagaaaccacgtccatcagctgcatacttactaccagctaggtcgcggcagcagtgatggatttatagttcctccaaacaaagatgggacccctcccgagggaagttcaaaaggaccggctcatttggtcactagtctatagaagatgacacagaaattggaaccaacaaaactgctaacaccttgttgactgttctgagttgatataagcagtggtaataatgtgtgtactcctaaatctttatgctgtcctctaaagacaaacacaaactctcagacttttttttttttaatgggatttttaggtcagcccaggggagaaagataactgctaaaattcccctgtaccccatcctttcttgtcctttcccc

SEQ ID NO: 629 - DNA, 4838 bp, Homo sapiens
  source 1..4838: mol_type = unassigned DNA
gtttcagatttgggatattggtgtttctgttttggagaaattattctttttctttttaatttgaagaaaaatcatcagtcttggaatacagaagagaaactagaaatatacgtattttgtttcacatttgaacagtcattcttgaggaatactccatacctgagtagacagccatgtggccatcgcagctactaattttcatgatgctcttagctccaataattcatgctttcagccgtgccccaattccaatggctgtggtccgcagagagctatcctgtgagagctatcctatagagcttcgctgtccaggaacagacgtcatcatgatagaaagtgccaactatggcaggactgatgacaaaatttgtgactctgaccctgctcagatggagaatatccgatgttatctgccagatgcctataagattatgtctcaaagatgcaataacagaacccagtgtgcagtggtggcaggtcctgatgtttttccagacccgtgtccaggaacctataaataccttgaagtgcagtatgaatgtgtcccttacaaagtggaacaaaaagtttttctttgtcctggactactaaaaggagtataccagagtgaacatttgtttgagtccgaccaccaatctggggcgtggtgcaaagaccctctgcaggcatctgacaagatttattatatgccctggactccctacagaactgataccctgactgagtattcatccaaggatgacttcattgctggaagaccaactacaacctacaagctccctcacagggtggatggcacaggatttgtagtgtatgatggagctttgttcttcaacaaagagcgcaccaggaacatagtaaagtttgatttgcggactaggataaagagtggagaggctatcatagcaaatgccaattaccatgatacctccccttaccgatggggaggcaaatctgacatagacctggcagtagatgagaatgggctatgggtaatctatgcaacagaacaaaacaatggtaaaattgtcattagtcaattgaacccttacaccctacggatcgaaggaacatgggatactgcatatgataaaaggtcagcttccaatgcctttatgatttgtggaattctgtatgtggtcaaatctgtatatgaggatgatgacaatgaggctactggaaataagattgactacatttacaacactgaccaaagcaaggatagtttggtggatgtaccctttcctaattcataccagtacattgcagctgtggattacaaccccagggacaacctactttatgtatggaataactatcacgtcgtgaaatattctttggattttggacctctggatagtagatcagggcaggcacatcatggacaagtttcatacatttctccgccaattcaccttgactctgagctagaaagaccctctgttaaagatatctctaccacaggacctcttggcatgggaagcactaccaccagtaccacccttcggaccacaactttgagcccaggaaggagtaccaccccgtcagtgtcaggaagaagaaaccggagtactagtaccccatctccagctgtcgaggtacttgatgacatgaccacacaccttccatcagcatcgtcccaaatcccagctctcgaagagagctgtgaggctgtggaagcccgagaaatcatgtggtttaagactcgtcaaggacagatagcaaagcagccatgccctgcaggaactataggtgtatcaacttatctatgccttgctcctgatggaatttgggatccccaaggtccagatctcagcaactgttcttctccttgggtcaatcatataacacagaagttgaaatctggtgaaacagctgccaacattgctagagagctggctgaacagacaagaaatcacttgaatgctggggacatcacctactctgtccgggccatggaccagctggtaggcctcctagatgtacagcttcggaacttgaccccaggtggaaaagatagtgctgcccggagtttgaacaagcttcagaaaagagagcgctcttgcagagcctatgtccaggcaatggtcgagacagttaacaacctccttcagccacaagctttgaatgcatggagagacctgactacgagtgatcagctgcgtgcggccaccatgttgcttcatactgtggaggaaagtgcttttgtgctggctgataaccttttgaagactgacattgtcagggagaatacagacaatattaaattggaagttgcaagactgagcacagaaggaaacttagaagacctaaaatttccagaaaacatgggccatggaagcactatccagctgtctgcaaataccttaaagcaaaatggccgaaatggagagatcagagtggcctttgtcctgtataacaacttgggtccttatttatccacggagaatgccagtatgaagttgggaacggaagctttgtccacaaatcattctgttattgtcaattcccctgttattacggcagcaataaacaaagagttcagtaacaaggtttatttggctgatcctgtggtatttactgttaaacatatcaagcagtcagaggaaaatttcaaccctaactgttcattttggagctactccaagcgtacaatgacaggttattggtcaacacaaggctgtcggctcctgacaacaaataagacacatactacatgctcttgtaaccacctaacaaattttgcagtactgatggcacatgtggaagttaagcacagtgatgcggtccatgacctccttctggatgtgatcacgtgggttggaattttgctgtcccttgtttgtctcctgatttgcatcttcacattttgctttttccgggggctccagagtgaccgtaacaccatccacaagaacctctgcatcagtctctttgtagcagagctgctcttcctgattgggatcaaccgaactgaccaaccaattgcctgtgctgttttcgctgccctgttacatttcttcttcttggctgccttcacctggatgttcctggagggggtgcagctttatatcatgctggtggaggtttttgagagtgaacattcacgtaggaaatacttttatctggtcggctatgggatgcctgcactcattgtggctgtgtcagctgcagtagactacaggagttatggaacagataaagtatgttggctccgacttgacacctacttcatttggagttttataggaccagcaactttgataattatgcttaatgtaatcttccttgggattgctttatataaaatgtttcatcatactgctatactgaaacctgaatcaggctgtcttgataacatcaagtcatgggttataggtgcaatagctcttctctgcctattaggattgacctgggcctttggactcatgtatattaatgaaagcacagtcatcatggcctatctcttcaccattttcaattctctacagggaatgtttatatttattttccattgtgtcctacagaagaaggtacgaaaagagtatgggaaatgcctgcgaacacattgctgtagtggcaaaagtacagagagttccattggttcagggaaaacatctggttctcgaactcctggacgctactccacaggctcacagagccgaatccgtagaatgtggaatgacacggttcgaaagcagtcagagtcttcctttattactggagacataaacagttcagcgtcactcaacagagagccctacagagagacaagtatgggagtaaagctaaacattgcatatcaaataggggcttctgaacaatgccagggatacaagtgtcatggatactctaccactgaatggtaaccatggcaatagttacagcattgccagcggcgaatacctgagcaactgtgtgcaaatcatagaccgtggctataaccataacgagaccgccctagagaaaaagattctgaaggaactcacttccaactatatcccttcttacctgaacaaccatgagcgctccagtgaacagaacaggaatctgatgaacaagctggtgaataaccttggcagtggaagggaagatgatgccattgtcctggatgatgccacctcgtttaaccacgaggagagtttgggcctggaactcattcatgaggaatctgatgctcctttgctgcccccaagagtatactccaccgagaaccaccagccacaccattataccagaaggcggatcccccaagaccacagtgagagctttttccctttgctaaccaacgagcacacagaagatctccagtcaccccatagagactctctctataccagcatgccgacactggctggtgtggccgccacagagagtgttaccaccagcacccagaccgaacccccaccggccaaatgtggtgatgccgaagatgtttactacaaaagcatgccaaacctaggctccagaaaccacgtccatcagctgcatacttactaccagctaggtcgcggcagcagtgatggatttatagttcctccaaacaaagatgggacccctcccgagggaagttcaaaaggaccggctcatttggtcactagtctatagaagatgacacagaaattggaaccaacaaaactgctaacaccttgttgactgttctgagttgatataagcagtggtaataatgtgtgtactcctaaatctttatgctgtcctctaaagacaaacacaaactctcagacttttttttttttaatgggatttttaggtcagcccaggggagaaagataactgctaaaattcccctgtaccccatcctttcttgtcctttcccc

SEQ ID NO: 630 - DNA, 4982 bp, Homo sapiens
  source 1..4982: mol_type = unassigned DNA
tctttttctttttaatttgaagaaaaatcatcagtcttggaatacagaagagaaactagaaatatacgtattttgtttcacatttgaacagtcattcttgaggaatactccatacctgagtagacagccatgtggccatcgcagctactaattttcatgatgctcttagctccaataattcatggtggcaagcacagtgaacgacatcctgcccttgctgctccattgcgacacgctgagcgcagcccaggaggcgctcttccacccagacatctgcttcagcagccagctgcagagcgcaccgctgctcatcgtggacaagggccccgtggagctaccagaggagttcgcggtccaggtgcccaaggagcacagattgcagcgcaagctttcagccgtgccccaattccaatggctgtggtccgcagagagctatcctgtgagagctatcctatagagcttcgctgtccaggaacagacgtcatcatgatagaaagtgccaactatggcaggactgatgacaaaatttgtgactctgaccctgctcagatggagaatatccgatgttatctgccagatgcctataagattatgtctcaaagatgcaataacagaacccagtgtgcagtggtggcaggtcctgatgtttttccagacccgtgtccaggaacctataaataccttgaagtgcagtatgaatgtgtcccttacaaagtggaacaaaaagtttttctttgtcctggactactaaaaggagtataccagagtgaacatttgtttgagtccgaccaccaatctggggcgtggtgcaaagaccctctgcaggcatctgacaagatttattatatgccctggactccctacagaactgataccctgactgagtattcatccaaggatgacttcattgctggaagaccaactacaacctacaagctccctcacagggtggatggcacaggatttgtagtgtatgatggagctttgttcttcaacaaagagcgcaccaggaacatagtaaagtttgatttgcggactaggataaagagtggagaggctatcatagcaaatgccaattaccatgatacctccccttaccgatggggaggcaaatctgacatagacctggcagtagatgagaatgggctatgggtaatctatgcaacagaacaaaacaatggtaaaattgtcattagtcaattgaacccttacaccctacggatcgaaggaacatgggatactgcatatgataaaaggtcagcttccaatgcctttatgatttgtggaattctgtatgtggtcaaatctgtatatgaggatgatgacaatgaggctactggaaataagattgactacatttacaacactgaccaaagcaaggatagtttggtggatgtaccctttcctaattcataccagtacattgcagctgtggattacaaccccagggacaacctactttatgtatggaataactatcacgtcgtgaaatattctttggattttggacctctggatagtagatcagggcaggcacatcatggacaagtttcatacatttctccgccaattcaccttgactctgagctagaaagaccctctgttaaagatatctctaccacaggacctcttggcatgggaagcactaccaccagtaccacccttcggaccacaactttgagcccaggaaggagtaccaccccgtcagtgtcaggaagaagaaaccggagtactagtaccccatctccagctgtcgaggtacttgatgacatgaccacacaccttccatcagcatcgtcccaaatcccagctctcgaagagagctgtgaggctgtggaagcccgagaaatcatgtggtttaagactcgtcaaggacagatagcaaagcagccatgccctgcaggaactataggtgtatcaacttatctatgccttgctcctgatggaatttgggatccccaaggtccagatctcagcaactgttcttctccttgggtcaatcatataacacagaagttgaaatctggtgaaacagctgccaacattgctagagagctggctgaacagacaagaaatcacttgaatgctggggacatcacctactctgtccgggccatggaccagctggtaggcctcctagatgtacagcttcggaacttgaccccaggtggaaaagatagtgctgcccggagtttgaacaagcttcagaaaagagagcgctcttgcagagcctatgtccaggcaatggtcgagacagttaacaacctccttcagccacaagctttgaatgcatggagagacctgactacgagtgatcagctgcgtgcggccaccatgttgcttcatactgtggaggaaagtgcttttgtgctggctgataaccttttgaagactgacattgtcagggagaatacagacaatattaaattggaagttgcaagactgagcacagaaggaaacttagaagacctaaaatttccagaaaacatgggccatggaagcactatccagctgtctgcaaataccttaaagcaaaatggccgaaatggagagatcagagtggcctttgtcctgtataacaacttgggtccttatttatccacggagaatgccagtatgaagttgggaacggaagctttgtccacaaatcattctgttattgtcaattcccctgttattacggcagcaataaacaaagagttcagtaacaaggtttatttggctgatcctgtggtatttactgttaaacatatcaagcagtcagaggaaaatttcaaccctaactgttcattttggagctactccaagcgtacaatgacaggttattggtcaacacaaggctgtcggctcctgacaacaaataagacacatactacatgctcttgtaaccacctaacaaattttgcagtactgatggcacatgtggaagttaagcacagtgatgcggtccatgacctccttctggatgtgatcacgtgggttggaattttgctgtcccttgtttgtctcctgatttgcatcttcacattttgctttttccgggggctccagagtgaccgtaacaccatccacaagaacctctgcatcagtctctttgtagcagagctgctcttcctgattgggatcaaccgaactgaccaaccaattgcctgtgctgttttcgctgccctgttacatttcttcttcttggctgccttcacctggatgttcctggagggggtgcagctttatatcatgctggtggaggtttttgagagtgaacattcacgtaggaaatacttttatctggtcggctatgggatgcctgcactcattgtggctgtgtcagctgcagtagactacaggagttatggaacagataaagtatgttggctccgacttgacacctacttcatttggagttttataggaccagcaactttgataattatgcttaatgtaatcttccttgggattgctttatataaaatgtttcatcatactgctatactgaaacctgaatcaggctgtcttgataacatcaagtcatgggttataggtgcaatagctcttctctgcctattaggattgacctgggcctttggactcatgtatattaatgaaagcacagtcatcatggcctatctcttcaccattttcaattctctacagggaatgtttatatttattttccattgtgtcctacagaagaaggtacgaaaagagtatgggaaatgcctgcgaacacattgctgtagtggcaaaagtacagagagttccattggttcagggaaaacatctggttctcgaactcctggacgctactccacaggctcacagagccgaatccgtagaatgtggaatgacacggttcgaaagcagtcagagtcttcctttattactggagacataaacagttcagcgtcactcaacagaggagccatggctaatcatcttataagcaatgctctgcttcgtccgcatggtactaacaatccctataatacattgcttggggaaccggcggtctgtaacaacccttctgtcagcatgtacaacgcacaagagccctacagagagacaagtatgggagtaaagctaaacattgcatatcaaataggggcttctgaacaatgccagggatacaagtgtcatggatactctaccactgaatggtaaccatggcaatagttacagcattgccagcggcgaatacctgagcaactgtgtgcaaatcatagaccgtggctataaccataacgagaccgccctagagaaaaagattctgaaggaactcacttccaactatatcccttcttacctgaacaaccatgagcgctccagtgaacagaacaggaatctgatgaacaagctggtgaataaccttggcagtggaagggaagatgatgccattgtcctggatgatgccacctcgtttaaccacgaggagagtttgggcctggaactcattcatgaggaatctgatgctcctttgctgcccccaagagtatactccaccgagaaccaccagccacaccattataccagaaggcggatcccccaagaccacagtgagagctttttccctttgctaaccaacgagcacacagaagatctccagtcaccccatagagactctctctataccagcatgccgacactggctggtgtggccgccacagagagtgttaccaccagcacccagaccgaacccccaccggccaaatgtggtgatgccgaagatgtttactacaaaagcatgccaaacctaggctccagaaaccacgtccatcagctgcatacttactaccagctaggtcgcggcagcagtgatggatttatagttcctccaaacaaagatgggacccctcccgagggaagttcaaaaggaccggctcatttggtcactagtctatagaagatgacacagaaattggaaccaacaaaactgctaacaccttgttgactgttctgagttgatataagcagtggtaataatgtgt

SEQ ID NO: 631 - DNA, 5009 bp, Homo sapiens
  source 1..5009: mol_type = unassigned DNA
tctttttctttttaatttgaagaaaaatcatcagtcttggaatacagaagagaaactagaaatatacgtattttgtttcacatttgaacagtcattcttgaggaatactccatacctgagtagacagccatgtggccatcgcagctactaattttcatgatgctcttagctccaataattcatggtggcaagcacagtgaacgacatcctgcccttgctgctccattgcgacacgctgagcgcagcccaggaggcgctcttccacccagacatctgcttcagcagccagctgcagagcgcaccgctgctcatcgtggacaagggccccgtggagctaccagaggagttcgcggtccaggtgcccaaggagcacagattgcagcgcaagctttcagccgtgccccaattccaatggctgtggtccgcagagagctatcctgtgagagctatcctatagagcttcgctgtccaggaacagacgtcatcatgatagaaagtgccaactatggcaggactgatgacaaaatttgtgactctgaccctgctcagatggagaatatccgatgttatctgccagatgcctataagattatgtctcaaagatgcaataacagaacccagtgtgcagtggtggcaggtcctgatgtttttccagacccgtgtccaggaacctataaataccttgaagtgcagtatgaatgtgtcccttacaaagtggaacaaaaagtttttctttgtcctggactactaaaaggagtataccagagtgaacatttgtttgagtccgaccaccaatctggggcgtggtgcaaagaccctctgcaggcatctgacaagatttattatatgccctggactccctacagaactgataccctgactgagtattcatccaaggatgacttcattgctggaagaccaactacaacctacaagctccctcacagggtggatggcacaggatttgtagtgtatgatggagctttgttcttcaacaaagagcgcaccaggaacatagtaaagtttgatttgcggactaggataaagagtggagaggctatcatagcaaatgccaattaccatgatacctccccttaccgatggggaggcaaatctgacatagacctggcagtagatgagaatgggctatgggtaatctatgcaacagaacaaaacaatggtaaaattgtcattagtcaattgaacccttacaccctacggatcgaaggaacatgggatactgcatatgataaaaggtcagcttccaatgcctttatgatttgtggaattctgtatgtggtcaaatctgtatatgaggatgatgacaatgaggctactggaaataagattgactacatttacaacactgaccaaagcaaggatagtttggtggatgtaccctttcctaattcataccagtacattgcagctgtggattacaaccccagggacaacctactttatgtatggaataactatcacgtcgtgaaatattctttggattttggacctctggatagtagatcagggcaggcacatcatggacaagtttcatacatttctccgccaattcaccttgactctgagctagaaagaccctctgttaaagatatctctaccacaggacctcttggcatgggaagcactaccaccagtaccacccttcggaccacaactttgagcccaggaaggagtaccaccccgtcagtgtcaggaagaagaaaccggagtactagtaccccatctccagctgtcgaggtacttgatgacatgaccacacaccttccatcagcatcgtcccaaatcccagctctcgaagagagctgtgaggctgtggaagcccgagaaatcatgtggtttaagactcgtcaaggacagatagcaaagcagccatgccctgcaggaactataggtgtatcaacttatctatgccttgctcctgatggaatttgggatccccaaggtccagatctcagcaactgttcttctccttgggtcaatcatataacacagaagttgaaatctggtgaaacagctgccaacattgctagagagctggctgaacagacaagaaatcacttgaatgctggggacatcacctactctgtccgggccatggaccagctggtaggcctcctagatgtacagcttcggaacttgaccccaggtggaaaagatagtgctgcccggagtttgaacaagcttcagaaaagagagcgctcttgcagagcctatgtccaggcaatggtcgagacagttaacaacctccttcagccacaagctttgaatgcatggagagacctgactacgagtgatcagctgcgtgcggccaccatgttgcttcatactgtggaggaaagtgcttttgtgctggctgataaccttttgaagactgacattgtcagggagaatacagacaatattaaattggaagttgcaagactgagcacagaaggaaacttagaagacctaaaatttccagaaaacatgggccatggaagcactatccagctgtctgcaaataccttaaagcaaaatggccgaaatggagagatcagagtggcctttgtcctgtataacaacttgggtccttatttatccacggagaatgccagtatgaagttgggaacggaagctttgtccacaaatcattctgttattgtcaattcccctgttattacggcagcaataaacaaagagttcagtaacaaggtttatttggctgatcctgtggtatttactgttaaacatatcaagcagtcagaggaaaatttcaaccctaactgttcattttggagctactccaagcgtacaatgacaggttattggtcaacacaaggctgtcggctcctgacaacaaataagacacatactacatgctcttgtaaccacctaacaaattttgcagtactgatggcacatgtggaagttaagcacagtgatgcggtccatgacctccttctggatgtgatcacgtgggttggaattttgctgtcccttgtttgtctcctgatttgcatcttcacattttgctttttccgggggctccagagtgaccgtaacaccatccacaagaacctctgcatcagtctctttgtagcagagctgctcttcctgattgggatcaaccgaactgaccaaccaattgcctgtgctgttttcgctgccctgttacatttcttcttcttggctgccttcacctggatgttcctggagggggtgcagctttatatcatgctggtggaggtttttgagagtgaacattcacgtaggaaatacttttatctggtcggctatgggatgcctgcactcattgtggctgtgtcagctgcagtagactacaggagttatggaacagataaagtatgttggctccgacttgacacctacttcatttggagttttataggaccagcaactttgataattatgcttaatgtaatcttccttgggattgctttatataaaatgtttcatcatactgctatactgaaacctgaatcaggctgtcttgataacatcaactatgaggataacagacccttcatcaagtcatgggttataggtgcaatagctcttctctgcctattaggattgacctgggcctttggactcatgtatattaatgaaagcacagtcatcatggcctatctcttcaccattttcaattctctacagggaatgtttatatttattttccattgtgtcctacagaagaaggtacgaaaagagtatgggaaatgcctgcgaacacattgctgtagtggcaaaagtacagagagttccattggttcagggaaaacatctggttctcgaactcctggacgctactccacaggctcacagagccgaatccgtagaatgtggaatgacacggttcgaaagcagtcagagtcttcctttattactggagacataaacagttcagcgtcactcaacagaggagccatggctaatcatcttataagcaatgctctgcttcgtccgcatggtactaacaatccctataatacattgcttggggaaccggcggtctgtaacaacccttctgtcagcatgtacaacgcacaagagccctacagagagacaagtatgggagtaaagctaaacattgcatatcaaataggggcttctgaacaatgccagggatacaagtgtcatggatactctaccactgaatggtaaccatggcaatagttacagcattgccagcggcgaatacctgagcaactgtgtgcaaatcatagaccgtggctataaccataacgagaccgccctagagaaaaagattctgaaggaactcacttccaactatatcccttcttacctgaacaaccatgagcgctccagtgaacagaacaggaatctgatgaacaagctggtgaataaccttggcagtggaagggaagatgatgccattgtcctggatgatgccacctcgtttaaccacgaggagagtttgggcctggaactcattcatgaggaatctgatgctcctttgctgcccccaagagtatactccaccgagaaccaccagccacaccattataccagaaggcggatcccccaagaccacagtgagagctttttccctttgctaaccaacgagcacacagaagatctccagtcaccccatagagactctctctataccagcatgccgacactggctggtgtggccgccacagagagtgttaccaccagcacccagaccgaacccccaccggccaaatgtggtgatgccgaagatgtttactacaaaagcatgccaaacctaggctccagaaaccacgtccatcagctgcatacttactaccagctaggtcgcggcagcagtgatggatttatagttcctccaaacaaagatgggacccctcccgagggaagttcaaaaggaccggctcatttggtcactagtctatagaagatgacacagaaattggaaccaacaaaactgctaacaccttgttgactgttctgagttgatataagcagtggtaataatgtgt

SEQ ID NO: 632 - DNA, 4843 bp, Homo sapiens
  source 1..4843: mol_type = unassigned DNA
aaaatcatcagtcttggaatacagaagagaaactagaaatatacgtattttgtttcacatttgaacagtcattcttgaggaatactccatacctgagtagacagccatgtggccatcgcagctactaattttcatgatgctcttagctccaataattcatggtggcaagcacagtgaacgacatcctgcccttgctgctccattgcgacacgctgagcgcagcccaggaggcgctcttccacccagacatctgcttcagcagccagctgcagagcgcaccgctgctcatcgtggacaagggccccgtggagctaccagaggagttcgcggtccaggtgcccaaggagcacagattgcagcgcaagctttcagccgtgccccaattccaatggctgtggtccgcagagagctatcctgtgagagctatcctatagagcttcgctgtccaggaacagacgtcatcatgatagaaagtgccaactatggcaggactgatgacaaaatttgtgactctgaccctgctcagatggagaatatccgatgttatctgccagatgcctataagattatgtctcaaagatgcaataacagaacccagtgtgcagtggtggcaggtcctgatgtttttccagacccgtgtccaggaacctataaataccttgaagtgcagtatgaatgtgtcccttacaaagtggaacaaaaagtttttctttgtcctggactactaaaaggagtataccagagtgaacatttgtttgagtccgaccaccaatctggggcgtggtgcaaagaccctctgcaggcatctgacaagatttattatatgccctggactccctacagaactgataccctgactgagtattcatccaaggatgacttcattgctggaagaccaactacaacctacaagctccctcacagggtggatggcacaggatttgtagtgtatgatggagctttgttcttcaacaaagagcgcaccaggaacatagtaaagtttgatttgcggactaggataaagagtggagaggctatcatagcaaatgccaattaccatgatacctccccttaccgatggggaggcaaatctgacatagacctggcagtagatgagaatgggctatgggtaatctatgcaacagaacaaaacaatggtaaaattgtcattagtcaattgaacccttacaccctacggatcgaaggaacatgggatactgcatatgataaaaggtcagcttccaatgcctttatgatttgtggaattctgtatgtggtcaaatctgtatatgaggatgatgacaatgaggctactggaaataagattgactacatttacaacactgaccaaagcaaggatagtttggtggatgtaccctttcctaattcataccagtacattgcagctgtggattacaaccccagggacaacctactttatgtatggaataactatcacgtcgtgaaatattctttggattttggacctctggatagtagatcagggcaggcacatcatggacaagtttcatacatttctccgccaattcaccttgactctgagctagaaagaccctctgttaaagatatctctaccacaggacctcttggcatgggaagcactaccaccagtaccacccttcggaccacaactttgagcccaggaaggagtaccaccccgtcagtgtcaggaagaagaaaccggagtactagtaccccatctccagctgtcgaggtacttgatgacatgaccacacaccttccatcagcatcgtcccaaatcccagctctcgaagagagctgtgaggctgtggaagcccgagaaatcatgtggtttaagactcgtcaaggacagatagcaaagcagccatgccctgcaggaactataggtgtatcaacttatctatgccttgctcctgatggaatttgggatccccaaggtccagatctcagcaactgttcttctccttgggtcaatcatataacacagaagttgaaatctggtgaaacagctgccaacattgctagagagctggctgaacagacaagaaatcacttgaatgctggggacatcacctactctgtccgggccatggaccagctggtaggcctcctagatgtacagcttcggaacttgaccccaggtggaaaagatagtgctgcccggagtttgaacaagcttcagaaaagagagcgctcttgcagagcctatgtccaggcaatggtcgagacagttaacaacctccttcagccacaagctttgaatgcatggagagacctgactacgagtgatcagctgcgtgcggccaccatgttgcttcatactgtggaggaaagtgcttttgtgctggctgataaccttttgaagactgacattgtcagggagaatacagacaatattaaattggaagttgcaagactgagcacagaaggaaacttagaagacctaaaatttccagaaaacatgggccatggaagcactatccagctgtctgcaaataccttaaagcaaaatggccgaaatggagagatcagagtggcctttgtcctgtataacaacttgggtccttatttatccacggagaatgccagtatgaagttgggaacggaagctttgtccacaaatcattctgttattgtcaattcccctgttattacggcagcaataaacaaagagttcagtaacaaggtttatttggctgatcctgtggtatttactgttaaacatatcaagcagtcagaggaaaatttcaaccctaactgttcattttggagctactccaagcgtacaatgacaggttattggtcaacacaaggctgtcggctcctgacaacaaataagacacatactacatgctcttgtaaccacctaacaaattttgcagtactgatggcacatgtggaagttaagcacagtgatgcggtccatgacctccttctggatgtgatcacgtgggttggaattttgctgtcccttgtttgtctcctgatttgcatcttcacattttgctttttccgggggctccagagtgaccgtaacaccatccacaagaacctctgcatcagtctctttgtagcagagctgctcttcctgattgggatcaaccgaactgaccaaccaattgcctgtgctgttttcgctgccctgttacatttcttcttcttggctgccttcacctggatgttcctggagggggtgcagctttatatcatgctggtggaggtttttgagagtgaacattcacgtaggaaatacttttatctggtcggctatgggatgcctgcactcattgtggctgtgtcagctgcagtagactacaggagttatggaacagataaagtatgttggctccgacttgacacctacttcatttggagttttataggaccagcaactttgataattatgcttaatgtaatcttccttgggattgctttatataaaatgtttcatcatactgctatactgaaacctgaatcaggctgtcttgataacatcaagtcatgggttataggtgcaatagctcttctctgcctattaggattgacctgggcctttggactcatgtatattaatgaaagcacagtcatcatggcctatctcttcaccattttcaattctctacagggaatgtttatatttattttccattgtgtcctacagaagaaggtacgaaaagagtatgggaaatgcctgcgaacacattgctgtagtggcaaaagtacagagagttccattggttcagggaaaacatctggttctcgaactcctggacgctactccacaggctcacagagccgaatccgtagaatgtggaatgacacggttcgaaagcagtcagagtcttcctttattactggagacataaacagttcagcgtcactcaacagagaggggcttctgaacaatgccagggatacaagtgtcatggatactctaccactgaatggtaaccatggcaatagttacagcattgccagcggcgaatacctgagcaactgtgtgcaaatcatagaccgtggctataaccataacgagaccgccctagagaaaaagattctgaaggaactcacttccaactatatcccttcttacctgaacaaccatgagcgctccagtgaacagaacaggaatctgatgaacaagctggtgaataaccttggcagtggaagggaagatgatgccattgtcctggatgatgccacctcgtttaaccacgaggagagtttgggcctggaactcattcatgaggaatctgatgctcctttgctgcccccaagagtatactccaccgagaaccaccagccacaccattataccagaaggcggatcccccaagaccacagtgagagctttttccctttgctaaccaacgagcacacagaagatctccagtcaccccatagagactctctctataccagcatgccgacactggctggtgtggccgccacagagagtgttaccaccagcacccagaccgaacccccaccggccaaatgtggtgatgccgaagatgtttactacaaaagcatgccaaacctaggctccagaaaccacgtccatcagctgcatacttactaccagctaggtcgcggcagcagtgatggatttatagttcctccaaacaaagatgggacccctcccgagggaagttcaaaaggaccggctcatttggtcactagtctatagaagatgacacagaaattggaaccaacaaaactgctaacaccttgttgactgttctgagttgatataagcagtggtaataatgtgtgtactcctaaatctttatgctgtcctctaaagacaaacacaaactctcagactttttttttttta

SEQ ID NO: 633 - DNA, 4789 bp, Homo sapiens
  source 1..4789: mol_type = unassigned DNA
tcttggaatacagaagagaaactagaaatatacgtattttgtttcacatttgaacagtcattcttgaggaatactccatacctgagtagacagccatgtggccatcgcagctactaattttcatgatgctcttagctccaataattcatgctttcagccgtgccccaattccaatggctgtggtccgcagagagctatcctgtgagagctatcctatagagcttcgctgtccaggaacagacgtcatcatgatagaaagtgccaactatggcaggactgatgacaaaatttgtgactctgaccctgctcagatggagaatatccgatgttatctgccagatgcctataagattatgtctcaaagatgcaataacagaacccagtgtgcagtggtggcaggtcctgatgtttttccagacccgtgtccaggaacctataaataccttgaagtgcagtatgaatgtgtcccttacaaagtggaacaaaaagtttttctttgtcctggactactaaaaggagtataccagagtgaacatttgtttgagtccgaccaccaatctggggcgtggtgcaaagaccctctgcaggcatctgacaagatttattatatgccctggactccctacagaactgataccctgactgagtattcatccaaggatgacttcattgctggaagaccaactacaacctacaagctccctcacagggtggatggcacaggatttgtagtgtatgatggagctttgttcttcaacaaagagcgcaccaggaacatagtaaagtttgatttgcggactaggataaagagtggagaggctatcatagcaaatgccaattaccatgatacctccccttaccgatggggaggcaaatctgacatagacctggcagtagatgagaatgggctatgggtaatctatgcaacagaacaaaacaatggtaaaattgtcattagtcaattgaacccttacaccctacggatcgaaggaacatgggatactgcatatgataaaaggtcagcttccaatgcctttatgatttgtggaattctgtatgtggtcaaatctgtatatgaggatgatgacaatgaggctactggaaataagattgactacatttacaacactgaccaaagcaaggatagtttggtggatgtaccctttcctaattcataccagtacattgcagctgtggattacaaccccagggacaacctactttatgtatggaataactatcacgtcgtgaaatattctttggattttggacctctggatagtagatcagggcaggcacatcatggacaagtttcatacatttctccgccaattcaccttgactctgagctagaaagaccctctgttaaagatatctctaccacaggacctcttggcatgggaagcactaccaccagtaccacccttcggaccacaactttgagcccaggaaggagtaccaccccgtcagtgtcaggaagaagaaaccggagtactagtaccccatctccagctgtcgaggtacttgatgacatgaccacacaccttccatcagcatcgtcccaaatcccagctctcgaagagagctgtgaggctgtggaagcccgagaaatcatgtggtttaagactcgtcaaggacagatagcaaagcagccatgccctgcaggaactataggtgtatcaacttatctatgccttgctcctgatggaatttgggatccccaaggtccagatctcagcaactgttcttctccttgggtcaatcatataacacagaagttgaaatctggtgaaacagctgccaacattgctagagagctggctgaacagacaagaaatcacttgaatgctggggacatcacctactctgtccgggccatggaccagctggtaggcctcctagatgtacagcttcggaacttgaccccaggtggaaaagatagtgctgcccggagtttgaacaagcttcagaaaagagagcgctcttgcagagcctatgtccaggcaatggtcgagacagttaacaacctccttcagccacaagctttgaatgcatggagagacctgactacgagtgatcagctgcgtgcggccaccatgttgcttcatactgtggaggaaagtgcttttgtgctggctgataaccttttgaagactgacattgtcagggagaatacagacaatattaaattggaagttgcaagactgagcacagaaggaaacttagaagacctaaaatttccagaaaacatgggccatggaagcactatccagctgtctgcaaataccttaaagcaaaatggccgaaatggagagatcagagtggcctttgtcctgtataacaacttgggtccttatttatccacggagaatgccagtatgaagttgggaacggaagctttgtccacaaatcattctgttattgtcaattcccctgttattacggcagcaataaacaaagagttcagtaacaaggtttatttggctgatcctgtggtatttactgttaaacatatcaagcagtcagaggaaaatttcaaccctaactgttcattttggagctactccaagcgtacaatgacaggttattggtcaacacaaggctgtcggctcctgacaacaaataagacacatactacatgctcttgtaaccacctaacaaattttgcagtactgatggcacatgtggaagttaagcacagtgatgcggtccatgacctccttctggatgtgatcacgtgggttggaattttgctgtcccttgtttgtctcctgatttgcatcttcacattttgctttttccgggggctccagagtgaccgtaacaccatccacaagaacctctgcatcagtctctttgtagcagagctgctcttcctgattgggatcaaccgaactgaccaaccaattgcctgtgctgttttcgctgccctgttacatttcttcttcttggctgccttcacctggatgttcctggagggggtgcagctttatatcatgctggtggaggtttttgagagtgaacattcacgtaggaaatacttttatctggtcggctatgggatgcctgcactcattgtggctgtgtcagctgcagtagactacaggagttatggaacagataaagtatgttggctccgacttgacacctacttcatttggagttttataggaccagcaactttgataattatgcttaatgtaatcttccttgggattgctttatataaaatgtttcatcatactgctatactgaaacctgaatcaggctgtcttgataacatcaagtcatgggttataggtgcaatagctcttctctgcctattaggattgacctgggcctttggactcatgtatattaatgaaagcacagtcatcatggcctatctcttcaccattttcaattctctacagggaatgtttatatttattttccattgtgtcctacagaagaaggtacgaaaagagtatgggaaatgcctgcgaacacattgctgtagtggcaaaagtacagagagttccattggttcagggaaaacatctggttctcgaactcctggacgctactccacaggctcacagagccgaatccgtagaatgtggaatgacacggttcgaaagcagtcagagtcttcctttattactggagacataaacagttcagcgtcactcaacagaggagccatggctaatcatcttataagcaatgctctgcttcgtccgcatggtactaacaatccctataatacattgcttggggaaccggcggtctgtaacaacccttctgtcagcatgtacaacgcacaagagccctacagagagacaagtatgggagtaaagctaaacattgcatatcaaataggggcttctgaacaatgccagggatacaagtgtcatggatactctaccactgaatggtaaccatggcaatagttacagcattgccagcggcgaatacctgagcaactgtgtgcaaatcatagaccgtggctataaccataacgagaccgccctagagaaaaagattctgaaggaactcacttccaactatatcccttcttacctgaacaaccatgagcgctccagtgaacagaacaggaatctgatgaacaagctggtgaataaccttggcagtggaagggaagatgatgccattgtcctggatgatgccacctcgtttaaccacgaggagagtttgggcctggaactcattcatgaggaatctgatgctcctttgctgcccccaagagtatactccaccgagaaccaccagccacaccattataccagaaggcggatcccccaagaccacagtgagagctttttccctttgctaaccaacgagcacacagaagatctccagtcaccccatagagactctctctataccagcatgccgacactggctggtgtggccgccacagagagtgttaccaccagcacccagaccgaacccccaccggccaaatgtggtgatgccgaagatgtttactacaaaagcatgccaaacctaggctccagaaaccacgtccatcagctgcatacttactaccagctaggtcgcggcagcagtgatggatttatagttcctccaaacaaagatgggacccctcccgagggaagttcaaaaggaccggctcatttggtcactagtctatagaagatgacacagaaattggaaccaacaaaactgctaacaccttgttgactgttctgagttgatataagcagtggtaataatgtgtgtactcctaaatctttatgctgtcctctaaagacaaacacaaact

SEQ ID NO: 634 - DNA, 4816 bp, Homo sapiens
  source 1..4816: mol_type = unassigned DNA
tcttggaatacagaagagaaactagaaatatacgtattttgtttcacatttgaacagtcattcttgaggaatactccatacctgagtagacagccatgtggccatcgcagctactaattttcatgatgctcttagctccaataattcatgctttcagccgtgccccaattccaatggctgtggtccgcagagagctatcctgtgagagctatcctatagagcttcgctgtccaggaacagacgtcatcatgatagaaagtgccaactatggcaggactgatgacaaaatttgtgactctgaccctgctcagatggagaatatccgatgttatctgccagatgcctataagattatgtctcaaagatgcaataacagaacccagtgtgcagtggtggcaggtcctgatgtttttccagacccgtgtccaggaacctataaataccttgaagtgcagtatgaatgtgtcccttacaaagtggaacaaaaagtttttctttgtcctggactactaaaaggagtataccagagtgaacatttgtttgagtccgaccaccaatctggggcgtggtgcaaagaccctctgcaggcatctgacaagatttattatatgccctggactccctacagaactgataccctgactgagtattcatccaaggatgacttcattgctggaagaccaactacaacctacaagctccctcacagggtggatggcacaggatttgtagtgtatgatggagctttgttcttcaacaaagagcgcaccaggaacatagtaaagtttgatttgcggactaggataaagagtggagaggctatcatagcaaatgccaattaccatgatacctccccttaccgatggggaggcaaatctgacatagacctggcagtagatgagaatgggctatgggtaatctatgcaacagaacaaaacaatggtaaaattgtcattagtcaattgaacccttacaccctacggatcgaaggaacatgggatactgcatatgataaaaggtcagcttccaatgcctttatgatttgtggaattctgtatgtggtcaaatctgtatatgaggatgatgacaatgaggctactggaaataagattgactacatttacaacactgaccaaagcaaggatagtttggtggatgtaccctttcctaattcataccagtacattgcagctgtggattacaaccccagggacaacctactttatgtatggaataactatcacgtcgtgaaatattctttggattttggacctctggatagtagatcagggcaggcacatcatggacaagtttcatacatttctccgccaattcaccttgactctgagctagaaagaccctctgttaaagatatctctaccacaggacctcttggcatgggaagcactaccaccagtaccacccttcggaccacaactttgagcccaggaaggagtaccaccccgtcagtgtcaggaagaagaaaccggagtactagtaccccatctccagctgtcgaggtacttgatgacatgaccacacaccttccatcagcatcgtcccaaatcccagctctcgaagagagctgtgaggctgtggaagcccgagaaatcatgtggtttaagactcgtcaaggacagatagcaaagcagccatgccctgcaggaactataggtgtatcaacttatctatgccttgctcctgatggaatttgggatccccaaggtccagatctcagcaactgttcttctccttgggtcaatcatataacacagaagttgaaatctggtgaaacagctgccaacattgctagagagctggctgaacagacaagaaatcacttgaatgctggggacatcacctactctgtccgggccatggaccagctggtaggcctcctagatgtacagcttcggaacttgaccccaggtggaaaagatagtgctgcccggagtttgaacaagcttcagaaaagagagcgctcttgcagagcctatgtccaggcaatggtcgagacagttaacaacctccttcagccacaagctttgaatgcatggagagacctgactacgagtgatcagctgcgtgcggccaccatgttgcttcatactgtggaggaaagtgcttttgtgctggctgataaccttttgaagactgacattgtcagggagaatacagacaatattaaattggaagttgcaagactgagcacagaaggaaacttagaagacctaaaatttccagaaaacatgggccatggaagcactatccagctgtctgcaaataccttaaagcaaaatggccgaaatggagagatcagagtggcctttgtcctgtataacaacttgggtccttatttatccacggagaatgccagtatgaagttgggaacggaagctttgtccacaaatcattctgttattgtcaattcccctgttattacggcagcaataaacaaagagttcagtaacaaggtttatttggctgatcctgtggtatttactgttaaacatatcaagcagtcagaggaaaatttcaaccctaactgttcattttggagctactccaagcgtacaatgacaggttattggtcaacacaaggctgtcggctcctgacaacaaataagacacatactacatgctcttgtaaccacctaacaaattttgcagtactgatggcacatgtggaagttaagcacagtgatgcggtccatgacctccttctggatgtgatcacgtgggttggaattttgctgtcccttgtttgtctcctgatttgcatcttcacattttgctttttccgggggctccagagtgaccgtaacaccatccacaagaacctctgcatcagtctctttgtagcagagctgctcttcctgattgggatcaaccgaactgaccaaccaattgcctgtgctgttttcgctgccctgttacatttcttcttcttggctgccttcacctggatgttcctggagggggtgcagctttatatcatgctggtggaggtttttgagagtgaacattcacgtaggaaatacttttatctggtcggctatgggatgcctgcactcattgtggctgtgtcagctgcagtagactacaggagttatggaacagataaagtatgttggctccgacttgacacctacttcatttggagttttataggaccagcaactttgataattatgcttaatgtaatcttccttgggattgctttatataaaatgtttcatcatactgctatactgaaacctgaatcaggctgtcttgataacatcaactatgaggataacagacccttcatcaagtcatgggttataggtgcaatagctcttctctgcctattaggattgacctgggcctttggactcatgtatattaatgaaagcacagtcatcatggcctatctcttcaccattttcaattctctacagggaatgtttatatttattttccattgtgtcctacagaagaaggtacgaaaagagtatgggaaatgcctgcgaacacattgctgtagtggcaaaagtacagagagttccattggttcagggaaaacatctggttctcgaactcctggacgctactccacaggctcacagagccgaatccgtagaatgtggaatgacacggttcgaaagcagtcagagtcttcctttattactggagacataaacagttcagcgtcactcaacagaggagccatggctaatcatcttataagcaatgctctgcttcgtccgcatggtactaacaatccctataatacattgcttggggaaccggcggtctgtaacaacccttctgtcagcatgtacaacgcacaagagccctacagagagacaagtatgggagtaaagctaaacattgcatatcaaataggggcttctgaacaatgccagggatacaagtgtcatggatactctaccactgaatggtaaccatggcaatagttacagcattgccagcggcgaatacctgagcaactgtgtgcaaatcatagaccgtggctataaccataacgagaccgccctagagaaaaagattctgaaggaactcacttccaactatatcccttcttacctgaacaaccatgagcgctccagtgaacagaacaggaatctgatgaacaagctggtgaataaccttggcagtggaagggaagatgatgccattgtcctggatgatgccacctcgtttaaccacgaggagagtttgggcctggaactcattcatgaggaatctgatgctcctttgctgcccccaagagtatactccaccgagaaccaccagccacaccattataccagaaggcggatcccccaagaccacagtgagagctttttccctttgctaaccaacgagcacacagaagatctccagtcaccccatagagactctctctataccagcatgccgacactggctggtgtggccgccacagagagtgttaccaccagcacccagaccgaacccccaccggccaaatgtggtgatgccgaagatgtttactacaaaagcatgccaaacctaggctccagaaaccacgtccatcagctgcatacttactaccagctaggtcgcggcagcagtgatggatttatagttcctccaaacaaagatgggacccctcccgagggaagttcaaaaggaccggctcatttggtcactagtctatagaagatgacacagaaattggaaccaacaaaactgctaacaccttgttgactgttctgagttgatataagcagtggtaataatgtgtgtactcctaaatctttatgctgtcctctaaagacaaacacaaact

SEQ ID NO: 635 - DNA, 4758 bp, Homo sapiens
  source 1..4758: mol_type = unassigned DNA
atgtggccatcgcagctactaattttcatgatgctcttagctccaataattcatgctttcagccgtgccccaattccaatggctgtggtccgcagagagctatcctgtgagagctatcctatagagcttcgctgtccaggaacagacgtcatcatgatagaaagtgccaactatggcaggactgatgacaaaatttgtgactctgaccctgctcagatggagaatatccgatgttatctgccagatgcctataagattatgtctcaaagatgcaataacagaacccagtgtgcagtggtggcaggtcctgatgtttttccagacccgtgtccaggaacctataaataccttgaagtgcagtatgaatgtgtcccttacaaagtggaacaaaaagtttttctttgtcctggactactaaaaggagtataccagagtgaacatttgtttgagtccgaccaccaatctggggcgtggtgcaaagaccctctgcaggcatctgacaagatttattatatgccctggactccctacagaactgataccctgactgagtattcatccaaggatgacttcattgctggaagaccaactacaacctacaagctccctcacagggtggatggcacaggatttgtagtgtatgatggagctttgttcttcaacaaagagcgcaccaggaacatagtaaagtttgatttgcggactaggataaagagtggagaggctatcatagcaaatgccaattaccatgatacctccccttaccgatggggaggcaaatctgacatagacctggcagtagatgagaatgggctatgggtaatctatgcaacagaacaaaacaatggtaaaattgtcattagtcaattgaacccttacaccctacggatcgaaggaacatgggatactgcatatgataaaaggtcagcttccaatgcctttatgatttgtggaattctgtatgtggtcaaatctgtatatgaggatgatgacaatgaggctactggaaataagattgactacatttacaacactgaccaaagcaaggatagtttggtggatgtaccctttcctaattcataccagtacattgcagctgtggattacaaccccagggacaacctactttatgtatggaataactatcacgtcgtgaaatattctttggattttggacctctggatagtagatcagggcaggcacatcatggacaagtttcatacatttctccgccaattcaccttgactctgagctagaaagaccctctgttaaagatatctctaccacaggacctcttggcatgggaagcactaccaccagtaccacccttcggaccacaactttgagcccaggaaggagtaccaccccgtcagtgtcaggaagaagaaaccggagtactagtaccccatctccagctgtcgaggtacttgatgacatgaccacacaccttccatcagcatcgtcccaaatcccagctctcgaagagagctgtgaggctgtggaagcccgagaaatcatgtggtttaagactcgtcaaggacagatagcaaagcagccatgccctgcaggaactataggtgtatcaacttatctatgccttgctcctgatggaatttgggatccccaaggtccagatctcagcaactgttcttctccttgggtcaatcatataacacagaagttgaaatctggtgaaacagctgccaacattgctagagagctggctgaacagacaagaaatcacttgaatgctggggacatcacctactctgtccgggccatggaccagctggtaggcctcctagatgtacagcttcggaacttgaccccaggtggaaaagatagtgctgcccggagtttgaacaagcttcagaaaagagagcgctcttgcagagcctatgtccaggcaatggtcgagacagttaacaacctccttcagccacaagctttgaatgcatggagagacctgactacgagtgatcagctgcgtgcggccaccatgttgcttcatactgtggaggaaagtgcttttgtgctggctgataaccttttgaagactgacattgtcagggagaatacagacaatattaaattggaagttgcaagactgagcacagaaggaaacttagaagacctaaaatttccagaaaacatgggccatggaagcactatccagctgtctgcaaataccttaaagcaaaatggccgaaatggagagatcagagtggcctttgtcctgtataacaacttgggtccttatttatccacggagaatgccagtatgaagttgggaacggaagctttgtccacaaatcattctgttattgtcaattcccctgttattacggcagcaataaacaaagagttcagtaacaaggtttatttggctgatcctgtggtatttactgttaaacatatcaagcagtcagaggaaaatttcaaccctaactgttcattttggagctactccaagcgtacaatgacaggttattggtcaacacaaggctgtcggctcctgacaacaaataagacacatactacatgctcttgtaaccacctaacaaattttgcagtactgatggcacatgtggaagttaagcacagtgatgcggtccatgacctccttctggatgtgatcacgtgggttggaattttgctgtcccttgtttgtctcctgatttgcatcttcacattttgctttttccgggggctccagagtgaccgtaacaccatccacaagaacctctgcatcagtctctttgtagcagagctgctcttcctgattgggatcaaccgaactgaccaaccaattgcctgtgctgttttcgctgccctgttacatttcttcttcttggctgccttcacctggatgttcctggagggggtgcagctttatatcatgctggtggaggtttttgagagtgaacattcacgtaggaaatacttttatctggtcggctatgggatgcctgcactcattgtggctgtgtcagctgcagtagactacaggagttatggaacagataaagtatgttggctccgacttgacacctacttcatttggagttttataggaccagcaactttgataattatgcttaatgtaatcttccttgggattgctttatataaaatgtttcatcatactgctatactgaaacctgaatcaggctgtcttgataacatcaactatgaggataacagacccttcatcaagtcatgggttataggtgcaatagctcttctctgcctattaggattgacctgggcctttggactcatgtatattaatgaaagcacagtcatcatggcctatctcttcaccattttcaattctctacagggaatgtttatatttattttccattgtgtcctacagaagaaggtacgaaaagagtatgggaaatgcctgcgaacacattgctgtagtggcaaaagtacagagagttccattggttcagggaaaacatctggttctcgaactcctggacgctactccacaggctcacagagccgaatccgtagaatgtggaatgacacggttcgaaagcagtcagagtcttcctttattactggagacataaacagttcagcgtcactcaacagaggagccatggctaatcatcttataagcaatgctctgcttcgtccgcatggtactaacaatccctataatacattgcttggggaaccggcggtctgtaacaacccttctgtcagcatgtacaacgcacaagaggggcttctgaacaatgccagggatacaagtgtcatggatactctaccactgaatggtaaccatggcaatagttacagcattgccagcggcgaatacctgagcaactgtgtgcaaatcatagaccgtggctataaccataacgagaccgccctagagaaaaagattctgaaggaactcacttccaactatatcccttcttacctgaacaaccatgagcgctccagtgaacagaacaggaatctgatgaacaagctggtgaataaccttggcagtggaagggaagatgatgccattgtcctggatgatgccacctcgtttaaccacgaggagagtttgggcctggaactcattcatgaggaatctgatgctcctttgctgcccccaagagtatactccaccgagaaccaccagccacaccattataccagaaggcggatcccccaagaccacagtgagagctttttccctttgctaaccaacgagcacacagaagatctccagtcaccccatagagactctctctataccagcatgccgacactggctggtgtggccgccacagagagtgttaccaccagcacccagaccgaacccccaccggccaaatgtggtgatgccgaagatgtttactacaaaagcatgccaaacctaggctccagaaaccacgtccatcagctgcatacttactaccagctaggtcgcggcagcagtgatggatttatagttcctccaaacaaagatgggacccctcccgagggaagttcaaaaggaccggctcatttggtcactagtctatagaagatgacacagaaattggaaccaacaaaactgctaacaccttgttgactgttctgagttgatataagcagtggtaataatgtgtgtactcctaaatctttatgctgtcctctaaagacaaacacaaactctcagacttttttttttttaatgggatttttaggtcagcccaggggagaaagataactgctaaaattcccctgtaccccatcctttctt

SEQ ID NO: 636 - DNA, 4962 bp, Homo sapiens
  source 1..4962: mol_type = unassigned DNA
atgtggccatcgcagctactaattttcatgatgctcttagctccaataattcatggtggcaagcacagtgaacgacatcctgcccttgctgctccattgcgacacgctgagcgcagcccaggaggcgctcttccacccagacatctgcttcagcagccagctgcagagcgcaccgctgctcatcgtggacaagggccccgtggagctaccagaggagttcgcggtccaggtgcccaaggagcacagattgcagcgcaagctttcagccgtgccccaattccaatggctgtggtccgcagagagctatcctgtgagagctatcctatagagcttcgctgtccaggaacagacgtcatcatgatagaaagtgccaactatggcaggactgatgacaaaatttgtgactctgaccctgctcagatggagaatatccgatgttatctgccagatgcctataagattatgtctcaaagatgcaataacagaacccagtgtgcagtggtggcaggtcctgatgtttttccagacccgtgtccaggaacctataaataccttgaagtgcagtatgaatgtgtcccttacaaagtggaacaaaaagtttttctttgtcctggactactaaaaggagtataccagagtgaacatttgtttgagtccgaccaccaatctggggcgtggtgcaaagaccctctgcaggcatctgacaagatttattatatgccctggactccctacagaactgataccctgactgagtattcatccaaggatgacttcattgctggaagaccaactacaacctacaagctccctcacagggtggatggcacaggatttgtagtgtatgatggagctttgttcttcaacaaagagcgcaccaggaacatagtaaagtttgatttgcggactaggataaagagtggagaggctatcatagcaaatgccaattaccatgatacctccccttaccgatggggaggcaaatctgacatagacctggcagtagatgagaatgggctatgggtaatctatgcaacagaacaaaacaatggtaaaattgtcattagtcaattgaacccttacaccctacggatcgaaggaacatgggatactgcatatgataaaaggtcagcttccaatgcctttatgatttgtggaattctgtatgtggtcaaatctgtatatgaggatgatgacaatgaggctactggaaataagattgactacatttacaacactgaccaaagcaaggatagtttggtggatgtaccctttcctaattcataccagtacattgcagctgtggattacaaccccagggacaacctactttatgtatggaataactatcacgtcgtgaaatattctttggattttggacctctggatagtagatcagggcaggcacatcatggacaagtttcatacatttctccgccaattcaccttgactctgagctagaaagaccctctgttaaagatatctctaccacaggacctcttggcatgggaagcactaccaccagtaccacccttcggaccacaactttgagcccaggaaggagtaccaccccgtcagtgtcaggaagaagaaaccggagtactagtaccccatctccagctgtcgaggtacttgatgacatgaccacacaccttccatcagcatcgtcccaaatcccagctctcgaagagagctgtgaggctgtggaagcccgagaaatcatgtggtttaagactcgtcaaggacagatagcaaagcagccatgccctgcaggaactataggtgtatcaacttatctatgccttgctcctgatggaatttgggatccccaaggtccagatctcagcaactgttcttctccttgggtcaatcatataacacagaagttgaaatctggtgaaacagctgccaacattgctagagagctggctgaacagacaagaaatcacttgaatgctggggacatcacctactctgtccgggccatggaccagctggtaggcctcctagatgtacagcttcggaacttgaccccaggtggaaaagatagtgctgcccggagtttgaacaagcttcagaaaagagagcgctcttgcagagcctatgtccaggcaatggtcgagacagttaacaacctccttcagccacaagctttgaatgcatggagagacctgactacgagtgatcagctgcgtgcggccaccatgttgcttcatactgtggaggaaagtgcttttgtgctggctgataaccttttgaagactgacattgtcagggagaatacagacaatattaaattggaagttgcaagactgagcacagaaggaaacttagaagacctaaaatttccagaaaacatgggccatggaagcactatccagctgtctgcaaataccttaaagcaaaatggccgaaatggagagatcagagtggcctttgtcctgtataacaacttgggtccttatttatccacggagaatgccagtatgaagttgggaacggaagctttgtccacaaatcattctgttattgtcaattcccctgttattacggcagcaataaacaaagagttcagtaacaaggtttatttggctgatcctgtggtatttactgttaaacatatcaagcagtcagaggaaaatttcaaccctaactgttcattttggagctactccaagcgtacaatgacaggttattggtcaacacaaggctgtcggctcctgacaacaaataagacacatactacatgctcttgtaaccacctaacaaattttgcagtactgatggcacatgtggaagttaagcacagtgatgcggtccatgacctccttctggatgtgatcacgtgggttggaattttgctgtcccttgtttgtctcctgatttgcatcttcacattttgctttttccgggggctccagagtgaccgtaacaccatccacaagaacctctgcatcagtctctttgtagcagagctgctcttcctgattgggatcaaccgaactgaccaaccaattgcctgtgctgttttcgctgccctgttacatttcttcttcttggctgccttcacctggatgttcctggagggggtgcagctttatatcatgctggtggaggtttttgagagtgaacattcacgtaggaaatacttttatctggtcggctatgggatgcctgcactcattgtggctgtgtcagctgcagtagactacaggagttatggaacagataaagtatgttggctccgacttgacacctacttcatttggagttttataggaccagcaactttgataattatgcttaatgtaatcttccttgggattgctttatataaaatgtttcatcatactgctatactgaaacctgaatcaggctgtcttgataacatcaactatgaggataacagacccttcatcaagtcatgggttataggtgcaatagctcttctctgcctattaggattgacctgggcctttggactcatgtatattaatgaaagcacagtcatcatggcctatctcttcaccattttcaattctctacagggaatgtttatatttattttccattgtgtcctacagaagaaggtacgaaaagagtatgggaaatgcctgcgaacacattgctgtagtggcaaaagtacagagagttccattggttcagggaaaacatctggttctcgaactcctggacgctactccacaggctcacagagccgaatccgtagaatgtggaatgacacggttcgaaagcagtcagagtcttcctttattactggagacataaacagttcagcgtcactcaacagaggagccatggctaatcatcttataagcaatgctctgcttcgtccgcatggtactaacaatccctataatacattgcttggggaaccggcggtctgtaacaacccttctgtcagcatgtacaacgcacaagaggggcttctgaacaatgccagggatacaagtgtcatggatactctaccactgaatggtaaccatggcaatagttacagcattgccagcggcgaatacctgagcaactgtgtgcaaatcatagaccgtggctataaccataacgagaccgccctagagaaaaagattctgaaggaactcacttccaactatatcccttcttacctgaacaaccatgagcgctccagtgaacagaacaggaatctgatgaacaagctggtgaataaccttggcagtggaagggaagatgatgccattgtcctggatgatgccacctcgtttaaccacgaggagagtttgggcctggaactcattcatgaggaatctgatgctcctttgctgcccccaagagtatactccaccgagaaccaccagccacaccattataccagaaggcggatcccccaagaccacagtgagagctttttccctttgctaaccaacgagcacacagaagatctccagtcaccccatagagactctctctataccagcatgccgacactggctggtgtggccgccacagagagtgttaccaccagcacccagaccgaacccccaccggccaaatgtggtgatgccgaagatgtttactacaaaagcatgccaaacctaggctccagaaaccacgtccatcagctgcatacttactaccagctaggtcgcggcagcagtgatggatttatagttcctccaaacaaagatgggacccctcccgagggaagttcaaaaggaccggctcatttggtcactagtctatagaagatgacacagaaattggaaccaacaaaactgctaacaccttgttgactgttctgagttgatataagcagtggtaataatgtgtgtactcctaaatctttatgctgtcctctaaagacaaacacaaactctcagacttttttttttttaatgggatttttaggtcagcccaggggagaaagataactgctaaaattcccctgtaccccatcctttctt

SEQ ID NO: 637 - DNA, 4935 bp, Homo sapiens
  source 1..4935: mol_type = unassigned DNA
atgtggccatcgcagctactaattttcatgatgctcttagctccaataattcatggtggcaagcacagtgaacgacatcctgcccttgctgctccattgcgacacgctgagcgcagcccaggaggcgctcttccacccagacatctgcttcagcagccagctgcagagcgcaccgctgctcatcgtggacaagggccccgtggagctaccagaggagttcgcggtccaggtgcccaaggagcacagattgcagcgcaagctttcagccgtgccccaattccaatggctgtggtccgcagagagctatcctgtgagagctatcctatagagcttcgctgtccaggaacagacgtcatcatgatagaaagtgccaactatggcaggactgatgacaaaatttgtgactctgaccctgctcagatggagaatatccgatgttatctgccagatgcctataagattatgtctcaaagatgcaataacagaacccagtgtgcagtggtggcaggtcctgatgtttttccagacccgtgtccaggaacctataaataccttgaagtgcagtatgaatgtgtcccttacaaagtggaacaaaaagtttttctttgtcctggactactaaaaggagtataccagagtgaacatttgtttgagtccgaccaccaatctggggcgtggtgcaaagaccctctgcaggcatctgacaagatttattatatgccctggactccctacagaactgataccctgactgagtattcatccaaggatgacttcattgctggaagaccaactacaacctacaagctccctcacagggtggatggcacaggatttgtagtgtatgatggagctttgttcttcaacaaagagcgcaccaggaacatagtaaagtttgatttgcggactaggataaagagtggagaggctatcatagcaaatgccaattaccatgatacctccccttaccgatggggaggcaaatctgacatagacctggcagtagatgagaatgggctatgggtaatctatgcaacagaacaaaacaatggtaaaattgtcattagtcaattgaacccttacaccctacggatcgaaggaacatgggatactgcatatgataaaaggtcagcttccaatgcctttatgatttgtggaattctgtatgtggtcaaatctgtatatgaggatgatgacaatgaggctactggaaataagattgactacatttacaacactgaccaaagcaaggatagtttggtggatgtaccctttcctaattcataccagtacattgcagctgtggattacaaccccagggacaacctactttatgtatggaataactatcacgtcgtgaaatattctttggattttggacctctggatagtagatcagggcaggcacatcatggacaagtttcatacatttctccgccaattcaccttgactctgagctagaaagaccctctgttaaagatatctctaccacaggacctcttggcatgggaagcactaccaccagtaccacccttcggaccacaactttgagcccaggaaggagtaccaccccgtcagtgtcaggaagaagaaaccggagtactagtaccccatctccagctgtcgaggtacttgatgacatgaccacacaccttccatcagcatcgtcccaaatcccagctctcgaagagagctgtgaggctgtggaagcccgagaaatcatgtggtttaagactcgtcaaggacagatagcaaagcagccatgccctgcaggaactataggtgtatcaacttatctatgccttgctcctgatggaatttgggatccccaaggtccagatctcagcaactgttcttctccttgggtcaatcatataacacagaagttgaaatctggtgaaacagctgccaacattgctagagagctggctgaacagacaagaaatcacttgaatgctggggacatcacctactctgtccgggccatggaccagctggtaggcctcctagatgtacagcttcggaacttgaccccaggtggaaaagatagtgctgcccggagtttgaacaagcttcagaaaagagagcgctcttgcagagcctatgtccaggcaatggtcgagacagttaacaacctccttcagccacaagctttgaatgcatggagagacctgactacgagtgatcagctgcgtgcggccaccatgttgcttcatactgtggaggaaagtgcttttgtgctggctgataaccttttgaagactgacattgtcagggagaatacagacaatattaaattggaagttgcaagactgagcacagaaggaaacttagaagacctaaaatttccagaaaacatgggccatggaagcactatccagctgtctgcaaataccttaaagcaaaatggccgaaatggagagatcagagtggcctttgtcctgtataacaacttgggtccttatttatccacggagaatgccagtatgaagttgggaacggaagctttgtccacaaatcattctgttattgtcaattcccctgttattacggcagcaataaacaaagagttcagtaacaaggtttatttggctgatcctgtggtatttactgttaaacatatcaagcagtcagaggaaaatttcaaccctaactgttcattttggagctactccaagcgtacaatgacaggttattggtcaacacaaggctgtcggctcctgacaacaaataagacacatactacatgctcttgtaaccacctaacaaattttgcagtactgatggcacatgtggaagttaagcacagtgatgcggtccatgacctccttctggatgtgatcacgtgggttggaattttgctgtcccttgtttgtctcctgatttgcatcttcacattttgctttttccgggggctccagagtgaccgtaacaccatccacaagaacctctgcatcagtctctttgtagcagagctgctcttcctgattgggatcaaccgaactgaccaaccaattgcctgtgctgttttcgctgccctgttacatttcttcttcttggctgccttcacctggatgttcctggagggggtgcagctttatatcatgctggtggaggtttttgagagtgaacattcacgtaggaaatacttttatctggtcggctatgggatgcctgcactcattgtggctgtgtcagctgcagtagactacaggagttatggaacagataaagtatgttggctccgacttgacacctacttcatttggagttttataggaccagcaactttgataattatgcttaatgtaatcttccttgggattgctttatataaaatgtttcatcatactgctatactgaaacctgaatcaggctgtcttgataacatcaagtcatgggttataggtgcaatagctcttctctgcctattaggattgacctgggcctttggactcatgtatattaatgaaagcacagtcatcatggcctatctcttcaccattttcaattctctacagggaatgtttatatttattttccattgtgtcctacagaagaaggtacgaaaagagtatgggaaatgcctgcgaacacattgctgtagtggcaaaagtacagagagttccattggttcagggaaaacatctggttctcgaactcctggacgctactccacaggctcacagagccgaatccgtagaatgtggaatgacacggttcgaaagcagtcagagtcttcctttattactggagacataaacagttcagcgtcactcaacagaggagccatggctaatcatcttataagcaatgctctgcttcgtccgcatggtactaacaatccctataatacattgcttggggaaccggcggtctgtaacaacccttctgtcagcatgtacaacgcacaagaggggcttctgaacaatgccagggatacaagtgtcatggatactctaccactgaatggtaaccatggcaatagttacagcattgccagcggcgaatacctgagcaactgtgtgcaaatcatagaccgtggctataaccataacgagaccgccctagagaaaaagattctgaaggaactcacttccaactatatcccttcttacctgaacaaccatgagcgctccagtgaacagaacaggaatctgatgaacaagctggtgaataaccttggcagtggaagggaagatgatgccattgtcctggatgatgccacctcgtttaaccacgaggagagtttgggcctggaactcattcatgaggaatctgatgctcctttgctgcccccaagagtatactccaccgagaaccaccagccacaccattataccagaaggcggatcccccaagaccacagtgagagctttttccctttgctaaccaacgagcacacagaagatctccagtcaccccatagagactctctctataccagcatgccgacactggctggtgtggccgccacagagagtgttaccaccagcacccagaccgaacccccaccggccaaatgtggtgatgccgaagatgtttactacaaaagcatgccaaacctaggctccagaaaccacgtccatcagctgcatacttactaccagctaggtcgcggcagcagtgatggatttatagttcctccaaacaaagatgggacccctcccgagggaagttcaaaaggaccggctcatttggtcactagtctatagaagatgacacagaaattggaaccaacaaaactgctaacaccttgttgactgttctgagttgatataagcagtggtaataatgtgtgtactcctaaatctttatgctgtcctctaaagacaaacacaaactctcagacttttttttttttaatgggatttttaggtcagcccaggggagaaagataactgctaaaattcccctgtaccccatcctttctt

SEQ ID NO: 638 - DNA, 4731 bp, Homo sapiens
  source 1..4731: mol_type = unassigned DNA
atgtggccatcgcagctactaattttcatgatgctcttagctccaataattcatgctttcagccgtgccccaattccaatggctgtggtccgcagagagctatcctgtgagagctatcctatagagcttcgctgtccaggaacagacgtcatcatgatagaaagtgccaactatggcaggactgatgacaaaatttgtgactctgaccctgctcagatggagaatatccgatgttatctgccagatgcctataagattatgtctcaaagatgcaataacagaacccagtgtgcagtggtggcaggtcctgatgtttttccagacccgtgtccaggaacctataaataccttgaagtgcagtatgaatgtgtcccttacaaagtggaacaaaaagtttttctttgtcctggactactaaaaggagtataccagagtgaacatttgtttgagtccgaccaccaatctggggcgtggtgcaaagaccctctgcaggcatctgacaagatttattatatgccctggactccctacagaactgataccctgactgagtattcatccaaggatgacttcattgctggaagaccaactacaacctacaagctccctcacagggtggatggcacaggatttgtagtgtatgatggagctttgttcttcaacaaagagcgcaccaggaacatagtaaagtttgatttgcggactaggataaagagtggagaggctatcatagcaaatgccaattaccatgatacctccccttaccgatggggaggcaaatctgacatagacctggcagtagatgagaatgggctatgggtaatctatgcaacagaacaaaacaatggtaaaattgtcattagtcaattgaacccttacaccctacggatcgaaggaacatgggatactgcatatgataaaaggtcagcttccaatgcctttatgatttgtggaattctgtatgtggtcaaatctgtatatgaggatgatgacaatgaggctactggaaataagattgactacatttacaacactgaccaaagcaaggatagtttggtggatgtaccctttcctaattcataccagtacattgcagctgtggattacaaccccagggacaacctactttatgtatggaataactatcacgtcgtgaaatattctttggattttggacctctggatagtagatcagggcaggcacatcatggacaagtttcatacatttctccgccaattcaccttgactctgagctagaaagaccctctgttaaagatatctctaccacaggacctcttggcatgggaagcactaccaccagtaccacccttcggaccacaactttgagcccaggaaggagtaccaccccgtcagtgtcaggaagaagaaaccggagtactagtaccccatctccagctgtcgaggtacttgatgacatgaccacacaccttccatcagcatcgtcccaaatcccagctctcgaagagagctgtgaggctgtggaagcccgagaaatcatgtggtttaagactcgtcaaggacagatagcaaagcagccatgccctgcaggaactataggtgtatcaacttatctatgccttgctcctgatggaatttgggatccccaaggtccagatctcagcaactgttcttctccttgggtcaatcatataacacagaagttgaaatctggtgaaacagctgccaacattgctagagagctggctgaacagacaagaaatcacttgaatgctggggacatcacctactctgtccgggccatggaccagctggtaggcctcctagatgtacagcttcggaacttgaccccaggtggaaaagatagtgctgcccggagtttgaacaagcttcagaaaagagagcgctcttgcagagcctatgtccaggcaatggtcgagacagttaacaacctccttcagccacaagctttgaatgcatggagagacctgactacgagtgatcagctgcgtgcggccaccatgttgcttcatactgtggaggaaagtgcttttgtgctggctgataaccttttgaagactgacattgtcagggagaatacagacaatattaaattggaagttgcaagactgagcacagaaggaaacttagaagacctaaaatttccagaaaacatgggccatggaagcactatccagctgtctgcaaataccttaaagcaaaatggccgaaatggagagatcagagtggcctttgtcctgtataacaacttgggtccttatttatccacggagaatgccagtatgaagttgggaacggaagctttgtccacaaatcattctgttattgtcaattcccctgttattacggcagcaataaacaaagagttcagtaacaaggtttatttggctgatcctgtggtatttactgttaaacatatcaagcagtcagaggaaaatttcaaccctaactgttcattttggagctactccaagcgtacaatgacaggttattggtcaacacaaggctgtcggctcctgacaacaaataagacacatactacatgctcttgtaaccacctaacaaattttgcagtactgatggcacatgtggaagttaagcacagtgatgcggtccatgacctccttctggatgtgatcacgtgggttggaattttgctgtcccttgtttgtctcctgatttgcatcttcacattttgctttttccgggggctccagagtgaccgtaacaccatccacaagaacctctgcatcagtctctttgtagcagagctgctcttcctgattgggatcaaccgaactgaccaaccaattgcctgtgctgttttcgctgccctgttacatttcttcttcttggctgccttcacctggatgttcctggagggggtgcagctttatatcatgctggtggaggtttttgagagtgaacattcacgtaggaaatacttttatctggtcggctatgggatgcctgcactcattgtggctgtgtcagctgcagtagactacaggagttatggaacagataaagtatgttggctccgacttgacacctacttcatttggagttttataggaccagcaactttgataattatgcttaatgtaatcttccttgggattgctttatataaaatgtttcatcatactgctatactgaaacctgaatcaggctgtcttgataacatcaagtcatgggttataggtgcaatagctcttctctgcctattaggattgacctgggcctttggactcatgtatattaatgaaagcacagtcatcatggcctatctcttcaccattttcaattctctacagggaatgtttatatttattttccattgtgtcctacagaagaaggtacgaaaagagtatgggaaatgcctgcgaacacattgctgtagtggcaaaagtacagagagttccattggttcagggaaaacatctggttctcgaactcctggacgctactccacaggctcacagagccgaatccgtagaatgtggaatgacacggttcgaaagcagtcagagtcttcctttattactggagacataaacagttcagcgtcactcaacagaggagccatggctaatcatcttataagcaatgctctgcttcgtccgcatggtactaacaatccctataatacattgcttggggaaccggcggtctgtaacaacccttctgtcagcatgtacaacgcacaagaggggcttctgaacaatgccagggatacaagtgtcatggatactctaccactgaatggtaaccatggcaatagttacagcattgccagcggcgaatacctgagcaactgtgtgcaaatcatagaccgtggctataaccataacgagaccgccctagagaaaaagattctgaaggaactcacttccaactatatcccttcttacctgaacaaccatgagcgctccagtgaacagaacaggaatctgatgaacaagctggtgaataaccttggcagtggaagggaagatgatgccattgtcctggatgatgccacctcgtttaaccacgaggagagtttgggcctggaactcattcatgaggaatctgatgctcctttgctgcccccaagagtatactccaccgagaaccaccagccacaccattataccagaaggcggatcccccaagaccacagtgagagctttttccctttgctaaccaacgagcacacagaagatctccagtcaccccatagagactctctctataccagcatgccgacactggctggtgtggccgccacagagagtgttaccaccagcacccagaccgaacccccaccggccaaatgtggtgatgccgaagatgtttactacaaaagcatgccaaacctaggctccagaaaccacgtccatcagctgcatacttactaccagctaggtcgcggcagcagtgatggatttatagttcctccaaacaaagatgggacccctcccgagggaagttcaaaaggaccggctcatttggtcactagtctatagaagatgacacagaaattggaaccaacaaaactgctaacaccttgttgactgttctgagttgatataagcagtggtaataatgtgtgtactcctaaatctttatgctgtcctctaaagacaaacacaaactctcagacttttttttttttaatgggatttttaggtcagcccaggggagaaagataactgctaaaattcccctgtaccccatcctttctt

SEQ ID NO: 639 - DNA, 640 bp, Homo sapiens
  source 1..640: mol_type = unassigned DNA
gtgactctgaccctgctcagatggagaatatccgatgttatctgccagatgcctataagattatgtctcaaagatgcaataacagaacccagtgtgcagtggtggcaggtcctgatgtttttccagacccgtgtccaggaacctataaataccttgaagtgcagtatgaatgtgtcccttacagtatgtatattcctatacttttcttggcaagagaaaagatactaaactgtgttttgcatgcattgacaaatattctctatgaaaacataaatcacgtaaattaaatgaaaaaattggctaatattaatttttgagaatcatagaccctccctgccatcagaagaattagatattgcctaccctctcctacggcatttacttgtgattatttctgtatatgaatacgtgttctaacacacttttcttaattaatgcaagaatataaaacatttagaaaaaggttgggggagtgttataccaattctccaggtccaagcagataagaggtgaaaatgagcaatacaattttatatgtaatgtatagcagttgatacattttgaatttgatagaattgtatctaagcttcatctgctgtcaacattttgagaattagaaatatattcatccagaaggagt

SEQ ID NO: 640 - DNA, 4284 bp, Homo sapiens
  source 1..4284: mol_type = unassigned DNA
ttatctatgccttgctcctgatggaatttgggatccccaaggtccagatctcagcaactgttcttctccttgggtcaatcatataacacagaagttgaaatctggtgaaacagctgccaacattgctagagagctggctgaacagacaagaaatcacttgaatgctggggacatcacctactctgtccgggccatggaccagctggtaggcctcctagatgtacagcttcggaacttgaccccaggtggaaaagatagtgctgcccggagtttgaacaaggcaatggtcgagacagttaacaacctccttcagccacaagctttgaatgcatggagagacctgactacgagtgatcagctgcgtgcggccaccatgttgcttcatactgtggaggaaagtgcttttgtgctggctgataaccttttgaagactgacattgtcagggagaatacagacaatattaaattggaagttgcaagactgagcacagaaggaaacttagaagacctaaaatttccagaaaacatgggccatggaagcactatccagctgtctgcaaataccttaaagcaaaatggccgaaatggagagatcagagtggcctttgtcctgtataacaacttgggtccttatttatccacggagaatgccagtatgaagttgggaacggaagctttgtccacaaatcattctgttattgtcaattcccctgttattacggcagcaataaacaaagagttcagtaacaaggtttatttggctgatcctgtggtatttactgttaaacatatcaagcagtcagaggaaaatttcaaccctaactgttcattttggagctactccaagcgtacaatgacaggttattggtcaacacaaggctgtcggctcctgacaacaaataagacacatactacatgctcttgtaaccacctaacaaattttgcagtactgatggcacatgtggaagttaagcacagtgatgcggtccatgacctccttctggatgtgatcacgtgggttggaattttgctgtcccttgtttgtctcctgatttgcatcttcacattttgctttttccgggggctccagagtgaccgtaacaccatccacaagaacctctgcatcagtctctttgtagcagagctgctcttcctgattgggatcaaccgaactgaccaaccaattgcctgtgctgttttcgctgccctgttacatttcttcttcttggctgccttcacctggatgttcctggagggggtgcagctttatatcatgctggtggaggtttttgagagtgaacattcacgtaggaaatacttttatctggtcggctatgggatgcctgcactcattgtggctgtgtcagctgcagtagactacaggagttatggaacagataaagtatgttggctccgacttgacacctacttcatttggagttttataggaccagcaactttgataattatgcttaatgtaatcttccttgggattgctttatataaaatgtttcatcatactgctatactgaaacctgaatcaggctgtcttgataacatcaagtcatgggttataggtgcaatagctcttctctgcctattaggattgacctgggcctttggactcatgtatattaatgaaagcacagtcatcatggcctatctcttcaccattttcaattctctacagggaatgtttatatttattttccattgtgtcctacagaagaaggtacgaaaagagtatgggaaatgcctgcgaacacattgctgtagtggcaaaagtacagagagttccattggttcagggaaaacatctggttctcgaactcctggacgctactccacaggctcacagagccgaatccgtagaatgtggaatgacacggttcgaaagcagtcagagtcttcctttattactggagacataaacagttcagcgtcactcaacagagaggggcttctgaacaatgccagggatacaagtgtcatggatactctaccactgaatggtaaccatggcaatagttacagcattgccagcggcgaatacctgagcaactgtgtgcaaatcatagaccgtggctataaccataacgagaccgccctagagaaaaagattctgaaggaactcacttccaactatatcccttcttacctgaacaaccatgagcgctccagtgaacagaacaggaatctgatgaacaagctggtgaataaccttggcagtggaagggaagatgatgccattgtcctggatgatgccacctcgtttaaccacgaggagagtttgggcctggaactcattcatgaggaatctgatgctcctttgctgcccccaagagtatactccaccgagaaccaccagccacaccattataccagaaggcggatcccccaagaccacagtgagagctttttccctttgctaaccaacgagcacacagaagatctccagtcaccccatagagactctctctataccagcatgccgacactggctggtgtggccgccacagagagtgttaccaccagcacccagaccgaacccccaccggccaaatgtggtgatgccgaagatgtttactacaaaagcatgccaaacctaggctccagaaaccacgtccatcagctgcatacttactaccagctaggtcgcggcagcagtgatggatttatagttcctccaaacaaagatgggacccctcccgagggaagttcaaaaggaccggctcatttggtcactagtctatagaagatgacacagaaattggaaccaacaaaactgctaacaccttgttgactgttctgagttgatataagcagtggtaataatgtgtgtactcctaaatctttatgctgtcctctaaagacaaacacaaactctcagacttttttttttttaatgggatttttaggtcagcccaggggagaaagataactgctaaaattcccctgtaccccatcctttcttgtcctttccccttcagatggagacttcattatgttaatgaacaagatatgaagaaaatggcactcattgtggccttgttgaattatgttgtgtatgttttaacatctctgatgctgtgttactaaaattacaaggacctgctttttaaaaggccagaacaattgtctgaaattagtaacaatgctgcatctagattggagtgctgcacaaacaaacataagagcaaagcaaaactgtatcacatagggtttttggtcactcacaacctgaattcaccacagctggaatagctgtggaaaacaaaataaaacaacaaaattaataatgaaatggaggggaattctagaattatatgctaaatgcatattttatgatttgctgtattaactgatgataaaactaatggcagaaaaagaagttgagcaatttctatgtaatgtacagatactagcattgcacatatagtctgctttctgttcctccagaatttgagtcctgttaatgtagtagaaaaaaaaaaaagaaattttctttttcttttgtgctggtcttgcaagtttgtctaccagtaagagagcaaagtttccttcctttcttctctttcttcattttctttttttcttttttgccttttattcctttaaaatttcgcctggcaaaaaataaataaatggaactatcactttataagaatcattttctagtaatgcaaacaaattattttttacaaaaaaacaaaataaataaaattagacttccttccctcactatatatctttatgcagtcagaatatttccaacagtgttttttgcaaattagagcaggacaaacttttatgtttacagggcacgtctgttgtaatgcaaagcatatttggcaagcagttcatcaccaggacactagctatgattctagaagtcaaaaggtgtctatagaactagtggggcttctgcatgtgaaaaacggttttccataggcattaaagtgctgaatgctcagtctgatcaacaagtgggcacctgcactaccactttttagaggaaattcactccctcgtaagcattggaaggtcaaattattttgaagtgatttttttaaaaaaaagtcttctgtttattaacaggaaaatttatttatttgacaggattttgagtaatgtaggaatacaaaaggtaaattagcagcacatataatttttttttaatttatgatccattttgtatggtctcaaagttggatgacctcattactaatatttgttgtaaaagtgaaacttgtttgccaaccaataaacaactgattgagattt

SEQ ID NO: 641 - DNA, 587 bp, Homo sapiens
  source 1..587: mol_type = unassigned DNA
acttatgtgctgcctgttaactgtgcctgtgttggctgtttattcaactttatttctggattagatgcatatttcataatgaattgggttcagggatgatcactttcaagctgcaggcaatggtcgagacagttaacaacctccttcagccacaagctttgaatgcatggagagacctgactacgagtgatcagctgcgtgcggccaccatgttgcttcatactgtggaggaaagtgcttttgtgctggctgataaccttttgaagactgacattgtcagggagaatacagacaatattaaattggaagttgcaagactgagcacagaaggaaacttagaagacctaaaatttccagaaaacatgggccatggaagcactatccagctgtctgcaaataccttaaagcaaaatggccgaaatggagagatcagagtggcctttgtcctgtataacaacttgggtccttatttatccacggagaatgccagtatgaagttgggaacggaagctttgtccacaaatcattctgttattgtcaattcccctgttattacggcagcaataaacaaagagttcagtaacaag

SEQ ID NO: 642 - DNA, 582 bp, Homo sapiens
  source 1..582: mol_type = unassigned DNA
accacacctgtggccgaggctcagcgcctcccgtgaggacgcagctggggctcaaccccgccctcctggaccgggctaccctcacctcctgccaccatctttacctgtccccgttagcagggagcactctgcgagaagatggccaaaaggtccgccgccgccgctgtcccggggatgccctctgcatctttattagtaaatcttctttcagctttactcatcctatttgtgtttggagaaacagaaataagatttactggacaaactgaatttgttgttaatgaaacaagtacaacagttattcgtcttatcattgaaaggataggagagccagcaaatgttactgcaattgtatcgctgtatggagaggacgctggtgacttttttgacacatatgctgcagcttttatacctgccggagaaacaaacagaacagtgtacatagcagtatgtgatgatgacttaccagagcctgacgaaacttttatttttcacttaacattacagcttccctcaatcgcagtgagtgagcccaagggcagaaatgagtctatgcctcttactctcatcagggaaaaggga

SEQ ID NO: 643 - DNA, 2221 bp, Homo sapiens
  source 1..2221: mol_type = unassigned DNA
gctgccccgggagccatgggtcctattggagcagagcgaggatgcagagggaggaggcaagggagggggagaaaggggaggaggatggagccctcctcctgatcctgtagtggtagtaagaatcagcagcgcgggcaaggagtacggacgggagtcagaggcagagcgagggtgtgtggagggccggcggggaccgccgggagcgcgcggatgtcggtgttcctggggccagggatgccctctgcatctttattagtaaatcttctttcagctttactcatcctatttgtgtttggagaaacagaaataagatttactggacaaactgaatttgttgttaatgaaacaagtacaacagttattcgtcttatcattgaaaggataggagagccagcaaatgttactgcaattgtatcgctgtatggagaggacgctggtgacttttttgacacatatgctgcagcttttatacctgccggagaaacaaacagaacagtgtacatagcagtatgtgatgatgacttaccagagcctgacgaaacttttatttttcacttaacattacagaaaccttcagcaaatgtgaagcttggatggccaaggactgttactgtgacaatattatcaaatgacaatgcatttggaattatttcatttaatatgcttccctcaatcgcagtgagtgagcccaagggcagaaatgagtctatgcctcttactctcatcagggaaaagggaacctatggaatggtcatggtgacttttgaggtagagggtggcccaaatccccctgatgaagatttgagtccagttaaaggaaatatcacctttccccctggcagagcaacagtaatttataacttgacagtactcgatgacgaggttggctaatgttacatacccaaatgggacaaggattctgtgttgcaggacacagtcctgtataaacttagtgtattgtggccagtcgcacctcagctataaatagctgactgttctggaatacatcttattactatttatcttacttaattcacattaaattacacatctaaaagctgatgaatctgaatataactggcaaccatacatcatacaaatatttaagcattttgtataccctggtaatcaatttttgttagtgctttcaattttgagcaagaacaatactaacctagaataaatattttaccataaaagcaaagaaaaattctactgcagttggtattcttttgtttttatttttttgttgttgtttagaaggagtctcgctctgttgcccaggctggagtgcagtggcgcgatctcggctcactgcaagctccgcctccagggttcacgccattctcctgcctcagcctcccgagtagctgggactacaggtgcctgccaccatgcccggctaattttttgtatttttaatagagacggggtttcaccgtgttagccaggatggtctcgatctcctgacctcgtgatccaccagcctcggcctcccaaagtgctgggattacaggcatgagccaccgcacccggcttgtttggatatttttaatgttcacatttatgggaagatttttattatttttatatttcacattggaactagcaaggatagagatacatgatacacctagcttaattgctaagaatgaatctgaacaataatgtgcaaggatgtcccccacatgagctaaacgagagaaaacatgactttttataaaagaaactaagttttgccagaaaagaaaacaaaaagaaaatagctggcaatttgtaaccctccctctaccctcctacaaaaattctgaaactaaatcacaagaaaactcaagagaagggaaaaaatgtattagagtattagaagacattattagaaaagaatttttctcttgaaaaaaaatgaaatatttggaagcattgatatctccagttcctctggttctggaagcaagcaaaaaaacctttttgttttaagatctcagagcattgaacgggctataatttggggagatgattaattatacattttgattgtaaatttgaaagatcaatcgaatcataacattttatttttaagataaatagctttgctttttatattgctgctgatggaggtaaaagcatgcatttttttcacttttatttctaaaatagagtttatggtgaatgaaaagctcacacagcacagtggagattaaccccaagatttctctgcagc

SEQ ID NO: 644 - DNA, 19557 bp, Homo sapiens
  source 1..19557: mol_type = unassigned DNA
ggtagtaagaatcagcagcgcgggcaaggagtacggacgggagtcagaggcagagcgagggtgtgtggagggccggcggggaccgccgggagcgcgcggatgtcggtgttcctggggccagggatgccctctgcatctttattagtaaatcttctttcagctttactcatcctatttgtgtttggagaaacagaaataagatttactggacaaactgaatttgttgttaatgaaacaagtacaacagttattcgtcttatcattgaaaggataggagagccagcaaatgttactgcaattgtatcgctgtatggagaggacgctggtgacttttttgacacatatgctgcagcttttatacctgccggagaaacaaacagaacagtgtacatagcagtatgtgatgatgacttaccagagcctgacgaaacttttatttttcacttaacattacagaaaccttcagcaaatgtgaagcttggatggccaaggactgttactgtgacaatattatcaaatgacaatgcatttggaattatttcatttaatatgcttccctcaatcgcagtgagtgagcccaagggcagaaatgagtctatgcctcttactctcatcagggaaaagggaacctatggaatggtcatggtgacttttgaggtagagggtggcccaaatccccctgatgaagatttgagtccagttaaaggaaatatcacctttccccctggcagagcaacagtaatttataacttgacagtactcgatgacgaggtaccagaaaatgatgaaatatttttaattcaactgaaaagtgtagaaggaggagctgagattaacacctctaggaattccattgagatcatcattaagaaaaatgatagtcccgtgagattccttcagagtatttatttggttcctgaggaagaccacatactcataattccagtagttcgtggaaaggacaacaatggaaatctgattggatctgatgaatatgaggtttcaatcagttatgctgtcacaactgggaattccacagcacatgcccagcaaaatctggacttcattgatcttcagccaaacacaactgttgtttttccaccttttattcatgaatctcacttgaaatttcaaatagttgatgacaccataccggagattgctgaatcgtttcacattatgttactaaaagataccttacagggagatgctgtgctaataagcccttctgttgtacaagtcaccattaagccaaatgataaaccttatggagtcctttcattcaacagtgttttgtttgaaaggacagttataattgatgaagatagaatatcaagatatgaagaaatcacagtggttagaaatggaggaacccatgggaatgtctctgcgaattgggtgttgacacggaacagcactgatccctcaccagtaacagcagatatcagaccgagctctggagttctccattttgcacaagggcagatgttggcaacaattcctcttactgtggttgatgatgatcttccagaagaggcagaagcttatctacttcaaattctgcctcatacaatacgaggaggtgcagaagtgagcgagccagcggagcttttgttctacattcaggatagtgatgatgtctatggcctaataacattttttcctatggaaaaccagaagattgaaagcagcccaggtgaacgatacttatccttgagttttacaagactaggagggactaaaggagatgtgaggttgctttattctgtactttacattcctgctggagctgtggaccccttgcaagcaaaagaaggcatcttaaatatatcaaggagaaatgacctcatttttccagagcaaaaaactcaagtcactacaaaattaccaataagaaatgatgcattccttcaaaatggagctcactttctagtacagttggaaactgtggagttgttaaacataattcctctaatcccacccataagccctagatttggggaaatctgcaatatttctttactggttactccagccattgcaaatggagaaattggctttctcagcaatcttccaattattttgcatgaaccagaagattttgctgctgaagtggtatacattcccttacatcgggatggaactgatggccaggctactgtctactggagtttgaagccctctggctttaattcaaaagcagtgaccccggatgatataggcccctttaatggctctgttttgtttttatctgggcaaagtgacacaacaatcaacattactatcaaaggtgatgacataccggaaatgaatgaaactgtaacactttctctagacagggttaacgtggaaaaccaagtgctgaaatctggatatactagccgtgacctaattattttggaaaatgatgaccctgggggagtttttgaattttctcctgcttccagaggaccctatgttataaaagaaggagaatctgtagagctccacatcatccgatcaagggggtcccttgttaagcagtttctacactaccgagtagagccaagagatagcaatgaattctatggaaacacgggagtactagaatttaaacctggagaaagggagatagtgatcaccttgctagcaagattggatgggataccagagttggatgaacactactgggtggtcctcagcagccacggagaacgggaaagcaagttgggaagtgccaccattgtcaatataacgattctgaaaaatgatgatcctcatggcattatagaatttgtttctgatggtctaattgtgatgataaatgaaagcaaaggagatgctatctatagtgctgtttatgatgtagtaagaaatcgaggcaactttggtgatgttagtgtatcatgggtggttagtccagactttacacaagatgtatttcctgtacaagggactgttgtctttggagatcaggaattttcaaaaaatatcaccatttactcccttccagatgagattccagaagaaatggaagaatttaccgttatcctactgaatggcactggaggagctaaagtgggaaatagaacaactgcaactctgaggattagaagaaatgatgaccccatttattttgcagaacctcgtgtagtgagggttcaggaaggtgagactgccaactttacagttctcagaaatggatctgttgatgtgacttgcatggtccagtatgctaccaaggatgggaaggctactgcaagagagagagatttcattcctgttgaaaaaggagaaacgctcatttttgaggttggaagtagacagcagagcatatccatatttgttaatgaagatggtatcccggaaacagatgagcccttttatataatcctcttgaattcaacaggtgatacagtagtatatcaatatggagtagctacagtaataattgaagctaatgatgacccaaatggcattttttctctggagcccatagacaaagcagtggaagaaggaaagactaatgcattttggattttgaggcaccgaggatactttggtagtgtttctgtatcttggcagctctttcagaatgattctgctttgcagcctgggcaggagttctatgaaacttcaggaactgttaacttcatggatggagaagaagcaaaaccaatcattctccatgcttttccagataaaattcctgaattcaatgaattttatttcctaaaacttgtaaacatttcaggtggatccccaggtcctgggggccagctagcagaaaccaacctccaggtgacagtaatggttccattcaatgatgatccctttggagtttttatcttggatccagagtgtttagagagagaagtggcagaagatgtcctgtctgaagatgatatgtcttatattaccaacttcaccattttgaggcagcagggtgtgtttggtgatgtacaactgggctgggaaatactgtccagtgagttccctgctggtttgccaccaatgatagattttttactggttggaattttccccaccaccgtgcatttacaacagcacatgcggcgtcaccacagtggaacggatgctttgtactttaccggactagagggtgcatttgggactgttaatccaaaataccatccctccaggaataatacaattgccaactttacattctcagcttgggtaatgcccaatgccaatacgaatggattcattatagcgaaggatgacggtaatggaagcatctactacggggtaaaaatacaaacaaacgaatcccatgtgacactttcccttcattataaaaccttgggttccaatgctacatacattgccaagacaacagtcatgaaatatttagaagaaagtgtttggcttcatctactaattatcctggaggatggtataatcgaattctacctggatggaaatgcaatgcccaggggaatcaagagtctgaaaggagaagccattactgacggtcctgggatactgagaattggagcagggataaatggcaatgacagatttacaggtctgatgcaggatgtgaggtcctatgagcggaaactgacgcttgaagaaatttatgaacttcatgccatgcccgcaaaaagtgatttacacccaatttctggatatctggagttcagacagggagaaactaacaaatcattcattatttctgcaagagatgacaatgacgaggaaggagaagaattattcattcttaaactagtttctgtatatggaggagctcgtatttcggaagaaaatactactgcaagattaacaatacaaaaaagtgacaatgcaaatggcttgtttggtttcacaggagcttgtataccagagattgcagaggagggatcaaccatttcttgtgtggttgagagaaccagaggagctctggattatgtgcatgttttttacaccatttcacagattgaaactgatggcattaattaccttgttgatgactttgctaatgccagtggaactattacattccttccttggcagagatcagaggttctgaatatatatgttcttgatgatgatattcctgaacttaatgagtatttccgtgtgacattggtttctgcaattcctggagatgggaagctaggctcaactcctaccagtggtgcaagcatagatcctgaaaaggaaacgactgatatcaccatcaaagctagtgatcatccatatggcttgctgcagttctccacagggctgcctcctcagcctaaggacgcaatgaccctgcctgcaagcagcgttccacatatcactgtggaggaggaagatggagaaatcaggttattggtcatccgtgcacagggacttctgggaagggtgactgcggaatttagaacagtgtccttgacagcattcagtcctgaggattaccagaatgttgctggcacattagaatttcaaccaggagaaagatataaatacattttcataaacatcactgataattctattcctgaactggaaaaatcttttaaagttgagttgttaaacttggaaggaggagtagctgaactctttagggttgatggaagtggtagtggtgatggggacatggaattcttccttccaactattcacaaacgtgccagtctaggagtggcttcccaaattctagtgacaattgcagcctctgaccacgctcatggcgtatttgaatttagccctgagtcactctttgtcagtggaactgaaccagaagatgggtatagcactgttacattaaatgttataagacatcatggaactctgtctccagtgactttgcattggaacatagactctgatcctgatggtgatctcgccttcacctctggcaacatcacatttgagattgggcagacgagcgccaatatcactgtggagatattgcctgacgaagacccagaactggataaggcattctctgtgtcagtcctcagtgtttccagtggttctttgggagctcatattaatgccacgttaacagttttggctagtgatgatccatatgggatattcattttttctgagaaaaacagacctgttaaagttgaggaagcaacccagaacatcacactatcaataataaggttgaaaggcctcatgggaaaagtccttgtctcatatgcaacactagatgatatggaaaaaccaccttattttccacctaatttagcgagagcaactcaaggaagagactatataccagcttctggatttgctctttttggagctaatcagagtgaggcaacaatagctatttcaattttggatgatgatgagccagaaaggtccgaatctgtctttatcgaactactcaactctactttagtagcgaaagtacagagtcgttcaattccaaattctccacgtcttgggcctaaggtagaaactattgcgcaactaattatcattgccaatgatgatgcatttggaactcttcagctctcagcaccaattgtccgagtggcagaaaatcatgttggacccattatcaatgtgactagaacaggaggagcatttgcagatgtctctgtgaagtttaaagctgtgccaataactgcaatagctggtgaagattatagtatagcttcatcagatgtggtcttgctagaaggggaaaccagtaaagccgtgccaatatatgtcattaatgatatctatcctgaactggaagaatcttttcttgtgcaactgatgaatgaaacaacaggaggagccagactaggggctttaacagaggcagtcattattattgaggcctctgatgacccctatggattatttggttttcagattactaaacttattgtagaggaacctgagtttaactcagtgaaggtaaacctgccaataattcgaaattctgggacactcggcaatgttactgttcagtgggttgccaccattaatggacagcttgctactggcgacctgcgagttgtctcaggtaatgtgacctttgcccctggggaaaccattcaaaccttgttgttagaggtcctggctgacgacgttccggagattgaagaggttatccaagtgcaactaactgatgcctctggtggaggtactattgggttagatcgaattgcaaatattattattcctgccaatgatgatccttatggtacagtagcctttgctcagatggtttatcgtgttcaagagcctctggaaagaagttcctgtgctaatataactgtcaggcgaagcggagggcactttggtcggctgttgttgttctacagtacttccgacattgatgtagtggctctggcaatggaggaaggtcaagatttactgtcctactatgaatctccaattcaaggggtgcctgacccactttggagaacttggatgaatgtctctgccgtgggggagcccctgtatacctgtgccactttgtgccttaaggaacaagcttgctcagcgttttcatttttcagtgcttctgagggtccccagtgtttctggatgacatcatggatcagcccagctgtcaacaattcagacttctggacctacaggaaaaacatgaccagggtagcatctctttttagtggtcaggctgtggctgggagtgactatgagcctgtgacaaggcaatgggccataatgcaggaaggtgatgaattcgcaaatctcacagtgtctattcttcctgatgatttcccagagatggatgagagttttctaatttctctccttgaagttcacctcatgaacatttcagccagtttgaaaaatcagccaaccataggacagccaaatatttctacagttgtcatagcactaaatggtgatgcctttggagtgtttgtgatctacaatattagtcccaatacttccgaagatggcttatttgttgaagttcaggagcagccccaaaccttggtggagctgatgatacacaggacagggggcagcttaggtcaagtggcagtcgaatggcgtgttgttggtggaacagctactgaaggtttagattttataggtgctggagagattctgacctttgctgaaggtgaaaccaaaaagacagtcattttaaccatcttggatgactctgaaccagaggatgacgaaagtatcatagttagtttggtgtacactgaaggtggaagtagaattttgccaagctccgacactgttagagtgaacattttggccaatgacaatgtggcaggaattgttagctttcagacagcttccagatctgtcataggtcatgaaggagaaattttacaattccatgtgataagaactttccctggtcgaggaaatgttactgttaactggaaaattattgggcaaaatctagaactcaattttgctaactttagcggacaacttttctttcctgaggggtcgttgaatacaacattgtttgtgcatttgttggatgacaacattcctgaggagaaagaagtataccaagtcattctgtatgatgtcaggacacaaggagttccaccagccggaatcgccctgcttgatgctcaaggatatgcagctgtcctcacagtagaagccagtgatgaaccacatggagttttaaattttgctctttcatcaagatttgtgttactacaagaggctaacataacaattcagcttttcatcaacagagaatttggatctctaggagctatcaatgtcacatataccacggttcctggaatgctgagtctgaagaaccaaacagtaggaaacctagcagagccagaagttgattttgtccctatcattggctttctgattttagaagaaggggaaacagcagcagccatcaacattaccattcttgaggatgatgtaccagagctagaagaatatttcctggtgaatttaacttacgttggacttaccatggctgcttcaacttcatttcctcccagactagattcagaaggtttgactgcacaagttattattgatgccaatgatggggcccgaggtgtaattgaatggcaacaaagcaggtttgaagtaaatgaaacccatggaagtttaacattggtagcccagaggagcagagaacctcttggccatgtttccttatttgtgtatgctcagaatttggaagcacaagtggggctggattatatcttcaccccaatgattcttcattttgctgatggagaaaggtataaaaatgtcaatatcatgattcttgatgatgacattccagaaggagatgaaaaatttcagctgattttaacaaatccttctcctggactagagctagggaaaaatacaatagccttaattattgtccttgctaatgatgacggccctggagttctatcatttaacaacagtgagcactttttcctaagagagccaacagctctctacgtccaggagagtgttgcagtattgtacattgttcgggaacctgcacaaggattgtttggaacagtgacagttcagttcattgtgacagaagtgaattcctcaaatgaatctaaagatctgactccttccaaaggctatattgttttagaagaaggtgttcgattcaaggccctacaaatatctgccatattagacacggaaccagaaatggatgagtattttgtttgcaccttgtttaatccaactggaggtgctagactaggggtgcatgttcaaaccctgataacagttttgcaaaaccaggcccctttggggctattcagtatctctgcagttgaaaatagagccacctccatagacatcgaagaagccaataggaccgtgtatttaaatgtatctcgaactaatggcattgatttggctgtgagtgtgcagtgggagacagtatctgaaacagcctttggcatgaggggaatggatgttgtgttttccgtatttcaaagttttttggatgaatcagcttctggctggtgtttctttactttggaaaatttaatatatggtataatgttaagaaaatcatctgttactgtttaccgatggcaggggatttttattccagttgaggatttaaatatagaaaatcctaaaacttgtgaggcctttaatattggtttttctccctactttgtgattactcatgaagaaagaaatgaagaaaagccttctcttaacagtgtgtttacattcacatctggatttaaattattcctggtacaaacaatcattattctggaaagttctcaagtaagatattttacttcagacagccaagattatttaatcattgcaagtcaaagagatgattccgaattaactcaggtcttcaggtggaatggaggaagcttcgtgttgcatcaaaaactccctgtccgaggtgtgctgaccgtggccttgttcaacaagggaggctctgtgttcttagccatttcccaggctaatgccaggctaaactcccttttattcagatggtctggcagtgggtttattaactttcaagaggtgcctgtcagtgggacaacagaagttgaggctttgtcttcagccaatgatatttacctaatatttgccgaaaatgtctttctaggagatcagaattcaattgatattttcatctgggagatgggacagtcttccttcaggtattttcagtctgtagattttgctgctgttaacagaatccactccttcacaccagcctcaggaatagcccacatacttcttattggccaagatatgtctgctctttactgctggaattcggagcgtaatcaattctcttttgttctggaagtaccttctgcttatgatgtggcttctgttacagtaaagtcccttaattcaagcaagaatttaatagctctagtgggagctcattcacatatatatgagctagcctacatttccagccattctgactttattcctagttcaggtgaactgatatttgaacctggtgagagagaagctacaatagcagtaaatatccttgatgatacagttccagaaaaagaagaatccttcaaagttcaacttaaaaatcccaaaggaggagcagagattggcattaatgattctgtaacaataaccattctgtctaatgatgatgcctatggaattgttgcatttgctcagaattcattatataagcaagtggaagaaatggagcaagatagcctagtaaccttgaacgttgaacgcttaaaaggaacatatggccgtataaccatagcatgggaagctgatggaagtattagtgatatatttcctacctcaggagtgattttatttactgaaggccaggtactgtcaacaatcactctaactattcttgctgataatataccagagttatcagaggttgtgattgtaaccctcacccgtatcaccacagaaggggttgaggactcatacaaaggtgctactattgatcaggacagaagcaagtctgttataacaactttgcccaatgactcaccttttggcttggtgggctggcgtgctgcgtctgtcttcattagagtagcagagcctaaagaaaacaccaccactcttcagttacaaatagctcgagataaaggactacttggggatattgccattcacttgagagctcaacccaatttcttactgcatgtcgataatcaagctactgagaatgaagattatgtattgcaagaaacaataataataatgaaagaaaacataaaagaagctcatgccgaagtttccattttgccggatgaccttcctgaattggaggaaggatttattgtcactatcactgaggtgaacctggtgaactctgacttctctacaggacagccaagtgtgcggaggcccggaatggaaatagctgagataatgatagaagaaaatgacgatcccagaggaatttttatgtttcatgttactagaggcgctggggaagttattactgcctatgaggtgcctccacccttgaacgttcttcaagttcctgtagtccggctggctggaagctttggggcagtaaatgtttattggaaagcatcaccagacagtgctggcctggaagactttaaaccatctcatgggattcttgaatttgcagataaacaggttactgcaatgatagaaatcaccataattgatgatgctgaatttgaattgacagagacgttcaatatttccttgatcagtgttgctggaggtggcagacttggtgatgatgttgtggtaactgttgttattccacaaaatgattctccatttggagtatttggatttgaagaaaagactgtaatgattgatgaatccctttcatccgatgaccctgattcatatgtgacattgacggttgtccggtccccaggaggaaaaggaaccgtccgacttgagtggaccatagatgagaaggctaaacataaccttagtcctttgaatgggacccttcattttgatgagactgagtcccagaagaccattgtgttgcacacacttcaagacacagtgttggaggaggacaggcgtttcaccattcagctgatatcaattgatgaggtagaaatatctccagtaaaaggtagtgcatcaataattattcggggtgataagcgagcatcaggagaagttgggatagctccgtcatctaggcacatcctcattggggaaccctcagcaaaatataatggtaccgctattatcagccttgttcgaggcccagggattttgggggaggtcacagtgttctggaggatattccctccttccgtgggggaatttgctgaaacatcaggaaaactgacaatgcgagacgaacagtctgcagtcattgtagtaatacaggctttgaacgatgacattcccgaggaaaaaagcttctatgagtttcagctcactgcagtcagtgagggaggagttctgagtgaatccagcagcactgccaacatcacggtggtggccagcgactctccctatggccgatttgccttttcacatgagcaacttcgagtgtcagaagcacagagggttaacatcacaatcatccgttccagtggagattttggccatgtgcgactctggtacaagacgatgagcgggacagcggaagcaggcttggattttgttcctgcagcaggggagctcctctttgaagcaggggagatgaggaaaagtctgcatgttgaaatccttgatgatgactatcctgaaggcccagaggaattttctctaacaattacaaaggtggaactccagggaagagggtatgattttaccattcaagaaaatggacttcagatagatcaacctcctgaaataggaaacatctccattgttcgcatcataataatgaaaaatgataacgcagaaggcatcattgaatttgacccaaagtatactgccttcgaagtggaggaagatgttgggctgatcatgatcccagtggtgaggctacatggaacttatggctatgtgacagctgatttcatctctcagagctcctctgccagtcccggaggtgttgattacattttgcatggcagtacagtcacctttcagcatgggcaaaacttaagttttataaatatctccatcattgatgacaatgaaagtgaatttgaggagcccattgaaattctactcactggagctactggaggagcggtccttgggcgccacctagtgagcagaatcataatagctaagagtgactctccctttggagttataaggtttctcaatcaaagcaaaatttctattgctaatcccaattccacaatgattttatcactggtgctggagcggactggaggactcttgggagagattcaggtgaactgggagacagtaggacccaactctcaagaagccttactgccacagaatagagacattgcagacccagtgagcgggttgttctattttggagaaggagaaggaggagtgagaaccataattctgacaatctatcctcatgaagaaattgaagttgaagagacattcattattaaacttcatcttgtgaaaggagaagctaaattagactccagagctaaagatgttacattaaccatacaagagtttggtgacccaaatggagttgttcagtttgctcctgaaactttgtctaagaagacttattcagagcctctggctctggaagggcccctgctcattaccttctttgtcagaagagtcaagggcacctttggagagattatggtttactgggaattaagtagtgagtttgacattactgaagactttctttccaccagtggatttttcaccattgctgatggagagagtgaagctagctttgatgttcatttgctaccagatgaggtacctgagatagaggaagattatgtgatccagcttgtttctgtagagggaggagccgaactggatctggagaagagtatcacatggttctctgtttatgcaaatgatgacccacatggagtatttgccctgtattcggatcgccagtcaatacttattgggcagaaccttattagatccatccaaattaacataacccggcttgctggaacatttggagatgtggctgttgggcttcgaatatcatcggatcataaagaacagccgattgttaccgaaaatgcagagaggcagctggtggtcaaagatggtgccacatataaagtggacgtggtgccaataaagaatcaggtcttcctatcactgggctctaatttcactttgcaactggtgactgtgatgcttgtcggtggacgtttctatggaatgccaacaattcttcaggaagcaaaatctgctgtccttccagtctctgagaaagctgccaattctcaggtcggatttgaatccactgcttttcaactcatgaacatcactgctggcacaagccacgttatgatttctaggagaggcacatatggagctctctcggttgcctggaccactggatatgctcctgggttagaaattcctgaattcattgttgttggcaacatgaccccaacactggggagcctttcattttcccacggtgaacaaaggaaaggagttttcctgtggacgtttcctagccctggttggccagaggcctttgttcttcacctatcaggagtgcagagcagtgctcctggcggagctcaactccgatcaggtttcattgttgctgaaattgaaccaatgggcgtcttccaattttccactagctcaagaaatatcatagtgtcagaagatacacagatgatcagattacatgtacaaagactatttgggttccacagcgatcttattaaagtttcttatcagaccactgcaggaagcgccaagccactggaagattttgagcctgttcagaatggggaactgttttttcaaaaattccaaactgaggttgattttgaaataaccattattaatgatcagctttctgagatagaagaatttttttacattaaccttacttcagtagaaattaggggattacaaaagtttgatgttaattggagcccacgcctgaatctagatttcagtgttgcagtgattacaatattggataatgatgacctggcaggaatggatatttccttccccgagacaactgtggctgtagcagttgacacaactctcattcctgtagaaactgaatccaccacatacctcagcacaagcaagacgactaccattctgcagccaaccaacgtggttgccattgttactgaggcaactggtgtatctgccatccctgagaaacttgtcacccttcatggcacacctgctgtgtctgaaaagcctgatgtggccactgtaactgccaatgtttccattcatggaacattcagccttgggccatccattgtttatattgaagaggagatgaagaatggcacattcaacactgcagaagttcttatccgaagaactggtgggtttactggcaatgtcagcataacagttaaaactttcggtgaaagatgtgctcagatggaaccaaatgcattgccctttcgtggtatctatgggatttccaacctaacatgggcagttgaagaagaagactttgaagaacaaactcttacccttatattcctagatggagaaagagaacgtaaagtatcagttcaaattttggatgatgatgagcctgaggggcaggaattcttctacgtgtttctcacaaaccctcaagggggagcacagattgtggaggagaaggatgatactggatttgcagcttttgccatggttattattacagggagtgaccttcacaatggcatcataggattcagtgaggagtcccagagtggactagaactcagggaaggagctgttatgagaagattgcaccttattgtcacaagacagccaaacagggcctttgaagatgtcaaggtcttttggcgagtcacacttaacaaaacagtcgtcgtgctccagaaggatggggtaaacctggtggaggaacttcagtctgtgtcagggaccacaacctgtacaatgggtcaaacaaaatgctttatcagcattgaactcaaaccagaaaaggtaccacaggttgaagtgtatttttttgtggaactatatgaagctactgctggagcagcaataaacaacagtgccagattcgcacagattaaaatcttagaaagtgatgaatctcaaagccttgtgtatttttctgtgggttctcggctggcagtggctcacaagaaggccactttaatcagtctgcaggtggccagagattctgggacaggactaatgatgtctgttaactttagtacccaggagttgaggagtgctgaaacaattggtcgtaccatcatatctccagctatttctggaaaggattttgtgataactgaaggcacattggtctttgaacctggccagagaagcactgtattggatgtcatcctaacgccagagacaggatctttaaattcatttcctaaacgcttccagattgtcctttttgacccaaaaggtggtgccagaattgataaagtgtatgggactgccaacatcactcttgtctcagatgcagattcgcaggccatttgggggcttgcagatcagctacatcagcctgtgaatgatgatattctcaacagagtgctccataccatcagcatgaaagtggccacagaaaacacagatgaacaactcagtgccatgatgcatttaatagaaaagataactactgaaggaaaaattcaagctttcagtgttgccagccgaactcttttctatgagattctttgttctcttattaacccaaagcgcaaggacactaggggattcagtcactttgctgaagtgactgagaattttgccttttctctgctgactaatgttacttgcggctctcctggtgaaaaaagcaaaaccatccttgatagttgcccatatttgtcaatattggctcttcactggtatcctcagcaaatcaatggacacaagtttgaaggaaaggaaggagattacattcgaattccagagaggctactggatgtccaggatgcagaaataatggctgggaaaagtacatgtaaattagtccagtttacagagtatagcagccaacagtggtttataagtggaaacaatcttcctaccctaaaaaataaggtattatctttgagtgtgaaaggtcagagttcacaactcctgactaatgacaatgaggttctctacaggatttatgctgctgagcctagaattattcctcagacatctctgtgtctcctttggaatcaggctgctgcaagctggttgtctgacagtcagttttgcaaagtggttgaggaaactgcagactatgtggaatgtgcctgttcacacatgtctgtgtatgctgtctatgctcggactgacaacttgtcttcatacaatgaagccttcttcacttctggatttatatgtatctcaggtctttgcttggctgttctttcccatatcttctgtgccaggtactccatgtttgcagctaaacttctgactcacatgatggcagccagcttaggtacacagattctgtttctggcgtctgcatacgcaagtccccaactcgctgaggagagctgttcagctatggctgctgtcacacattacctgtatctttgccagtttagctggatgctcattcagtctgtgaatttctggtacgtgctggtgatgaatgatgagcacacagagaggcgatatctgctgtttttccttctgagttggggactaccagcttttgtggtgattctcctcatagttattttgaaaggaatctatcatcagagcatgtcacagatctatggactcattcatggtgacctgtgttttattccaaacgtctatgctgctttgttcactgcagctcttgttcctttgacgtgcctcgtggtggtgttcgtggtgttcatccatgcctaccaggtgaagccacagtggaaagcatatgatgatgtcttcagaggaaggacaaatgctgcagaaattccactgattttatatctctttgctctgatttccgtgacatggctttggggaggactacacatggcctacagacacttctggatgttggttctctttgtcattttcaacagtctgcagggactttatgttttcatggtttatttcattttacacaaccaaatgtgttgccctatgaaggccagttacactgtggaaatgaatgggcatcctggacccagcacagcctttttcacgcccgggagtggaatgcctcctgctggaggggaaatcagcaagtccacccagaatctcatcggtgctatggaggaggtgccacctgactgggagagagcatccttccaacagggcagtcaggccagccctgatttaaagccaagtccacaaaatggagccacgttcccgtcctctggaggatatggccaggggtcactgatagccgatgaggagtcccaggagtttgatgatttaatatttgcattaaaaactggtgctggtctcagtgtcagtgataatgaatctggtcaaggcagccaggaggggggcaccttgactgactcccagatcgtggagctcaggaggatacccatcgccgacactcacctgtagcacctcactaaccattcgactgagcacactttcatatttgtatcagcttttgtgctaaaactctctaagtacatccacctgtgtaataggaacctgtgaattgtactggatgattaatacaaacgtgattgttgtatttggagtataaattactgattgtatgtgacctgaaaattcactgctataagaaaggtggagtcagtttgtatcagttaataggatgttcatattccaaggatattagttgtttttttaatcatcctatatggctaacattgtttaatgaaagtaataatcaataaagcaatagaatctatttggtatcatccagcttcattattgataaagaaacattgtgcatgggcaaaaaaagctaactctatatgtagatgatgacaagcaccctgtgccatcttgcatgaatccaggtgatccagattcaagacttcactgcaactagaagactttaattctgaaaactgtaaaatggtctgtctgttgatgatcctgcacataaatgttgattggagtactgaa

SEQ ID NO: 645 - DNA, 2906 bp, Homo sapiens
  source 1..2906: mol_type = unassigned DNA
agtaagaatcagcagcgcgggcaaggagtacggacgggagtcagaggcagagcgagggtgtgtggagggccggcggggaccgccgggagcgcgcggatgtcggtgttcctggggccagggatgccctctgcatctttattagtaaatcttctttcagctttactcatcctatttgtgtttggagaaacagaaataagatttactggacaaactgaatttgttgttaatgaaacaagtacaacagttattcgtcttatcattgaaaggataggagagccagcaaatgttactgcaattgtatcgctgtatggagaggacgctggtgacttttttgacacatatgctgcagcttttatacctgccggagaaacaaacagaacagtgtacatagcagtatgtgatgatgacttaccagagcctgacgaaacttttatttttcacttaacattacagaaaccttcagcaaatgtgaagcttggatggccaaggactgttactgtgacaatattatcaaatgacaatgcatttggaattatttcatttaatatgcttccctcaatcgcagtgagtgagcccaagggcagaaatgagtctatgcctcttactctcatcagggaaaagggaacctatggaatggtcatggtgacttttgaggtagagggtggcccaaatccccctgatgaagatttgagtccagttaaaggaaatatcacctttccccctggcagagcaacagtaatttataacttgacagtactcgatgacgaggtaccagaaaatgatgaaatatttttaattcaactgaaaagtgtagaaggaggagctgagattaacacctctaggaattccattgagatcatcattaagaaaaatgatagtcccgtgagattccttcagagtatttatttggttcctgaggaagaccacatactcataattccagtagttcgtggaaaggacaacaatggaaatctgattggatctgatgaatatgaggtttcaatcagttatgctgtcacaactgggaattccacagcacatgcccagcaaaatctggacttcattgatcttcagccaaacacaactgttgtttttccaccttttattcatgaatctcacttgaaatttcaaatagttgatgacaccataccggagattgctgaatcgtttcacattatgttactaaaagataccttacagggagatgctgtgctaataagcccttctgttgtacaagtcaccattaagccaaatgataaaccttatggagtcctttcattcaacagtgttttgtttgaaaggacagttataattgatgaagatagaatatcaagatatgaagaaatcacagtggttagaaatggaggaacccatgggaatgtctctgcgaattgggtgttgacacggaacagcactgatccctcaccagtaacagcagatatcagaccgagctctggagttctccattttgcacaagggcagatgttggcaacaattcctcttactgtggttgatgatgatcttccagaagaggcagaagcttatctacttcaaattctgcctcatacaatacgaggaggtgcagaagtgagcgagccagcggagcttttgttctacattcaggatagtgatgatgtctatggcctaataacattttttcctatggaaaaccagaagattgaaagcagcccaggtgaacgatacttatccttgagttttacaagactaggagggactaaaggagatgtgaggttgctttattctgtactttacattcctgctggagctgtggaccccttgcaagcaaaagaaggcatcttaaatatatcaaggagaaatgacctcatttttccagagcaaaaaactcaagtcactacaaaattaccaataagaaatgatgcattccttcaaaatggagctcactttctagtacaggtacttgtatgattaaaataatcgtaattttggttaaccttcaagtgtactaacctgtgtgaaagaattaactgaacattattttgaccttgttattttgccgtcatttatatgttgttactaaaagttgtttaggtagtcggaagagagattatgcctgctcctaaggtatataagtataaataagacaagaatttttaccaaagttaatattttaattaagtgacattaaaagtacaccagacgtgaaatgccagtcatgcaagtcagactgtcatggatgacatagtagagtaacttacaaactattacaggggagggcgagagaaagagaggctaaccatgctttgaattgatttgggaaaatatgacataggaataggatttgtaggataagtatgttttcataatgaatattgcaaggaaaatatttcagaaacaaagcaatatgagatatatattttttctttttttttgagacagggtctcactctgtcacccaggctggagtgcagtggcggcatctcagttcactgcagcctccacgtcccaggttcaagtgattctcctgcctcagcctcccgagtagctgggattatagatgcctgtcaccacacctggctaatttttgtgtttttagtagagacggggttttcccatttttggccaggctggtcttaaactcctgacctcagatgatccatgcgcctgagcctcctaaagtgctgtgattacaggtgtaagccaccacgcctggcccaagaaaaattttataaatacttttaaataatatactcaaaaatcaatttctttgtctaggtagactctctggaccttcaactgtttagtaaagtccccatgacgtatccttccattttatacatttcatttcttctgttaaccaaaatattatttttatggccaaagtataaaatatctgcactcatttatgatactgttgttgttttcca

SEQ ID NO: 646 - DNA, 1466 bp, Homo sapiens
  source 1..1466: mol_type = unassigned DNA
gagtcagaggcagagcgagggtgtgtggagggccggcggggaccgccgggagcgcgcggatgtcggtgttcctggggccagggatgccctctgcatctttattagtaaatcttctttcagctttactcatcctatttgtgtttggagaaacagaaataagatttactggacaaactgaatttgttgttaatgaaacaagtacaacagttattcgtcttatcattgaaaggataggagagccagcaaatgttactgcaattgtatcgctgtatggagaggacgctggtgacttttttgacacatatgctgcagcttttatacctgccggagaaacaaacagaacagtgtacatagcagtatgtgatgatgacttaccagagcctgacgaaacttttatttttcacttaacattacagaaaccttcagcaaatgtgaagcttggatggccaaggactgttactgtgacaatattatcaaatgacaatgcatttggaattatttcatttaatatgcttccctcaatcgcagtgagtgagcccaagggcagaaatgagtctatgcctcttactctcatcagggaaaagggaacctatggaatggtcatggtgacttttgaggtagagggtggcccaaatccccctgatgaagatttgagtccagttaaaggaaatatcacctttccccctggcagagcaacagtaatttataacttgacagtactcgatgacgaggtaccagaaaatgatgaaatatttttaattcaactgaaaagtgtagaaggaggagctgagattaacacctctaggaattccattgagatcatcattaagaaaaatgatagtcccgtgagattccttcagagtatttatttggttcctgaggaagaccacatactcataattccagtagttcgtggaaaggacaacaatggaaatctgattggatctgatgaatatgaggtttcaatcagttatgctgtcacaactgggaattccacagcacatgcccagcaaaatctggacttcattgatcttcagccaaacacaactgttgtttttccaccttttattcatgaatctcacttgaaatttcaaatagttgatgacaccataccggagattgctgaatcgtttcacattatgttactaaaagataccttacagggagatgctgtgctaataagcccttctgttgtacaagtcaccattaagccaaatgataaaccttatggagtcctttcattcaacagtgttttgtttgaaaggacagttataattgatgaagatagaatatcaaggtatgatttattttaaatatattgctaccattattttattatattattccagatttaagttttgtggtgttggacacaacaatgaactgttagaatatgtgtcattttttcccacaaagtttcatgacaaactcagaaaagacacacacacacacacacacacacacac

SEQ ID NO: 647 - DNA, 1309 bp, Homo sapiens
  source 1..1309: mol_type = unassigned DNA
gatcaatcaagagcagagaaaaaaattcacataattgctttcctatataattctttttctatgtaatatttgttttcgtttcacagcatgaacaaatgattttgtttagaatcatttcttttttccttttttttttttgaggcagagtcttgcactgtcattcaggctggagtgtagtggtgcgatcttggctcactgcaacctccgcctcccgggttcaagcaattctcctgcctcagcctcccaagtagctgggactacagacacacaccaccacgcccagctaatttttgtatttttattagagatgaggtttcaccatattggccaggctggtcttgaactcctgacctcgtgatccgcccgtgtcggcctcccaaagtgctgggattacagtagtgagccactgcgcctggcctggaatcatttgtttatttctgaagataagttttttcagttgttaaatatttatgatttttgtttttgtacaccctatctataaacataaatgtcacttgatttatgctttttctcttgattgctgtaattaacatcagttttacttgtcctaatactgtgttaaataagaatgatctatattttgcatttgatagctgtatggagaggacgctggtgacttttttgacacatatgctgcagcttttatacctgccggagaaacaaacagaacagtgtacatagcagtatgtgatgatgacttaccagagcctgacgaaacttttatttttcacttaacattacagaaaccttcagcaaatgtgaagcttggatggccaaggactgttactgtgacaatattatcaaatgacaatgcatttggaattatttcatttaatatgcttccctcaatcgcagtgagtgagcccaagggcagaaatgagtctatgcctcttactctcatcagggaaaagggaacctatggaatggtcatggtgacttttgaggtagagggtggcccaaatccccctgatgaagatttgagtccagttaaaggaaatatcacctttccccctggcagagcaacagtaatttataacttgacagtactcgatgacgaggttggctaatgttacatacccaaatgggacaaggattctgtgttgcaggacacagtcctgtataaacttagtgtattgtggccagtcgcacctcagctataaatagctgactgttctggaatacatcttattactatttatcttacttaattcacattaaattacacatctaaaagctgatgaatctgaatataactggcaaccatacatcatacaaatatttaagcatt

SEQ ID NO: 648 - DNA, 1454 bp, Homo sapiens
  source 1..1454: mol_type = unassigned DNA
cagtatgtgatgatgacttaccagagcctgacgaaacttttatttttcacttaacattacagaaaccttcagcaaatgtgaagcttggatggccaaggactgttactgtgacaatattatcaaatgacaatgcatttggaattatttcatttaatatgcttccctcaatcgcagtgagtgagcccaagggcagaaatgagtctatgcctcttactctcatcagggaaaagggaacctatggaatggtcatggtgacttttgaggtagagggtggcccaaatccccctgatgaagatttgagtccagttaaaggaaatatcacctttccccctggcagagcaacagtaatttataacttgacagtactcgatgacgaggtaccagaaaatgatgaaatatttttaattcaactgaaaagtgtagaaggaggagctgagattaacacctctaggaattccattgagatcatcattaagaaaaatgatagtcccgtgagattccttcagagtatttatttggttcctgaggaagaccacatactcataattccagtagttcgtggaaaggacaacaatggaaatctgattggatctgatgaatatgaggtttcaatcagttatgctgtcacaactgggaattccacagcacatgcccagcaaaatctggacttcattgatcttcagccaaacacaactgttgtttttccaccttttattcatgaatctcacttgaaatttcaaatagttgatgacaccataccggagattgctgaatcgtttcacattatgttactaaaagataccttacagggagatgctgtgctaataagcccttctgttgtacaagtcaccattaagccaaatgataaaccttatggagtcctttcattcaacagtgttttgtttgaaaggacagttataattgatgaagatagaatatcaagatatgaagaaatcacagtggttagaaatggaggaacccatgggaatgtctctgcgaattgggtgttgacacggaacagcactgatccctcaccagtaacagcagatatcagaccgagctctggagttctccattttgcacaagggcagatgttggcaacaattcctcttactgtggttgatgatgatcttccagaagaggcagaagcttatctacttcaaattctgcctcatacaatacgaggaggtgcagaagtgagcgagccagcggaggtataacccttgttatgctttatgcttgttaatatttctgtgctgtacaagaaccaaagaatttggtcatacacatcaactttatgtttagtttgaagggacaggaaaaacactggctttgcaaatgatagttttcttactcagtattccttctgaaaataaatattttaccctctaaaaaattccacaaactgtgatttaggaatatttccaaatctgtttttggttcatcttttgctc

SEQ ID NO: 649 - DNA, 5047 bp, Homo sapiens
  source 1..5047: mol_type = unassigned DNA
caagatatgaagaaatcacagtggttagaaatggaggaacccatgggaatgtctctgcgaattgggtgttgacacggaacagcactgatccctcaccagtaacagcagatatcagaccgagctctggagttctccattttgcacaagggcagatgttggcaacaattcctcttactgtggttgatgatgatcttccagaagaggcagaagcttatctacttcaaattctgcctcatacaatacgaggaggtgcagaagtgagcgagccagcggagcttttgttctacattcaggatagtgatgatgtctatggcctaataacattttttcctatggaaaaccagaagattgaaagcagcccaggtgaacgatacttatccttgagttttacaagactaggagggactaaaggagatgtgaggttgctttattctgtactttacattcctgctggagctgtggaccccttgcaagcaaaagaaggcatcttaaatatatcaaggagaaatgacctcatttttccagagcaaaaaactcaagtcactacaaaattaccaataagaaatgatgcattccttcaaaatggagctcactttctagtacagttggaaactgtggagttgttaaacataattcctctaatcccacccataagccctagatttggggaaatctgcaatatttctttactggttactccagccattgcaaatggagaaattggctttctcagcaatcttccaattattttgcatgaaccagaagattttgctgctgaagtggtatacattcccttacatcgggatggaactgatggccaggctactgtctactggagtttgaagccctctggctttaattcaaaagcagtgaccccggatgatataggcccctttaatggctctgttttgtttttatctgggcaaagtgacacaacaatcaacattactatcaaaggtgatgacataccggaaatgaatgaaactgtaacactttctctagacagggttaacgtggaaaaccaagtgctgaaatctggatatactagccgtgacctaattattttggaaaatgatgaccctgggggagtttttgaattttctcctgcttccagaggaccctatgttataaaagaaggagaatctgtagagctccacatcatccgatcaagggggtcccttgttaagcagtttctacactaccgagtagagccaagagatagcaatgaattctatggaaacacgggagtactagaatttaaacctggagaaagggagatagtgatcaccttgctagcaagattggatgggataccagagttggatgaacactactgggtggtcctcagcagccacggagaacgggaaagcaagttgggaagtgccaccattgtcaatataacgattctgaaaaatgatgatcctcatggcattatagaatttgtttctgatggtctaattgtgatgataaatgaaagcaaaggagatgctatctatagtgctgtttatgatgtagtaagaaatcgaggcaactttggtgatgttagtgtatcatgggtggttagtccagactttacacaagatgtatttcctgtacaagggactgttgtctttggagatcaggaattttcaaaaaatatcaccatttactcccttccagatgagattccagaagaaatggaagaatttaccgttatcctactgaatggcactggaggagctaaagtgggaaatagaacaactgcaactctgaggattagaagaaatgatgaccccatttattttgcagaacctcgtgtagtgagggttcaggaaggtgagactgccaactttacagttctcagaaatggatctgttgatgtgacttgcatggtccagtatgctaccaaggatgggaaggctactgcaagagagagagatttcattcctgttgaaaaaggagaaacgctcatttttgaggttggaagtagacagcagagcatatccatatttgttaatgaagatggtatcccggaaacagatgagcccttttatataatcctcttgaattcaacaggtgatacagtagtatatcaatatggagtagctacagtaataattgaagctaatgatgacccaaatggcattttttctctggagcccatagacaaagcagtggaagaaggaaagactaatgcattttggattttgaggcaccgaggatactttggtagtgtttctgtatcttggcagctctttcagaatgattctgctttgcagcctgggcaggagttctatgaaacttcaggaactgttaacttcatggatggagaagaagcaaaaccaatcattctccatgcttttccagataaaattcctgaattcaatgaattttatttcctaaaacttgtaaacatttcaggtggatccccaggtcctgggggccagctagcagaaaccaacctccaggtgacagtaatggttccattcaatgatgatccctttggagtttttatcttggatccagagtgtttagagagagaagtggcagaagatgtcctgtctgaagatgatatgtcttatattaccaacttcaccattttgaggcagcagggtgtgtttggtgatgtacaactgggctgggaaatactgtccagtgagttccctgctggtttgccaccaatgatagattttttactggttggaattttccccaccaccgtgcatttacaacagcacatgcggcgtcaccacagtggaacggatgctttgtactttaccggactagagggtgcatttgggactgttaatccaaaataccatccctccaggaataatacaattgccaactttacattctcagcttgggtaatgcccaatgccaatacgaatggattcattatagcgaaggatgacggtaatggaagcatctactacggggtaaaaatacaaacaaacgaatcccatgtgacactttcccttcattataaaaccttgggttccaatgctacatacattgccaagacaacagtcatgaaatatttagaagaaagtgtttggcttcatctactaattatcctggaggatggtataatcgaattctacctggatggaaatgcaatgcccaggggaatcaagagtctgaaaggagaagccattactgacggtgagggtcatcatcacaactaggacactgaaatttgcagtttctaaaatttttcattaaaatttagatttttaaaaaagtgctaacatgtatttgaaaactctacttatgcattggtttaatttctttaatcaaaactatgtgcctaccaagataatgagaaattctgtcctgagtgttacagaaatgaatcagagaattttgcccttaaagaacctggaataaaccctagcagagagatgtgtgatatatcacaatgacaccctgtaggaagacagaaaaaaatatgaaagaggaatgtttgtccttctgtgggtagtaggagagatggggagtgatattcctgcagaggaatgaacaaaggaatagaaatgtgaaacagcgtgttgcacctggggaactgctgctagttcagtattgctgaaggtagagggtggtgggcgtgaggttgaaaagaaagcaggagagaagaatcacagtgaaaagtgattatagggttcatactatcagcaggtaacttggtgaattctacagagtgctttgaagagatattctttgttgtctttaaactagatcatatgctgattcctcaagaagcacatttgtgtgtgtgtgcacacaaatactggttatatgcattatagtcaccattccctctcagcccctccatcttatgattttattcttttttatatttcgtgaaagatagagtagagcttatatggctatagcttaatagagtattttcctctgaacctcttacattagttatttggttctattttttttcccagagggggaaaaaaagataggcaaaggaaaatgcacgtatctaccaatttcaatcccatggattttggttacaagcactttgtggtattatccactttttggctgtgtgaatacctacaagtatctgttagccttgattcttttggtgatggtagtggtggtggaatgagaatggaaacgattgggggaagtgggagctggtgttttttcctctgacttactgcagaggaacttgttatttttgtactttgtaatttggaaagataatttttaaactatatgtaaagttattgaactgtagtgccctttatattataaaaatataaaagtatgcatattgtaagtgtacagataagtgaaatttttaaaacttaaattcatcagtttcagcactcatgtgatcagcccccagaccaagaaacagcattccagaagccccctttgactcctccagttgctaactcaccaccctgcctactgactattggcatttttaagagcttaagattcacttttcctatttttaaatttatataaatagaactgaacagtatgtacacttgagtgtccagcttcttttgctcagtattgtttgtgaagttcatccatatttttgcctgctgtagatatttcatgctcattaccatatagaattatcttatgtaactgtaacacaatttatttattagtgctactttcaatttctgttttggttgttttctgttctgcctactacatatagtacttctatggatactcttatacatgttttttgatgaacatatgcctgccatatgcatttctgttgagcacattcctggggatggaattgctgaatgacagtgtgtgcaaatattcggttttagtagataatgcctatcctttttccaaaacagttgaacctaattatactctcacctctagtgtatgagagttccacttaattaatgcttagcttcttccatctttacttttggtttgtagtggcatctcacagtatcataaaaggtgtatttaaaaaaaaataatgctgtgttcaatatagaaaaattgtaaagtacacatatacaacaaaaatagaaatcatttacaataaaaatcatttacaatc

SEQ ID NO: 650 - DNA, 6723 bp, Homo sapiens
  source 1..6723: mol_type = unassigned DNA
ctttctttagctttatttttcccttgccattctaagtttctcacagtattagtgagattttagcaaatggtgccctgcctcctttttccccttcccacacttctttctgtgttgacagggtagaaactgaaaggtttgtcgtgtattttggggttaacgtggaaaaccaagtgctgaaatctggatatactagccgtgacctaattattttggaaaatgatgaccctgggggagtttttgaattttctcctgcttccagaggaccctatgttataaaagaaggagaatctgtagagctccacatcatccgatcaagggggtcccttgttaagcagtttctacactaccgagtagagccaagagatagcaatgaattctatggaaacacgggagtactagaatttaaacctggagaaagggagatagtgatcaccttgctagcaagattggatgggataccagagttggatgaacactactgggtggtcctcagcagccacggagaacgggaaagcaagttgggaagtgccaccattgtcaatataacgattctgaaaaatgatgatcctcatggcattatagaatttgtttctgatggtctaattgtgatgataaatgaaagcaaaggagatgctatctatagtgctgtttatgatgtagtaagaaatcgaggcaactttggtgatgttagtgtatcatgggtggttagtccagactttacacaagatgtatttcctgtacaagggactgttgtctttggagatcaggaattttcaaaaaatatcaccatttactcccttccagatgagattccagaagaaatggaagaatttaccgttatcctactgaatggcactggaggagctaaagtgggaaatagaacaactgcaactctgaggattagaagaaatgatgaccccatttattttgcagaacctcgtgtagtgagggttcaggaaggtgagactgccaactttacagttctcagaaatggatctgttgatgtgacttgcatggtccagtatgctaccaaggatgggaaggctactgcaagagagagagatttcattcctgttgaaaaaggagaaacgctcatttttgaggttggaagtagacagcagagcatatccatatttgttaatgaagatggtatcccggaaacagatgagcccttttatataatcctcttgaattcaacaggtgatacagtagtatatcaatatggagtagctacagtaataattgaagctaatgatgacccaaatggcattttttctctggagcccatagacaaagcagtggaagaaggaaagactaatgcattttggattttgaggcaccgaggatactttggtagtgtttctgtatcttggcagctctttcagaatgattctgctttgcagcctgggcaggagttctatgaaacttcaggaactgttaacttcatggatggagaagaagcaaaaccaatcattctccatgcttttccagataaaattcctgaattcaatgaattttatttcctaaaacttgtaaacatttcaggtcctgggggccagctagcagaaaccaacctccaggtgacagtaatggttccattcaatgatgatccctttggagtttttatcttggatccagagtgtttagagagagaagtggcagaagatgtcctgtctgaagatgatatgtcttatattaccaacttcaccattttgaggcagcagggtgtgtttggtgatgtacaactgggctgggaaatactgtccagtgagttccctgctggtttgccaccaatgatagattttttactggttggaattttccccaccaccgtgcatttacaacagcacatgcggcgtcaccacagtggaacggatgctttgtactttaccggactagagggtgcatttgggactgttaatccaaaataccatccctccaggaataatacaattgccaactttacattctcagcttgggtaatgcccaatgccaatacgaatggattcattatagcgaaggatgacggtaatggaagcatctactacggggtaaaaatacaaacaaacgaatcccatgtgacactttcccttcattataaaaccttgggttccaatgctacatacattgccaagacaacagtcatgaaatatttagaagaaagtgtttggcttcatctactaattatcctggaggatggtataatcgaattctacctggatggaaatgcaatgcccaggggaatcaagagtctgaaaggagaagccattactgacggtcctgggatactgagaattggagcagggataaatggcaatgacagatttacaggtctgatgcaggatgtgaggtcctatgagcggaaactgacgcttgaagaaatttatgaacttcatgccatgcccgcaaaaagtgatttacacccaatttctggatatctggagttcagacagggagaaactaacaaatcattcattatttctgcaagagatgacaatgacgaggaaggagaagaattattcattcttaaactagtttctgtatatggaggagctcgtatttcggaagaaaatactactgcaagattaacaatacaaaaaagtgacaatgcaaatggcttgtttggtttcacaggagcttgtataccagagattgcagaggagggatcaaccatttcttgtgtggttgagagaaccagaggagctctggattatgtgcatgttttttacaccatttcacagattgaaactgatggcattaattaccttgttgatgactttgctaatgccagtggaactattacattccttccttggcagagatcagaggttctgaatatatatgttcttgatgatgatattcctgaacttaatgagtatttccgtgtgacattggtttctgcaattcctggagatgggaagctaggctcaactcctaccagtggtgcaagcatagatcctgaaaaggaaacgactgatatcaccatcaaagctagtgatcatccatatggcttgctgcagttctccacagggctgcctcctcagcctaaggacgcaatgaccctgcctgcaagcagcgttccacatatcactgtggaggaggaagatggagaaatcaggttattggtcatccgtgcacagggacttctgggaagggtgactgcggaatttagaacagtgtccttgacagcattcagtcctgaggattaccagaatgttgctggcacattagaatttcaaccaggagaaagatataaatacattttcataaacatcactgataattctattcctgaactggaaaaatcttttaaagttgagttgttaaacttggaaggaggagtagctgaactctttagggttgatggaagtggtagtggtgatggggacatggaattcttccttccaactattcacaaacgtgccagtctaggagtggcttcccaaattctagtgacaattgcagcctctgaccacgctcatggcgtatttgaatttagccctgagtcactctttgtcagtggaactgaaccagaagatgggtatagcactgttacattaaatgttataagacatcatggaactctgtctccagtgactttgcattggaacatagactctgatcctgatggtgatctcgccttcacctctggcaacatcacatttgagattgggcagacgagcgccaatatcactgtggagatattgcctgacgaagacccagaactggataaggcattctctgtgtcagtcctcagtgtttccagtggttctttgggagctcatattaatgccacgttaacagttttggctagtgatgatccatatgggatattcattttttctgagaaaaacagacctgttaaagttgaggaagcaacccagaacatcacactatcaataataaggttgaaaggcctcatgggaaaagtccttgtctcatatgcaacactagatgatatggaaaaaccaccttattttccacctaatttagcgagagcaactcaaggaagagactatataccagcttctggatttgctctttttggagctaatcagagtgaggcaacaatagctatttcaattttggatgatgatgagccagaaaggtccgaatctgtctttatcgaactactcaactctactttagtagcgaaagtacagagtcgttcaattccaaattctccacgtcttgggcctaaggtagaaactattgcgcaactaattatcattgccaatgatgatgcatttggaactcttcagctctcagcaccaattgtccgagtggcagaaaatcatgttggacccattatcaatgtgactagaacaggaggagcatttgcagatgtctctgtgaagtttaaagctgtgccaataactgcaatagctggtgaagattatagtatagcttcatcagatgtggtcttgctagaaggggaaaccagtaaagccgtgccaatatatgtcattaatgatatctatcctgaactggaagaatcttttcttgtgcaactgatgaatgaaacaacaggaggagccagactaggggctttaacagaggcagtcattattattgaggcctctgatgacccctatggattatttggttttcagattactaaacttattgtagaggaacctgagtttaactcagtgaaggtaaacctgccaataattcgaaattctgggacactcggcaatgttactgttcagtgggttgccaccattaatggacagcttgctactggcgacctgcgagttgtctcaggtaatgtgacctttgcccctggggaaaccattcaaaccttgttgttagaggtcctggctgacgacgttccggagattgaagaggttatccaagtgcaactaactgatgcctctggtggaggtactattgggttagatcgaattgcaaatattattattcctgccaatgatgatccttatggtacagtagcctttgctcagatggtttatcgtgttcaagagcctctggaaagaagttcctgtgctaatataactgtcaggcgaagcggagggcactttggtcggctgttgttgttctacagtacttccgacattgatgtagtggctctggcaatggaggaaggtcaagatttactgtcctactatgaatctccaattcaaggggtgcctgacccactttggagaacttggatgaatgtctctgccgtgggggagcccctgtatacctgtgccactttgtgccttaaggaacaagcttgctcagcgttttcatttttcagtgcttctgagggtccccagtgtttctggatgacatcatggatcagcccagctgtcaacaattcagacttctggacctacaggaaaaacatgaccagggtagcatctctttttagtggtcaggctgtggctgggagtgactatgagcctgtgacaaggcaatgggccataatgcaggaaggtgatgaattcgcaaatctcacagtgtctattcttcctgatgatttcccagagatggatgagagttttctaatttctctccttgaagttcacctcatgaacatttcagccagtttgaaaaatcagccaaccataggacagccaaatatttctacagttgtcatagcactaaatggtgatgcctttggagtgtttgtgatctacaatattagtcccaatacttccgaagatggcttatttgttgaagttcaggagcagccccaaaccttggtggagctgatgatacacaggacagggggcagcttaggtcaagtggcagtcgaatggcgtgttgttggtggaacagctactgaaggtttagattttataggtgctggagagattctgacctttgctgaaggtgaaaccaaaaagacagtcattttaaccatcttggatgactctgaaccagaggatgacgaaagtatcatagttagtttggtgtacactgaaggtggaagtagaattttgccaagctccgacactgttagagtgaacattttggccaatgacaatgtggcaggaattgttagctttcagacagcttccagatctgtcataggtcatgaaggagaaattttacaattccatgtgataagaactttccctggtcgaggaaatgttactgttaactggaaaattattgggcaaaatctagaactcaattttgctaactttagcggacaacttttctttcctgaggggtcgttgaatacaacattgtttgtgcatttgttggatgacaacattcctgaggagaaagaagtataccaagtcattctgtatgatgtcaggacacaaggagttccaccagccggaatcgccctgcttgatgctcaaggatatgcagctgtcctcacagtagaagccagtgatgaaccacatggagttttaaattttgctctttcatcaagatttgtgttactacaagaggctaacataacaattcagcttttcatcaacagagaatttggatctctaggagctatcaatgtcacatataccacggttcctggaatgctgagtctgaagaaccaaacagtaggaaacctagcagagccagaagttgattttgtccctatcattggctttctgattttagaagaaggggaaacagcagcagccatcaacattaccattcttgaggatgatgtaccagagctagaagaatatttcctggtgaatttaacttacgttggacttaccatggctgcttcaacttcatttcctcccagactag

SEQ ID NO: 651 - DNA, 3116 bp, Homo sapiens
  source 1..3116: mol_type = unassigned DNA
aagggggtcccttgttaagcagtttctacactaccgagtagagccaagagatagcaatgaattctatggaaacacgggagtactagaatttaaacctggagaaagggagatagtgatcaccttgctagcaagattggatgggataccagagttggatgaacactactgggtggtcctcagcagccacggagaacgggaaagcaagttgggaagtgccaccattgtcaatataacgattctgaaaaatgatgatcctcatggcattatagaatttgtttctgatggtctaattgtgatgataaatgaaagcaaaggagatgctatctatagtgctgtttatgatgtagtaagaaatcgaggcaactttggtgatgttagtgtatcatgggtggttagtccagactttacacaagatgtatttcctgtacaagggactgttgtctttggagatcaggaattttcaaaaaatatcaccatttactcccttccagatgagattccagaagaaatggaagaatttaccgttatcctactgaatggcactggaggagctaaagtgggaaatagaacaactgcaactctgaggattagaagaaatgatgaccccatttattttgcagaacctcgtgtagtgagggttcaggaaggtgagactgccaactttacagttctcagaaatggatctgttgatgtgacttgcatggtccagtatgctaccaaggatgggaaggctactgcaagagagagagatttcattcctgttgaaaaaggagaaacgctcatttttgaggttggaagtagacagcagagcatatccatatttgttaatgaagatggtatcccggaaacagatgagcccttttatataatcctcttgaattcaacaggtgatacagtagtatatcaatatggagtagctacagtaataattgaagctaatgatgacccaaatggcattttttctctggagcccatagacaaagcagtggaagaaggaaagactaatgcattttggattttgaggcaccgaggatactttggtagtgtttctgtatcttggcagctctttcagaatgattctgctttgcagcctgggcaggagttctatgaaacttcaggaactgttaacttcatggatggagaagaagcaaaaccaatcattctccatgcttttccagataaaattcctgaattcaatgaattttatttcctaaaacttgtaaacatttcaggtggatccccaggtcctgggggccagctagcagaaaccaacctccaggtgacagtaatggttccattcaatgatgatccctttggagtttttatcttggatccagagtgtttagagagagaagtggcagaagatgtcctgtctgaagatgatatgtcttatattaccaacttcaccattttgaggcagcagggtgtgtttggtgatgtacaactgggctgggaaatactgtccagtgagttccctgctggtttgccaccaatgatagattttttactggttggaattttccccaccaccgtgcatttacaacagcacatgcggcgtcaccacagtggaacggatgctttgtactttaccggactagagggtgcatttgggactgttaatccaaaataccatccctccaggaataatacaattgccaactttacattctcagcttgggtaatgcccaatgccaatacgaatggattcattatagcgaaggatgacggtaatggaagcatctactacggggtaaaaatacaaacaaacgaatcccatgtgacactttcccttcattataaaaccttgggttccaatgctacatacattgccaagacaacagtcatgaaatatttagaagaaagtgtttggcttcatctactaattatcctggaggatggtataatcgaattctacctggatggaaatgcaatgcccaggggaatcaagagtctgaaaggagaagccattactgacggtcctgggatactgagaattggagcagggataaatggcaatgacagatttacaggtctgatgcaggatgtgaggtcctatgagcggaaactgacgcttgaagaaatttatgaacttcatgccatgcccgcaaaaagtgatttacacccaatttctggatatctggagttcagacagggagaaactaacaaatcattcattatttctgcaagagatgacaatgacgaggaaggagaagaattattcattcttaaactagtttctgtatatggaggagctcgtatttcggaagaaaatactactgcaagattaacaatacaaaaaagtgacaatgcaaatggcttgtttggtttcacaggagcttgtataccagagattgcagaggagggatcaaccatttcttgtgtggttgagagaaccagaggagctctggattatgtgcatgttttttacaccatttcacagattgaaactgatggcattaattaccttgttgatgactttgctaatgccagtggaactattacattccttccttggcagagatcagaggttctgaatatatatgttcttgatgatgatattcctgaacttaatgagtatttccgtgtgacattggtttctgcaattcctggagatgggaagctaggctcaactcctaccagtggtgcaagcatagatcctgaaaaggaaacgactgatatcaccatcaaagctagtgatcatccatatggtaacctgctccttttgcaagaaaaatcctctcttctctgggtgtacttagttttgttaagaacttcttaaggcactttttgcaaatgacggaagtagaatgccttcagacctcctaatttctaaactctttaacttgtatgctactgttttgagagacattgtttatgagagaaaatataaagatcagtttccaaacttcaataatatgttttgaaaagtttttgcaggattatttaaaatggaacaaagtatttctgttcatagctatcaaatttctttaatttaataattatcctatggtgatttgttaacacctaagtaattgaaatactttgtaatttatattttattaagcttcaagaagtgaagctatcactctatattaatttctttttgtcttatgctt

SEQ ID NO: 652 - DNA, 6608 bp, Homo sapiens
  source 1..6608: mol_type = unassigned DNA
ggagttcagacagggagaaactaacaaatcattcattatttctgcaagagatgacaatgacgaggaaggagaagaattattcattcttaaactagtttctgtatatggaggagctcgtatttcggaagaaaatactactgcaagattaacaatacaaaaaagtgacaatgcaaatggcttgtttggtttcacaggagcttgtataccagagattgcagaggagggatcaaccatttcttgtgtggttgagagaaccagaggagctctggattatgtgcatgttttttacaccatttcacagattgaaactgatggcattaattaccttgttgatgactttgctaatgccagtggaactattacattccttccttggcagagatcagaggttctgaatatatatgttcttgatgatgatattcctgaacttaatgagtatttccgtgtgacattggtttctgcaattcctggagatgggaagctaggctcaactcctaccagtggtgcaagcatagatcctgaaaaggaaacgactgatatcaccatcaaagctagtgatcatccatatggcttgctgcagttctccacagggctgcctcctcagcctaaggacgcaatgaccctgcctgcaagcagcgttccacatatcactgtggaggaggaagatggagaaatcaggttattggtcatccgtgcacagggacttctgggaagggtgactgcggaatttagaacagtgtccttgacagcattcagtcctgaggattaccagaatgttgctggcacattagaatttcaaccaggagaaagatataaatacattttcataaacatcactgataattctattcctgaactggaaaaatcttttaaagttgagttgttaaacttggaaggaggagtagctgaactctttagggttgatggaagtggtagtggtgatggggacatggaattcttccttccaactattcacaaacgtgccagtctaggagtggcttcccaaattctagtgacaattgcagcctctgaccacgctcatggcgtatttgaatttagccctgagtcactctttgtcagtggaactgaaccagaagatgggtatagcactgttacattaaatgttataagacatcatggaactctgtctccagtgactttgcattggaacatagactctgatcctgatggtgatctcgccttcacctctggcaacatcacatttgagattgggcagacgagcgccaatatcactgtggagatattgcctgacgaagacccagaactggataaggcattctctgtgtcagtcctcagtgtttccagtggttctttgggagctcatattaatgccacgttaacagttttggctagtgatgatccatatgggatattcattttttctgagaaaaacagacctgttaaagttgaggaagcaacccagaacatcacactatcaataataaggttgaaaggcctcatgggaaaagtccttgtctcatatgcaacactagatgatatggaaaaaccaccttattttccacctaatttagcgagagcaactcaaggaagagactatataccagcttctggatttgctctttttggagctaatcagagtgaggcaacaatagctatttcaattttggatgatgatgagccagaaaggtccgaatctgtctttatcgaactactcaactctactttagtagcgaaagtacagagtcgttcaattccaaattctccacgtcttgggcctaaggtagaaactattgcgcaactaattatcattgccaatgatgatgcatttggaactcttcagctctcagcaccaattgtccgagtggcagaaaatcatgttggacccattatcaatgtgactagaacaggaggagcatttgcagatgtctctgtgaagtttaaagctgtgccaataactgcaatagctggtgaagattatagtatagcttcatcagatgtggtcttgctagaaggggaaaccagtaaagccgtgccaatatatgtcattaatgatatctatcctgaactggaagaatcttttcttgtgcaactgatgaatgaaacaacaggaggagccagactaggggctttaacagaggcagtcattattattgaggcctctgatgacccctatggattatttggttttcagattactaaacttattgtagaggaacctgagtttaactcagtgaaggtaaacctgccaataattcgaaattctgggacactcggcaatgttactgttcagtgggttgccaccattaatggacagcttgctactggcgacctgcgagttgtctcaggtaatgtgacctttgcccctggggaaaccattcaaaccttgttgttagaggtcctggctgacgacgttccggagattgaagaggttatccaagtgcaactaactgatgcctctggtggaggtactattgggttagatcgaattgcaaatattattattcctgccaatgatgatccttatggtacagtagcctttgctcagatggtttatcgtgttcaagagcctctggaaagaagttcctgtgctaatataactgtcaggcgaagcggagggcactttggtcggctgttgttgttctacagtacttccgacattgatgtagtggctctggcaatggaggaaggtcaagatttactgtcctactatgaatctccaattcaaggggtgcctgacccactttggagaacttggatgaatgtctctgccgtgggggagcccctgtatacctgtgccactttgtgccttaaggaacaagcttgctcagcgttttcatttttcagtgcttctgagggtccccagtgtttctggatgacatcatggatcagcccagctgtcaacaattcagacttctggacctacaggaaaaacatgaccagggtagcatctctttttagtggtcaggctgtggctgggagtgactatgagcctgtgacaaggcaatgggccataatgcaggaaggtgatgaattcgcaaatctcacagtgtctattcttcctgatgatttcccagagatggatgagagttttctaatttctctccttgaagttcacctcatgaacatttcagccagtttgaaaaatcagccaaccataggacagccaaatatttctacagttgtcatagcactaaatggtgatgcctttggagtgtttgtgatctacaatattagtcccaatacttccgaagatggcttatttgttgaagttcaggagcagccccaaaccttggtggagctgatgatacacaggacagggggcagcttaggtcaagtggcagtcgaatggcgtgttgttggtggaacagctactgaaggtttagattttataggtgctggagagattctgacctttgctgaaggtgaaaccaaaaagacagtcattttaaccatcttggatgactctgaaccagaggatgacgaaagtatcatagttagtttggtgtacactgaaggtggaagtagaattttgccaagctccgacactgttagagtgaacattttggccaatgacaatgtggcaggaattgttagctttcagacagcttccagatctgtcataggtcatgaaggagaaattttacaattccatgtgataagaactttccctggtcgaggaaatgttactgttaactggaaaattattgggcaaaatctagaactcaattttgctaactttagcggacaacttttctttcctgaggggtcgttgaatacaacattgtttgtgcatttgttggatgacaacattcctgaggagaaagaagtataccaagtcattctgtatgatgtcaggacacaaggagttccaccagccggaatcgccctgcttgatgctcaaggatatgcagctgtcctcacagtagaagccagtgatgaaccacatggagttttaaattttgctctttcatcaagatttgtgttactacaagaggctaacataacaattcagcttttcatcaacagagaatttggatctctaggagctatcaatgtcacatataccacggttcctggaatgctgagtctgaagaaccaaacagtaggaaacctagcagagccagaagttgattttgtccctatcattggctttctgattttagaagaaggggaaacagcagcagccatcaacattaccattcttgaggatgatgtaccagagctagaagaatatttcctggtgaatttaacttacgttggacttaccatggctgcttcaacttcatttcctcccagactagattcagaaggtttgactgcacaagttattattgatgccaatgatggggcccgaggtgtaattgaatggcaacaaagcaggtttgaagtaaatgaaacccatggaagtttaacattggtagcccagaggagcagagaacctcttggccatgtttccttatttgtgtatgctcagaatttggaagcacaagtggggctggattatatcttcaccccaatgattcttcattttgctgatggagaaaggtataaaaatgtcaatatcatgattcttgatgatgacattccagaaggagatgaaaaatttcagctgattttaacaaatccttctcctggactagagctagggaaaaatacaatagccttaattattgtccttgctaatgatgacggccctggagttctatcatttaacaacagtgagcactttttcctaagagagccaacagctctctacgtccaggagagtgttgcagtattgtacattgttcgggaacctgcacaaggattgtttggaacagtgacagttcagttcattgtgacagaagtgaattcctcaaatgaatctaaagatctgactccttccaaaggctatattgttttagaagaaggtgttcgattcaaggtacagtaagaagctttaatgagaatggaagtttatctttaatatttacaaaataaatttctcttagatgagcactcaagtcctagaatgaaaaaacaatacttccagcttaggtgttagacaaagacatgattcatttactatgtgacaagtgctgtagttctatttactctgtataaagcgcaactggaaaaatttactattaatagggtaaaagaatatgcaaataataaagaaaatatatgtatggctattttaaattttcagcacatttaaattgcatatgtcactttatattgtgtataaaccatataaaagaaaacccaagccaacttttgtaaacattaagtcccagccaatcatttccctttcaccacatttttgttgaacaaaatgtaactgcttacttcagactgcttgtttgacaacaagaatagtttattggagaaaaaaatgctggatttgggataaatatgatctatactcacagtttaccttcccaaacctctttttctatatattaacaattttctgttcctgctactaaactttattttttaaaacagtttaagtttaaaatgcagcacaccaacatggcacatgtacacatatgtaacaaacctgcatgttgtgcacatgtaccctagaacttaaagtataataaaaaaaaaagcaatttgcaagattatgttgcaaatgtgatttttttttttttttttttttgaggcagagtctcactctgtcatccaggctggagttcagtggcgcaatctaggtttactgcaaactccacctcccaggttcaagtgattctggagtgcagtgacgcgatctcagctcactgcaagctctgccttccgggttcatgccattctcctgcctcggcctcctgagtggctacaggcgcccaccactacaggcgcccaccatcatgtctggctaattttttgtatttttagtagagacggggtttcaccgtgttagccaggatggtctcgatctcctgacctcgtgatccgcccgcctcagcctcccaaagtgctgggattacaggcatgagccaccacgcccagctattcccagctaattttttgtatttttagtaaaaatggggtttcaccatattggccagtctggtcccaaactcctggtgccaagtgatctgcccgcctcaacctcccaaagtgttgggattaaaggcatgaaccactgtgccgggcctgtgattattttgactcattttttattgtggaaaaatacgtgtaatataagatttaccattttcaccatttttagtgaacgtttcagtggcattaattatattcacagcaatgtacaaccatcaccaccatctatttccaaaatttttcatcattccaaggacaaactctgtgcccattaagtagtaactccctattactcctctccctagtaatctccagtctactttctgtctctatgaatttgcctattctagatatttcgcatatgtgaaattatacagtatttacccttttgtgtctgacttccttcgcttagcaaaatgttttcaaggtgcatctgtgttgttacaggtatcagaacttcattcccttttcacagctagattatattttattgtatgtatataccgtaatttttaaatccagctatctgttgtttccaccttttgactcttgtcaataaagctcctattattgtg

SEQ ID NO: 653 - DNA, 879 bp, Homo sapiens
  source 1..879: mol_type = unassigned DNA
ggagggatcaaccatttcttgtgtggttgagagaaccagaggagctctggattatgtgcatgttttttacaccatttcacagattgaaactgatggcattaattaccttgttgatgactttgctaatgccagtggaactattacattccttccttggcagagatcagagcttttgattgaagtgtcgcttcccattattatttacaactgtaactgatacattagaatttgcttcaaacatgtctgctgtaaaacctttatcaggttctgaatatatatgttcttgatgatgatattcctgaacttaatgagtatttccgtgtgacattggtttctgcaattcctggagatgggaagctaggctcaactcctaccagtggtgcaagcatagatcctgaaaaggaaacgactgatatcaccatcaaagctagtgatcatccatatggcttgctgcagttctccacagggctgcctcctcagcctaaggacgcaatgaccctgcctgcaagcagcgttccacatatcactgtggaggaggaagatggagaaatcaggttattggtcatccgtgcacagggacttctgggaagggtgactgcggaatttagaacagtgtccttgacagcattcagtcctgaggattaccagaatgttgctggcacattagaatttcaaccaggagaaagatataaatacattttcataaacatcactgataattctattcctgaactggaaaaatcttttaaagttgagttgttaaacttggaaggaggagctctgctagatctatctacagatataacgctgtaaaatctggtccttttggatgatctataatgagttgattattaataaaagaagtcaacaataccttaa

SEQ ID NO: 654 - DNA, 611 bp, Homo sapiens
  source 1..611: mol_type = unassigned DNA
gttccacatatcactgtggaggaggaagatggagaaatcaggttattggtcatccgtgcacagggacttctgggaagggtgactgcggaatttagaacagtgtccttgacagcattcagtcctgaggattaccagaatgttgctggcacattagaatttcaaccaggagaaagatataaatacattttcataaacatcactgataattctattcctgaactggaaaaatcttttaaagttgagttgttaaacttggaaggaggagtctgtgaatttctggtacgtgctggtgatgaatgatgagcacacagagaggcgatatctgctgtttttccttctgagttggggactaccagcttttgtggtgattctcctcatagttattttgaaaggaatctatcatcagagcatgtcacagatctatggactcattcatggtgacctgtgttttattccaaacgtctatgctgctttgttcactgcagctcttgttcctttgacgtgcctcgtggtggtgttcgtggtgttcatccatgcctaccaggtgaagccacagtggaaagcatatgatgatgtcttcagaggaaggacaaatgctgcagaaattccac

SEQ ID NO: 655 - DNA, 4680 bp, Homo sapiens
  source 1..4680: mol_type = unassigned DNA
atatcactgtggaggaggaagatggagaaatcaggttattggtcatccgtgcacagggacttctgggaagggtgactgcggaatttagaacagtgtccttgacagcattcagtcctgaggattaccagaatgttgctggcacattagaatttcaaccaggagaaagatataaatacattttcataaacatcactgataattctattcctgaactggaaaaatcttttaaagttgagttgttaaacttggaaggaggagctgaactctttagggttgatggaagtggtagtggtgatggggacatggaattcttccttccaactattcacaaacgtgccagtctaggagtggcttcccaaattctagtgacaattgcagcctctgaccacgctcatggcgtatttgaatttagccctgagtcactctttgtcagtggaactgaaccagaagatgggtatagcactgttacattaaatgttataagacatcatggaactctgtctccagtgactttgcattggaacatagactctgatcctgatggtgatctcgccttcacctctggcaacatcacatttgagattgggcagacgagcgccaatatcactgtggagatattgcctgacgaagacccagaactggataaggcattctctgtgtcagtcctcagtgtttccagtggttctttgggagctcatattaatgccacgttaacagttttggctagtgatgatccatatgggatattcattttttctgagaaaaacagacctgttaaagttgaggaagcaacccagaacatcacactatcaataataaggttgaaaggcctcatgggaaaagtccttgtctcatatgcaacactagatgatatggaaaaaccaccttattttccacctaatttagcgagagcaactcaaggaagagactatataccagcttctggatttgctctttttggagctaatcagagtgaggcaacaatagctatttcaattttggatgatgatgagccagaaaggtccgaatctgtctttatcgaactactcaactctactttagtagcgaaagtacagagtcgttcaattccaaattctccacgtcttgggcctaaggtagaaactattgcgcaactaattatcattgccaatgatgatgcatttggaactcttcagctctcagcaccaattgtccgagtggcagaaaatcatgttggacccattatcaatgtgactagaacaggaggagcatttgcagatgtctctgtgaagtttaaagctgtgccaataactgcaatagctggtgaagattatagtatagcttcatcagatgtggtcttgctagaaggggaaaccagtaaagccgtgccaatatatgtcattaatgatatctatcctgaactggaagaatcttttcttgtgcaactgatgaatgaaacaacaggaggagccagactaggggctttaacagaggcagtcattattattgaggcctctgatgacccctatggattatttggttttcagattactaaacttattgtagaggaacctgagtttaactcagtgaaggtaaacctgccaataattcgaaattctgggacactcggcaatgttactgttcagtgggttgccaccattaatggacagcttgctactggcgacctgcgagttgtctcaggttatccaagtgcaactaactgatgcctctggtggaggtactattgggttagatcgaattgcaaatattattattcctgccaatgatgatccttatggtacagtagcctttgctcagatggtttatcgtgttcaagagcctctggaaagaagttcctgtgctaatataactgtcaggcgaagcggagggcactttggtcggctgttgttgttctacagtacttccgacattgatgtagtggctctggcaatggaggaaggtcaagatttactgtcctactatgaatctccaattcaaggggtgcctgacccactttggagaacttggatgaatgtctctgccgtgggggagcccctgtatacctgtgccactttgtgccttaaggaacaagcttgctcagcgttttcatttttcagtgcttctgagggtccccagtgtttctggatgacatcatggatcagcccagctgtcaacaattcagacttctggacctacaggaaaaacatgaccagggtagcatctctttttagtggtcaggctgtggctgggagtgactatgagcctgtgacaaggcaatgggccataatgcaggaaggtgatgaattcgcaaatctcacagtgtctattcttcctgatgatttcccagagatggatgagagttttctaatttctctccttgaagttcacctcatgaacatttcagccagtttgaaaaatcagccaaccataggacagccaaatatttctacagttgtcatagcactaaatggtgatgcctttggagtgtttgtgatctacaatattagtcccaatacttccgaagatggcttatttgttgaagttcaggagcagccccaaaccttggtggagctgatgatacacaggacagggggcagcttaggtcaagtggcagtcgaatggcgtgttgttggtggaacagctactgaaggtttagattttataggtgctggagagattctgacctttgctgaaggtgaaaccaaaaagacagtcattttaaccatcttggatgactctgaaccagaggatgacgaaagtatcatagttagtttggtgtacactgaaggtggaagtagaattttgccaagctccgacactgttagagtgaacattttggccaatgacaatgtggcaggaattgttagctttcagacagcttccagatctgtcataggtcatgaaggagaaattttacaattccatgtgataagaactttccctggtcgaggaaatgttactgttaactggaaaattattgggcaaaatctagaactcaattttgctaactttagcggacaacttttctttcctgaggggtcgttgaatacaacattgtttgtgcatttgttggatgacaacattcctgaggagaaagaagtataccaagtcattctgtatgatgtcaggacacaaggagttccaccagccggaatcgccctgcttgatgctcaaggatatgcagctgtcctcacagtagaagccagtgatgaaccacatggagttttaaattttgctctttcatcaagatttgtgttactacaagaggctaacataacaattcagcttttcatcaacagagaatttggatctctaggagctatcaatgtcacatataccacggttcctggaatgctgagtctgaagaaccaaacagtaggaaacctagcagagccagaagttgattttgtccctatcattggctttctgattttagaagaaggggaaacagcagcagccatcaacattaccattcttgaggatgatgtaccagagctagaagaatatttcctggtgaatttaacttacgttggacttaccatggctgcttcaacttcatttcctcccagactagattcagaaggtttgactgcacaagttattattgatgccaatgatggggcccgaggtgtaattgaatggcaacaaagcaggtttgaagtaaatgaaacccatggaagtttaacattggtagcccagaggagcagagaacctcttggccatgtttccttatttgtgtatgctcagaatttggaagcacaagtggggctggattatatcttcaccccaatgattcttcattttgctgatggagaaaggtataaaaatgtcaatatcatgattcttgatgatgacattccagaaggagatgaaaaatttcagctgattttaacaaatccttctcctggactagagctagggaaaaatacaatagccttaattattgtccttgctaatgatgacggccctggagttctatcatttaacaacagtgagcactttttcctaagagagccaacagctctctacgtccaggagagtgttgcagtattgtacattgttcgggaacctgcacaaggattgtttggaacagtgacagttcagttcattgtgacagaagtgaattcctcaaatgaatctaaagatctgactccttccaaaggctatattgttttagaagaaggtgttcgattcaaggccctacaaatatctgccatattagacacggaaccagaaatggatgagtattttgtttgcaccttgtttaatccaactggaggtgctagactaggggtgcatgttcaaaccctgataacagttttgcaaaaccaggcccctttggggctattcagtatctctgcagttgaaaatagagccacctccatagacatcgaagaagccaataggaccgtgtatttaaatgtatctcgaactaatggcattgatttggctgtgagtgtgcagtgggagacagtatctgaaacagcctttggcatgaggggaatggatgttgtgttttccgtatttcaaagttttttggatgaatcagcttctggctggtgtttctttactttggaaaatttaatatatggtataatgttaagaaaatcatctgttactgtttaccgatggcaggggatttttattccagttgaggatttaaatatagaaaatcctaaaacttgtgaggcctttaatatt

SEQ ID NO: 656 - DNA, 3241 bp, Homo sapiens
  source 1..3241: mol_type = unassigned DNA
tccttccaactattcacaaacgtgccagtctaggagtggcttcccaaattctagtgacaattgcagcctctgaccacgctcatggcgtatttgaatttagccctgagtcactctttgtcagtggaactgaaccagaagatgggtatagcactgttacattaaatttccaaattctccacgtcttgggcctaaggtagaaactattgcgcaactaattatcattgccaatgatgatgcatttggaactcttcagctctcagcaccaattgtccgagtggcagaaaatcatgttggacccattatcaatgtgactagaacaggaggagcatttgcagatgtctctgtgaagtttaaagctgtgccaataactgcaatagctggtgaagattatagtatagcttcatcagatgtggtcttgctagaaggggaaaccagtaaagccgtgccaatatatgtcattaatgatatctatcctgaactggaagaatcttttcttgtgcaactgatgaatgaaacaacaggaggagccagactaggggctttaacagaggcagtcattattattgaggcctctgatgacccctatggattatttggttttcagattactaaacttattgtagaggaacctgagtttaactcagtgaaggtaaacctgccaataattcgaaattctgggacactcggcaatgttactgttcagtgggttgccaccattaatggacagcttgctactggcgacctgcgagttgtctcaggttatccaagtgcaactaactgatgcctctggtggaggtactattgggttagatcgaattgcaaatattattattcctgccaatgatgatccttatggtacagtagcctttgctcagatggtttatcgtgttcaagagcctctggaaagaagttcctgtgctaatataactgtcaggcgaagcggagggcactttggtcggctgttgttgttctacagtacttccgacattgatgtagtggctctggcaatggaggaaggtcaagatttactgtcctactatgaatctccaattcaaggggtgcctgacccactttggagaacttggatgaatgtctctgccgtgggggagcccctgtatacctgtgccactttgtgccttaaggaacaagcttgctcagcgttttcatttttcagtgcttctgagggtccccagtgtttctggatgacatcatggatcagcccagctgtcaacaattcagacttctggacctacaggaaaaacatgaccagggtagcatctctttttagtggtcaggctgtggctgggagtgactatgagcctgtgacaaggcaatgggccataatgcaggaaggtgatgaattcgcaaatctcacagtgtctattcttcctgatgatttcccagagatggatgagagttttctaatttctctccttgaagttcacctcatgaacatttcagccagtttgaaaaatcagccaaccataggacagccaaatatttctacagttgtcatagcactaaatggtgatgcctttggagtgtttgtgatctacaatattagtcccaatacttccgaagatggcttatttgttgaagttcaggagcagccccaaaccttggtggagctgatgatacacaggacagggggcagcttaggtcaagtggcagtcgaatggcgtgttgttggtggaacagctactgaaggtttagattttataggtgctggagagattctgacctttgctgaaggtgaaaccaaaaagacagtcattttaaccatcttggatgactctgaaccagaggatgacgaaagtatcatagttagtttggtgtacactgaaggtggaagtagaattttgccaagctccgacactgttagagtgaacattttggccaatgacaatgtggcaggaattgttagctttcagacagcttccagatctgtcataggtcatgaaggagaaattttacaattccatgtgataagaactttccctggtcgaggaaatgttactgttaactggaaaattattgggcaaaatctagaactcaattttgctaactttagcggacaacttttctttcctgaggggtcgttgaatacaacattgtttgtgcatttgttggatgacaacattcctgaggagaaagaagtataccaagtcattctgtatgatgtcaggacacaaggagttccaccagccggaatcgccctgcttgatgctcaaggatatgcagctgtcctcacagtagaagccagtgatgaaccacatggagttttaaattttgctctttcatcaagatttgtgttactacaagaggctaacataacaattcagcttttcatcaacagagaatttggatctctaggagctatcaatgtcacatataccacggttcctggaatgctgagtctgaagaaccaaacagtaggaaacctagcagagccagaagttgattttgtccctatcattggctttctgattttagaagaaggggaaacagcagcagccatcaacattaccattcttgaggatgatgtaccagagctagaagaatatttcctggtgaatttaacttacgttggacttaccatggctgcttcaacttcatttcctcccagactagattcagaaggtttgactgcacaagttattattgatgccaatgatggggcccgaggtgtaattgaatggcaacaaagcaggtttgaagtaaatgaaacccatggaagtttaacattggtagcccagaggagcagagaacctcttggccatgtttccttatttgtgtatgctcagaatttggaagcacaagtggggctggattatatcttcaccccaatgattcttcattttgctgatggagaaaggtataaaaatgtcaatatcatgattcttgatgatgacattccagaaggagatgaaaaatttcagctgattttaacaaatccttctcctggactagagctagggaaaaatacaatagccttaattattgtccttgctaatgatgacggccctggagttctatcatttaacaacagtgagcactttttcctaagagagccaacagctctctacgtccaggagagtgttgcagtattgtacattgttcgggaacctgcacaaggattgtttggaacagtgacagttcagttcattgtgacagaagtgaattcctcaaatgaatctaaagatctgactccttccaaaggctatattgttttagaagaagg

SEQ ID NO: 657 - DNA, 5401 bp, Homo sapiens
  source 1..5401: mol_type = unassigned DNA
gagttgtctcaggtaatgtgacctttgcccctggggaaaccattcaaaccttgttgttagaggtcctggctgacgacgttccggagattgaagaggttatccaagtgcaactaactgatgcctctggtggaggtactattgggttagatcgaattgcaaatattattattcctgccaatgatgatccttatggtacagtagcctttgctcagatggtttatcgtgttcaagagcctctggaaagaagttcctgtgctaatataactgtcaggcgaagcggagggcactttggtcggctgttgttgttctacagtacttccgacattgatgtagtggctctggcaatggaggaaggtcaagatttactgtcctactatgaatctccaattcaaggggtgcctgacccactttggagaacttggatgaatgtctctgccgtgggggagcccctgtatacctgtgccactttgtgccttaaggaacaagcttgctcagcgttttcatttttcagtgcttctgagggtccccagtgtttctggatgacatcatggatcagcccagctgtcaacaattcagacttctggacctacaggaaaaacatgaccagggtagcatctctttttagtggtcaggctgtggctgggagtgactatgagcctgtgacaaggcaatgggccataatgcaggaaggtgatgaattcgcaaatctcacagtgtctattcttcctgatgatttcccagagatggatgagagttttctaatttctctccttgaagttcacctcatgaacatttcagccagtttgaaaaatcagccaaccataggacagccaaatatttctacagttgtcatagcactaaatggtgatgcctttggagtgtttgtgatctacaatattagtcccaatacttccgaagatggcttatttgttgaagttcaggagcagccccaaaccttggtggagctgatgatacacaggacagggggcagcttaggtcaagtggcagtcgaatggcgtgttgttggtggaacagctactgaaggtttagattttataggtgctggagagattctgacctttgctgaaggtgaaaccaaaaagacagtcattttaaccatcttggatgactctgaaccagaggatgacgaaagtatcatagttagtttggtgtacactgaaggtggaagtagaattttgccaagctccgacactgttagagtgaacattttggccaatgacaatgtggcaggaattgttagctttcagacagcttccagatctgtcataggtcatgaaggagaaattttacaattccatgtgataagaactttccctggtcgaggaaatgttactgttaactggaaaattattgggcaaaatctagaactcaattttgctaactttagcggacaacttttctttcctgaggggtcgttgaatacaacattgtttgtgcatttgttggatgacaacattcctgaggagaaagaagtataccaagtcattctgtatgatgtcaggacacaaggagttccaccagccggaatcgccctgcttgatgctcaaggatatgcagctgtcctcacagtagaagccagtgatgaaccacatggagttttaaattttgctctttcatcaagatttgtgttactacaagaggctaacataacaattcagcttttcatcaacagagaatttggatctctaggagctatcaatgtcacatataccacggttcctggaatgctgagtctgaagaaccaaacagtaggaaacctagcagagccagaagttgattttgtccctatcattggctttctgattttagaagaaggggaaacagcagcagccatcaacattaccattcttgaggatgatgtaccagagctagaagaatatttcctggtgaatttaacttacgttggacttaccatggctgcttcaacttcatttcctcccagactagattcagaaggtttgactgcacaagttattattgatgccaatgatggggcccgaggtgtaattgaatggcaacaaagcaggtttgaagtaaatgaaacccatggaagtttaacattggtagcccagaggagcagagaacctcttggccatgtttccttatttgtgtatgctcagaatttggaagcacaagtggggctggattatatcttcaccccaatgattcttcattttgctgatggagaaaggtataaaaatgtcaatatcatgattcttgatgatgacattccagaaggagatgaaaaatttcagctgattttaacaaatccttctcctggactagagctagggaaaaatacaatagccttaattattgtccttgctaatgatgacggccctggagttctatcatttaacaacagtgagcactttttcctaagagagccaacagctctctacgtccaggagagtgttgcagtattgtacattgttcgggaacctgcacaaggattgtttggaacagtgacagttcagttcattgtgacagaagtgaattcctcaaatgaatctaaagatctgactccttccaaaggctatattgttttagaagaaggtgttcgattcaaggccctacaaatatctgccatattagacacggaaccagaaatggatgagtattttgtttgcaccttgtttaatccaactggaggtgctagactaggggtgcatgttcaaaccctgataacagttttgcaaaaccaggcccctttggggctattcagtatctctgcagttgaaaatagagccacctccatagacatcgaagaagccaataggaccgtgtatttaaatgtatctcgaactaatggcattgatttggctgtgagtgtgcagtgggagacagtatctgaaacagcctttggcatgaggggaatggatgttgtgttttccgtatttcaaagttttttggatgaatcagcttctggctggtgtttctttactttggaaaatttaatatatggtataatgttaagaaaatcatctgttactgtttaccgatggcaggggatttttattccagttgaggatttaaatatagaaaatcctaaaacttgtgaggcctttaatattggtttttctccctactttgtgattactcatgaagaaagaaatgaagaaaagccttctcttaacagtgtgtttacattcacatctggatttaaattattcctggtacaaacaatcattattctggaaagttctcaagtaagatattttacttcagacagccaagattatttaatcattgcaagtcaaagagatgattccgaattaactcaggtcttcaggtggaatggaggaagcttcgtgttgcatcaaaaactccctgtccgaggtgtgctgaccgtggccttgttcaacaagggaggctctgtgttcttagccatttcccaggctaatgccaggctaaactcccttttattcagatggtctggcagtgggtttattaactttcaagaggtgcctgtcagtgggacaacagaagttgaggctttgtcttcagccaatgatatttacctaatatttgccgaaaatgtctttctaggagatcagaattcaattgatattttcatctgggagatgggacagtcttccttcaggtattttcagtctgtagattttgctgctgttaacagaatccactccttcacaccagcctcaggaatagcccacatacttcttattggccaagatatgtctgctctttactgctggaattcggagcgtaatcaattctcttttgttctggaagtaccttctgcttatgatgtggcttctgttacagtaaagtcccttaattcaagcaagaatttaatagctctagtgggagctcattcacatatatatgagctagcctacatttccagccattctgactttattcctagttcaggtgaactgatatttgaacctggtgagagagaagctacaatagcagtaaatatccttgatgatacagttccagaaaaagaagaatccttcaaagttcaacttaaaaatcccaaaggaggagcagagattggcattaatgattctgtaacaataaccattctgtctaatgatgatgcctatggaattgttgcatttgctcagaattcattatataagcaagtggaagaaatggagcaagatagcctagtaaccttgaacgttgaacgcttaaaaggaacatatggccgtataaccatagcatgggaagctgatggaagtattagtgatatatttcctacctcaggagtgattttatttactgaaggccaggtactgtcaacaatcactctaactattcttgctgataatataccagagttatcagaggttgtgattgtaaccctcacccgtatcaccacagaaggggttgaggactcatacaaaggtgctactattgatcaggacagaagcaagtctgttataacaactttgcccaatgactcaccttttggcttggtgggctggcgtgctgcgtctgtcttcattagagtagcagagcctaaagaaaacaccaccactcttcagttacaaatagctcgagataaaggactacttggggatattgccattcacttgagagctcaacccaatttcttactgcatgtcgataatcaagctactgagaatgaagattatgtattgcaagaaacaataataataatgaaagaaaacataaaagaagctcatgccgaagtttccattttgccgggcgctggggaagttattactgcctatgaggtgcctccacccttgaacgttcttcaagttcctgtagtccggctggctggaagctttggggcagtaaatgtttattggaaagcatcaccagacagtgctggcctggaagactttaaaccatctcatgggattcttgaatttgcagataaacaggttactgcaatgatagaaatcaccataattgatgatgctgaatttgaattgacagagacgttcaatatttccttgatcagtgttgctggaggtggcagacttggtgatgatgttgtggtaactgttgttattccacaaaatgattctccatttggagtatttggatttgaagaaaagactgtaagttaaacatatcaggggaaagccttgtttcaggctagcgtttcatgtaattttgagtagaaagtgtctcacatttttgttttggaagtcttggccaggcatggtggctcatgccagtaatcccagcactttgggaggccgcagcgggcagatcacgaggtcaggagattgacaccatcctggccaatatggttgaattcccgtctctactgaaagtacaaaaattagctgggcgtggtggcacatgcctgtattcccagatacttgggaggctgaggcaggagactcgcttgaacccaggaggcagaggt

SEQ ID NO: 658 - DNA, 5211 bp, Homo sapiens
  source 1..5211: mol_type = unassigned DNA
ccctgtatacctgtgccactttgtgccttaaggaacaagcttgctcagcgttttcatttttcagtgcttctgagggtccccagtgtttctggatgacatcatggatcagcccagctgtcaacaattcagacttctggacctacaggaaaaacatgaccagggtagcatctctttttagtggtcaggctgtggctgggagtgactatgagcctgtgacaaggcaatgggccataatgcaggaaggtgatgaattcgcaaatctcacagtgtctattcttcctgatgatttcccagagatggatgagagttttctaatttctctccttgaagttcacctcatgaacatttcagccagtttgaaaaatcagccaaccataggacagccaaatatttctacagttgtcatagcactaaatggtgatgcctttggagtgtttgtgatctacaatattagtcccaatacttccgaagatggcttatttgttgaagttcaggagcagccccaaaccttggtggagctgatgatacacaggacagggggcagcttaggtcaagtggcagtcgaatggcgtgttgttggtggaacagctactgaaggtttagattttataggtgctggagagattctgacctttgctgaaggtgaaaccaaaaagacagtcattttaaccatcttggatgactctgaaccagaggatgacgaaagtatcatagttagtttggtgtacactgaaggtggaagtagaattttgccaagctccgacactgttagagtgaacattttggccaatgacaatgtggcaggaattgttagctttcagacagcttccagatctgtcataggtcatgaaggagaaattttacaattccatgtgataagaactttccctggtcgaggaaatgttactgttaactggaaaattattgggcaaaatctagaactcaattttgctaactttagcggacaacttttctttcctgaggggtcgttgaatacaacattgtttgtgcatttgttggatgacaacattcctgaggagaaagaagtataccaagtcattctgtatgatgtcaggacacaaggagttccaccagccggaatcgccctgcttgatgctcaaggatatgcagctgtcctcacagtagaagccagtgatgaaccacatggagttttaaattttgctctttcatcaagatttgtgttactacaagaggctaacataacaattcagcttttcatcaacagagaatttggatctctaggagctatcaatgtcacatataccacggttcctggaatgctgagtctgaagaaccaaacagtaggaaacctagcagagccagaagttgattttgtccctatcattggctttctgattttagaagaaggggaaacagcagcagccatcaacattaccattcttgaggatgatgtaccagagctagaagaatatttcctggtgaatttaacttacgttggacttaccatggctgcttcaacttcatttcctcccagactagattcagaaggtttgactgcacaagttattattgatgccaatgatggggcccgaggtgtaattgaatggcaacaaagcaggtttgaagtaaatgaaacccatggaagtttaacattggtagcccagaggagcagagaacctcttggccatgtttccttatttgtgtatgctcagaatttggaagcacaagtggggctggattatatcttcaccccaatgattcttcattttgctgatggagaaaggtataaaaatgtcaatatcatgattcttgatgatgacattccagaaggagatgaaaaatttcagctgattttaacaaatccttctcctggactagagctagggaaaaatacaatagccttaattattgtccttgctaatgatgacggccctggagttctatcatttaacaacagtgagcactttttcctaagagagccaacagctctctacgtccaggagagtgttgcagtattgtacattgttcgggaacctgcacaaggattgtttggaacagtgacagttcagttcattgtgacagaagtgaattcctcaaatgaatctaaagatctgactccttccaaaggctatattgttttagaagaaggtgttcgattcaaggccctacaaatatctgccatattagacacggaaccagaaatggatgagtattttgtttgcaccttgtttaatccaactggaggtgctagactaggggtgcatgttcaaaccctgataacagttttgcaaaaccaggcccctttggggctattcagtatctctgcagttgaaaatagagccacctccatagacatcgaagaagccaataggaccgtgtatttaaatgtatctcgaactaatggcattgatttggctgtgagtgtgcagtgggagacagtatctgaaacagcctttggcatgaggggaatggatgttgtgttttccgtatttcaaagttttttggatgaatcagcttctggctggtgtttctttactttggaaaatttaatatatggtataatgttaagaaaatcatctgttactgtttaccgatggcaggggatttttattccagttgaggatttaaatatagaaaatcctaaaacttgtgaggcctttaatattggtttttctccctactttgtgattactcatgaagaaagaaatgaagaaaagccttctcttaacagtgtgtttacattcacatctggatttaaattattcctggtacaaacaatcattattctggaaagttctcaagtaagatattttacttcagacagccaagattatttaatcattgcaagtcaaagagatgattccgaattaactcaggtcttcaggtggaatggaggaagcttcgtgttgcatcaaaaactccctgtccgaggtgtgctgaccgtggccttgttcaacaagggaggctctgtgttcttagccatttcccaggctaatgccaggctaaactcccttttattcagatggtctggcagtgggtttattaactttcaagaggtgcctgtcagtgggacaacagaagttgaggctttgtcttcagccaatgatatttacctaatatttgccgaaaatgtctttctaggagatcagaattcaattgatattttcatctgggagatgggacagtcttccttcaggtattttcagtctgtagattttgctgctgttaacagaatccactccttcacaccagcctcaggaatagcccacatacttcttattggccaagatatgtctgctctttactgctggaattcggagcgtaatcaattctcttttgttctggaagtaccttctgcttatgatgtggcttctgttacagtaaagtcccttaattcaagcaagaatttaatagctctagtgggagctcattcacatatatatgagctagcctacatttccagccattctgactttattcctagttcaggtgaactgatatttgaacctggtgagagagaagctacaatagcagtaaatatccttgatgatacagttccagaaaaagaagaatccttcaaagttcaacttaaaaatcccaaaggaggagcagagattggcattaatgattctgtaacaataaccattctgtctaatgatgatgcctatggaattgttgcatttgctcagaattcattatataagcaagtggaagaaatggagcaagatagcctagtaaccttgaacgttgaacgcttaaaaggaacatatggccgtataaccatagcatgggaagctgatggaagtattagtgatatatttcctacctcaggagtgattttatttactgaaggccaggtactgtcaacaatcactctaactattcttgctgataatataccagagttatcagaggttgtgattgtaaccctcacccgtatcaccacagaaggggttgaggactcatacaaaggtgctactattgatcaggacagaagcaagtctgttataacaactttgcccaatgactcaccttttggcttggtgggctggcgtgctgcgtctgtcttcattagagtagcagagcctaaagaaaacaccaccactcttcagttacaaatagctcgagataaaggactacttggggatattgccattcacttgagagctcaacccaatttcttactgcatgtcgataatcaagctactgagaatgaagattatgtattgcaagaaacaataataataatgaaagaaaacataaaagaagctcatgccgaagtttccattttgccggatgaccttcctgaattggaggaaggatttattgtcactatcactgaggtgaacctggtgaactctgacttctctacaggacagccaagtgtgcggaggcccggaatggaaatagctgagataatgatagaagaaaatgacgatcccagaggaatttttatgtttcatgttactagaggcgctggggaagttattactgcctatgaggtgcctccacccttgaacgttcttcaagttcctgtagtccggctggctggaagctttggggcagtaaatgtttattggaaagcatcaccagacagtgctggcctggaagactttaaaccatctcatgggattcttgaatttgcagataaacaggttactgcaatgatagaaatcaccataattgatgatgctgaatttgaattgacagagacgttcaatatttccttgatcagtgttgctggaggtggcagacttggtgatgatgttgtggtaactgttgttattccacaaaatgattctccatttggagtatttggatttgaagaaaagactgtaagttaaacatatcaggggaaagccttgtttcaggctagcgtttcatgtaattttgagtagaaagtgtctcacatttttgttttggaagtcttggccaggcatggtggctcatgccagtaatcccagcactttgggaggccgcagcgggcagatcacgaggtcaggagattgacaccatcctggccaatatggttgaattcccgtctctactgaaagtacaaaaattagctgggcgtggtggcacatgcctgtattcccagatacttgggaggctgaggcaggagactcgcttgaacccaggaggcagaggttgcagtgagctgagatcacgccattgcactccagcctggcgacatagagagactccatctcaaaaaaaaaaaaaaaaaaa

SEQ ID NO: 659 - DNA, 4505 bp, Homo sapiens
  source 1..4505: mol_type = unassigned DNA
ggcccctttggggctattcagtatctctgcagttgaaaatagagccacctccatagacatcgaagaagccaataggaccgtgtatttaaatgtatctcgaactaatggcattgatttggctgtgagtgtgcagtgggagacagtatctgaaacagcctttggcatgaggggaatggatgttgtgttttccgtatttcaaagttttttggatgaatcagcttctggctggtgtttctttactttggaaaatttaatatatggtataatgttaagaaaatcatctgttactgtttaccgatggcaggggatttttattccagttgaggatttaaatatagaaaatcctaaaacttgtgaggcctttaatattggtttttctccctactttgtgattactcatgaagaaagaaatgaagaaaagccttctcttaacagtgtgtttacattcacatctggatttaaattattcctggtacaaacaatcattattctggaaagttctcaagtaagatattttacttcagacagccaagattatttaatcattgcaagtcaaagagatgattccgaattaactcaggtcttcaggtggaatggaggaagcttcgtgttgcatcaaaaactccctgtccgaggtgtgctgaccgtggccttgttcaacaagggaggctctgtgttcttagccatttcccaggctaatgccaggctaaactcccttttattcagatggtctggcagtgggtttattaactttcaagaggtgcctgtcagtgggacaacagaagttgaggctttgtcttcagccaatgatatttacctaatatttgccgaaaatgtctttctaggagatcagaattcaattgatattttcatctgggagatgggacagtcttccttcaggtattttcagtctgtagattttgctgctgttaacagaatccactccttcacaccagcctcaggaatagcccacatacttcttattggccaagatatgtctgctctttactgctggaattcggagcgtaatcaattctcttttgttctggaagtaccttctgcttatgatgtggcttctgttacagtaaagtcccttaattcaagcaagaatttaatagctctagtgggagctcattcacatatatatgagctagcctacatttccagccattctgactttattcctagttcaggtgaactgatatttgaacctggtgagagagaagctacaatagcagtaaatatccttgatgatacagttccagaaaaagaagaatccttcaaagttcaacttaaaaatcccaaaggaggagcagagattggcattaatgattctgtaacaataaccattctgtctaatgatgatgcctatggaattgttgcatttgctcagaattcattatataagcaagtggaagaaatggagcaagatagcctagtaaccttgaacgttgaacgcttaaaaggaacatatggccgtataaccatagcatgggaagctgatggaagtattagtgatatatttcctacctcaggagtgattttatttactgaaggccaggtactgtcaacaatcactctaactattcttgctgataatataccagagttatcagaggttgtgattgtaaccctcacccgtatcaccacagaaggggttgaggactcatacaaaggtgctactattgatcaggacagaagcaagtctgttataacaactttgcccaatgactcaccttttggcttggtgggctggcgtgctgcgtctgtcttcattagagtagcagagcctaaagaaaacaccaccactcttcagttacaaatagctcgagataaaggactacttggggatattgccattcacttgagagctcaacccaatttcttactgcatgtcgataatcaagctactgagaatgaagattatgtattgcaagaaacaataataataatgaaagaaaacataaaagaagctcatgccgaagtttccattttgccggatgaccttcctgaattggaggaaggatttattgtcactatcactgaggtgaacctggtgaactctgacttctctacaggacagccaagtgtgcggaggcccggaatggaaatagctgagataatgatagaagaaaatgacgatcccagaggaatttttatgtttcatgttactagaggcgctggggaagttattactgcctatgaggtgcctccacccttgaacgttcttcaagttcctgtagtccggctggctggaagctttggggcagtaaatgtttattggaaagcatcaccagacagtgctggcctggaagactttaaaccatctcatgggattcttgaatttgcagataaacaggttactgcaatgatagaaatcaccataattgatgatgctgaatttgaattgacagagacgttcaatatttccttgatcagtgttgctggaggtggcagacttggtgatgatgttgtggtaactgttgttattccacaaaatgattctccatttggagtatttggatttgaagaaaagactgtaatgattgatgaatccctttcatccgatgaccctgattcatatgtgacattgacggttgtccggtccccaggaggaaaaggaaccgtccgacttgagtggaccatagatgagaaggctaaacataaccttagtcctttgaatgggacccttcattttgatgagactgagtcccagaagaccattgtgttgcacacacttcaagacacagtgttggaggaggacaggcgtttcaccattcagctgatatcaattgatgaggtagaaatatctccagtaaaaggtagtgcatcaataattattcggggtgataagcgagcatcaggagaagttgggatagctccgtcatctaggcacatcctcattggggaaccctcagcaaaatataatggtaccgctattatcagccttgttcgaggcccagggattttgggggaggtcacagtgttctggaggatattccctccttccgtgggggaatttgctgaaacatcaggaaaactgacaatgcgagacgaacagtctgcagtcattgtagtaatacaggctttgaacgatgacattcccgaggaaaaaagcttctatgagtttcagctcactgcagtcagtgagggaggagttctgagtgaatccagcagcactgccaacatcacggtggtggccagcgactctccctatggccgatttgccttttcacatgagcaacttcgagtgtcagaagcacagagggttaacatcacaatcatccgttccagtggagattttggccatgtgcgactctggtacaagacgatgagcgggacagcggaagcaggcttggattttgttcctgcagcaggggagctcctctttgaagcaggggagatgaggaaaagtctgcatgttgaaatccttgatgatgactatcctgaaggcccagaggaattttctctaacaattacaaaggtggaactccagggaaggtaaaggagaaaggcaattaggaaaaagaaagcaaagagcagagagaaagagagaaagttctattgtgtagagattaatactgagctctaaagcagttctttccctactctttctcagatttgtgtgacattagaacaggacatacaagggaaattatgacaatgactgagtttttttttttaattttgttaaatataacttccctctgaaaattgaaagtatgtgtttctattgtgtggactcactctgggtagccaggaagttgaatatgataacggcttctaattggtgaagacacagcctaacagctctctaaatcagaggtcagctggtgtggctgaatttgcttcttttgatttccatacttgtgaaagggctgaagggagggatttctttcattggtgcatctgaagtctgtatcgtcttctctgtgggtgaatgacatagatgcttgccccatagttttaaagtggggaaaaatttgagtgaaagctagttggccattaatgtgcaccatgttttcaaggaagataatgaattaaccttaatgagtctctttcattccctgatttagtgaggcagatttgatgaggtggaaaaacatctttagcatgtttaagtactcacaggttctgcagctcacaggttgagagagacctaccagcatctctgcccagatagcagataggtgggcccttcaactagagtaatgcctgcatttagaagaatcataaagacatttttcttgtgcatgaaaatatttttgcctttgtaatgtgaatatcatgctttaaaaactttttaaactaaaatatgttactcagtgacttaagtgtatatcatcccatctgggaaaaaaatattgtgggctcacatacccttcaaattttagatttcccaaaaatgcttctatgcctggcaatgagagtgaatttgtactcctagtaaatatagtaaaaagtttgagctgatcactgactattttaattaaataaatgcaatt

SEQ ID NO: 660 - DNA, 8141 bp, Homo sapiens
  source 1..8141: mol_type = unassigned DNA
caacttaaaaatcccaaaggaggagcagagattggcattaatgattctgtaacaataaccattctgtctaatgatgatgcctatggaattgttgcatttgctcagaattcattatataagcaagtggaagaaatggagcaagatagcctagtaaccttgaacgttgaacgcttaaaaggaacatatggccgtataaccatagcatgggaagctgatggaagtattagtgatatatttcctacctcaggagtgattttatttactgaaggccaggtactgtcaacaatcactctaactattcttgctgataatataccagagttatcagaggttgtgattgtaaccctcacccgtatcaccacagaaggggttgaggactcatacaaaggtgctactattgatcaggacagaagcaagtctgttataacaactttgcccaatgactcaccttttggcttggtgggctggcgtgctgcgtctgtcttcattagagtagcagagcctaaagaaaacaccaccactcttcagttacaaatagctcgagataaaggactacttggggatattgccattcacttgagagctcaacccaatttcttactgcatgtcgataatcaagctactgagaatgaagattatgtattgcaagaaacaataataataatgaaagaaaacataaaagaagctcatgccgaagtttccattttgccgggcgctggggaagttattactgcctatgaggtgcctccacccttgaacgttcttcaagttcctgtagtccggctggctggaagctttggggcagtaaatgtttattggaaagcatcaccagacagtgctggcctggaagactttaaaccatctcatgggattcttgaatttgcagataaacaggttactgcaatgatagaaatcaccataattgatgatgctgaatttgaattgacagagacgttcaatatttccttgatcagtgttgctggaggtggcagacttggtgatgatgttgtggtaactgttgttattccacaaaatgattctccatttggagtatttggatttgaagaaaagactgtaatgattgatgaatccctttcatccgatgaccctgattcatatgtgacattgacggttgtccggtccccaggaggaaaaggaaccgtccgacttgagtggaccatagatgagaaggctaaacataaccttagtcctttgaatgggacccttcattttgatgagactgagtcccagaagaccattgtgttgcacacacttcaagacacagtgttggaggaggacaggcgtttcaccattcagctgatatcaattgatgaggtagaaatatctccagtaaaaggtagtgcatcaataattattcggggtgataagcgagcatcaggagaagttgggatagctccgtcatctaggcacatcctcattggggaaccctcagcaaaatataatggtaccgctattatcagccttgttcgaggcccagggattttgggggaggtcacagtgttctggaggatattccctccttccgtgggggaatttgctgaaacatcaggaaaactgacaatgcgagacgaacagtctgcagtcattgtagtaatacaggctttgaacgatgacattcccgaggaaaaaagcttctatgagtttcagctcactgcagtcagtgagggaggagttctgagtgaatccagcagcactgccaacatcacggtggtggccagcgactctccctatggccgatttgccttttcacatgagcaacttcgagtgtcagaagcacagagggttaacatcacaatcatccgttccagtggagattttggccatgtgcgactctggtacaagacgatgagcgggacagcggaagcaggcttggattttgttcctgcagcaggggagctcctctttgaagcaggggagatgaggaaaagtctgcatgttgaaatccttgatgatgactatcctgaaggcccagaggaattttctctaacaattacaaaggtggaactccagggaagagggtatgattttaccattcaagaaaatggacttcagatagatcaacctcctgaaataggaaacatctccattgttcgcatcataataatgaaaaatgataacgcagaaggcatcattgaatttgacccaaagtatactgccttcgaagtggaggaagatgttgggctgatcatgatcccagtggtgaggctacatggaacttatggctatgtgacagctgatttcatctctcagagctcctctgccagtcccggaggtgttgattacattttgcatggcagtacagtcacctttcagcatgggcaaaacttaagttttataaatatctccatcattgatgacaatgaaagtgaatttgaggagcccattgaaattctactcactggagctactggaggagcggtccttgggcgccacctagtgagcagaatcataatagctaagagtgactctccctttggagttataaggtttctcaatcaaagcaaaatttctattgctaatcccaattccacaatgattttatcactggtgctggagcggactggaggactcttgggagagattcaggtgaactgggagacagtaggacccaactctcaagaagccttactgccacagaatagagacattgcagacccagtgagcgggttgttctattttggagaaggagaaggaggagtgagaaccataattctgacaatctatcctcatgaagaaattgaagttgaagagacattcattattaaacttcatcttgtgaaaggagaagctaaattagactccagagctaaagatgttacattaaccatacaagagtttggtgacccaaatggagttgttcagtttgctcctgaaactttgtctaagaagacttattcagagcctctggctctggaagggcccctgctcattaccttctttgtcagaagagtcaagggcacctttggagagattatggtttactgggaattaagtagtgagtttgacattactgaagactttctttccaccagtggatttttcaccattgctgatggagagagtgaagctagctttgatgttcatttgctaccagatgaggtacctgagatagaggaagattatgtgatccagcttgtttctgtagagggaggagccgaactggatctggagaagagtatcacatggttctctgtttatgcaaatgatgacccacatggagtatttgccctgtattcggatcgccagtcaatacttattgggcagaaccttattagatccatccaaattaacataacccggcttgctggaacatttggagatgtggctgttgggcttcgaatatcatcggatcataaagaacagccgattgttaccgaaaatgcagagaggcagctggtggtcaaagatggtgccacatataaagtggacgtggtgccaataaagaatcaggtcttcctatcactgggctctaatttcactttgcaactggtgactgtgatgcttgtcggtggacgtttctatggaatgccaacaattcttcaggaagcaaaatctgctgtccttccagtctctgagaaagctgccaattctcaggtcggatttgaatccactgcttttcaactcatgaacatcactgctggcacaagccacgttatgatttctaggagaggcacatatggagctctctcggttgcctggaccactggatatgctcctgggttagaaattcctgaattcattgttgttggcaacatgaccccaacactggggagcctttcattttcccacggtgaacaaaggaaaggagttttcctgtggacgtttcctagccctggttggccagaggcctttgttcttcacctatcaggagtgcagagcagtgctcctggcggagctcaactccgatcaggtttcattgttgctgaaattgaaccaatgggcgtcttccaattttccactagctcaagaaatatcatagtgtcagaagatacacagatgatcagattacatgtacaaagactatttgggttccacagcgatcttattaaagtttcttatcagaccactgcaggaagcgccaagccactggaagattttgagcctgttcagaatggggaactgttttttcaaaaattccaaactgaggttgattttgaaataaccattattaatgatcagctttctgagatagaagaatttttttacattaaccttacttcagtagaaattaggggattacaaaagtttgatgttaattggagcccacgcctgaatctagatttcagtgttgcagtgattacaatattggataatgatgacctggcaggaatggatatttccttccccgagacaactgtggctgtagcagttgacacaactctcattcctgtagaaactgaatccaccacatacctcagcacaagcaagacgactaccattctgcagccaaccaacgtggttgccattgttactgaggcaactggtgtatctgccatccctgagaaacttgtcacccttcatggcacacctgctgtgtctgaaaagcctgatgtggccactgtaactgccaatgtttccattcatggaacattcagccttgggccatccattgtttatattgaagaggagatgaagaatggcacattcaacactgcagaagttcttatccgaagaactggtgggtttactggcaatgtcagcataacagttaaaactttcggtgaaagatgtgctcagatggaaccaaatgcattgccctttcgtggtatctatgggatttccaacctaacatgggcagttgaagaagaagactttgaagaacaaactcttacccttatattcctagatggagaaagagaacgtaaagtatcagttcaaattttggatgatgatgagcctgaggggcaggaattcttctacgtgtttctcacaaaccctcaagggggagcacagattgtggaggagaaggatgatactggatttgcagcttttgccatggttattattacagggagtgaccttcacaatggcatcataggattcagtgaggagtcccagagtggactagaactcagggaaggagctgttatgagaagattgcaccttattgtcacaagacagccaaacagggcctttgaagatgtcaaggtcttttggcgagtcacacttaacaaaacagtcgtcgtgctccagaaggatggggtaaacctggtggaggaacttcagtctgtgtcagggaccacaacctgtacaatgggtcaaacaaaatgctttatcagcattgaactcaaaccagaaaaggtaccacaggttgaagtgtatttttttgtggaactatatgaagctactgctggagcagcaataaacaacagtgccagattcgcacagattaaaatcttagaaagtgatgaatctcaaagccttgtgtatttttctgtgggttctcggctggcagtggctcacaagaaggccactttaatcagtctgcaggtggccagagattctgggacaggactaatgatgtctgttaactttagtacccaggagttgaggagtgctgaaacaattggtcgtaccatcatatctccagctatttctggaaaggattttgtgataactgaaggcacattggtctttgaacctggccagagaagcactgtattggatgtcatcctaacgccagagacaggatctttaaattcatttcctaaacgcttccagattgtcctttttgacccaaaaggtggtgccagaattgataaagtgtatgggactgccaacatcactcttgtctcagatgcagattcgcaggccatttgggggcttgcagatcagctacatcagcctgtgaatgatgatattctcaacagagtgctccataccatcagcatgaaagtggccacagaaaacacagatgaacaactcagtgccatgatgcatttaatagaaaagataactactgaaggaaaaattcaagctttcagtgttgccagccgaactcttttctatgagattctttgttctcttattaacccaaagcgcaaggacactaggggattcagtcactttgctgaagtgactgagaattttgccttttctctgctgactaatgttacttgcggctctcctggtgaaaaaagcaaaaccatccttgatagttgcccatatttgtcaatattggctcttcactggtatcctcagcaaatcaatggacacaagtttgaaggaaaggaaggagattacattcgaattccagagaggctactggatgtccaggatgcagaaataatggctgggaaaagtacatgtaaattagtccagtttacagagtatagcagccaacagtggtttataagtggaaacaatcttcctaccctaaaaaataaggtattatctttgagtgtgaaaggtcagagttcacaactcctgactaatgacaatgaggttctctacaggatttatgctgctgagcctagaattattcctcagacatctctgtgtctcctttggaatcaggctgctgcaagctggttgtctgacagtcagttttgcaaagtggttgaggaaactgcagactatgtggaatgtgcctgttcacacatgtctgtgtatgctgtctatgctcggactgacaacttgtcttcatacaatgaagccttcttcacttctggatttatatgtatctcaggtctttgcttggctgttctttcccatatcttctgtgccaggtactccatgtttgcagctaaacttctgactcacatgatggcagccagcttaggtacacagattctgtttctggcgtctgcatacgcaagtccccaactcgctgaggagagctgttcagctatggctgctgtcacacattacctgtatctttgccagtttagctggatgctcattcagtctgtgaatttctggtacgtgctggtgatgaatgatgagcacacagagaggcgatatctgctgtttttccttctgagttggggactaccagcttttgtggtgattctcctcatagttattttgaaaggaatctatcatcagagcatgtcacagatctatggactcattcatggtgacctgtgttttattccaaacgtctatgctgctttgttcactgcagctcttgttcctttgacgtgcctcgtggtggtgttcgtggtgttcatccatgcctaccaggtgaagccacagtggaaagcatatgatgatgtcttcagaggaaggacaaatgctgcagaaattccactgattttatatctctttgctctgatttccgtgacatggctttggggaggactacacatggcctacagacacttctggatgttggttctctttgtcattttcaacagtctgcagggactttatgttttcatggtttatttcattttacacaaccaaatgtgttgccctatgaaggccagttacactgtggaaatgaatgggcatcctggacccagcacagcctttttcacgcccgggagtggaatgcctcctgctggaggggaaatcagcaagtccacccagaatctcatcggtgctatggaggaggtgccacctgactgggagagagcatccttccaacagggcagtcaggccagccctgatttaaagccaagtccacaaaatggagccacgttcccgtcctctggaggatatggccaggggtcactgatagccgatgaggagtcccaggagtttgatgatttaatatttgcattaaaaactggtgctggtctcagtgtcagtgataatgaatctggtcaaggcagccaggaggggggcaccttgactgactcccagatcgtggagctcaggaggatacccatcgccgacactcacctgtagcacctcactaaccattcgactgagcacactttcatatttgtatcagcttttgtgctaaaactctctaagtacatccacctgtgtaataggaacctgtgaattgtactggatgattaatacaaacgtgattgttgtatttggagtataaattactgattgtatgtgacctgaaaattcactgctataagaaaggtggagtcagtttgtatcagttaataggatgttcatattccaaggatattagttgtttttttaatcatcctata

SEQ ID NO: 661 - DNA, 1177 bp, Homo sapiens
  source 1..1177: mol_type = unassigned DNA
gctgagataatgatagaagaaaatgacgatcccagaggaatttttatgtttcatgttactagagtgagatgaactttcatttgtttacagtcatacagaggcctctccctgctgatttggccagtgttttatgtttagctttgcctgtatttatttttaaatagataaataaccaaatttgtcttataaactaattcttaggtctctttgggctagaccaaaggattcaacaagtttactttcattaaatataagagttcagaagaccttttatgcatacttatatctgactattaatttctactttaaagggtgaaatatagaaagttaagtagaaacaataactttagaaagatgacttatgagagttaccattttatcttgcctttcaattatattctttacttaaagggcgctggggaagttattactgcctatgaggtgcctccacccttgaacgttcttcaagttcctgtagtccggctggctggaagctttggggcagtaaatgtttattggaaagcatcaccagacagtgctggcctggaagactttaaaccatctcatgggattcttgaatttgcagataaacaggttactgcaatgatagaaatcaccataattgatgatgctgaatttgaattgacagagacgttcaatatttccttgatcagtgttgctggaggtggcagacttggtgatgatgttgtggtaactgttgttattccacaaaatgattctccatttggagtatttggatttgaagaaaagactgtaagttaaacatatcaggggaaagccttgtttcaggctagcgtttcatgtaattttgagtagaaagtgtctcacatttttgttttggaagtcttggccaggcatggtggctcatgccagtaatcccagcactttgggaggccgcagcgggcagatcacgaggtcaggagattgacaccatcctggccaatatggttgaattcccgtctctactgaaagtacaaaaattagctgggcgtggtggcacatgcctgtattcccagatacttgggaggctgaggcaggagactcgcttgaacccaggaggcagaggttgcagtgagctgagatcacgccattgcactccagcctggcgacatagagagactccatctcaaaaaaaaaaaaaaaaaaaaaaaaaaaa

SEQ ID NO: 662 - DNA, 1360 bp, Homo sapiens
  source 1..1360: mol_type = unassigned DNA
ggacttgtatgcaaaataaatagttctggtaaatcaatgtattgaatctcctctctttatctcagattaataaaaaccacttttaaattttgactcgctaaagtaggtacaccataattcagaggacagtttaggtctgtattatgtgaggagcctgattgtagtaacaaagatcccgccaagtctcagtttcttcatatggtaaatgtgcatttcttcttcacgcaggaatcctgcaccagcgtgcccagttggctgatgcttatggacacctcttattcagctggcagctctcaggccctagactctgtccatcttggggttatgtcctcttctaggtcctgggcctcctctctattcacctgccaaatggaaaagtagaggatgtggggtcttgtgtgggtgtttatggcaagagtattagcagcataaatcatttctgcctctattctctgggtcagaattcagtcacatgctctacctaattgcaagagaagacaggaaatgccaactagttgagcatctaggaatagaaagtgggatttggtaaaaaaaatttttctgccacatgataattacatgtaacattctaaattataaaactgcagtcattgtaaacagaaataagattctacttgtttatcctgctctttttgtttttttttttgtttggccttactgaattttcttctttcaggtaatgattgatgaatccctttcatccgatgaccctgattcatatgtgacattgacggttgtccggtccccaggaggaaaaggaaccgtccgacttgagtggaccatagatgagaaggctaaacataaccttagtcctttgaatgggacccttcattttgatgagactgagtcccagaagaccattgtgttgcacacacttcaagacacagtgttggaggaggacaggcgtttcaccattcagctgatatcaattgatgaggtagaaatatctccagtaaaaggtagtgcatcaataattattcggggtgataagcgagcatcaggagaagttgggatagctccgtcatctaggcacatcctcattggggaaccctcagcaaaatataatggtaccgctattatcagccttgttcgaggcccagggattttgggggaggtcacagtgttctggaggatattccctccttccgtgggggaatttgctgaaacatcaggaaaactgacaatgcgagacgaacagtctgcagtcattgtagtaatacaggctttgaacgatgacattcccgaggaaaaaagcttctatgagtttcagctcactgcagtcagtgagggaggagttctgagtgaatccagcagcactgccaacatcacggtggtggcc

SEQ ID NO: 663 - DNA, 6503 bp, Homo sapiens
  source 1..6503: mol_type = unassigned DNA
attactgtatatgtatgtattcagccgtgattcccaaaggttcattttatgacagcatctttctgatttcctcacagtttattatcttcccattgcccaagtttagtaactttatattagttttggcttcgtacaggcaccactcattgggagcaacacagaaatctgtttcaaaacatcatttcaggaaaaagagaatattttagcgttgaggatctttaaaagtattgcagtactttatagaactaagttgtaggagctaagaggatcttttaattcatgctatgcaattatgtattttttgttgttgttgtattttattttattttgatttgtatgactttggaagagggtatgattttaccattcaagaaaatggacttcagatagatcaacctcctgaaataggaaacatctccattgttcgcatcataataatgaaaaatgataacgcagaaggcatcattgaatttgacccaaagtatactgccttcgaagtggaggaagatgttgggctgatcatgatcccagtggtgaggctacatggaacttatggctatgtgacagctgatttcatctctcagagctcctctgccagtcccggaggtgttgattacattttgcatggcagtacagtcacctttcagcatgggcaaaacttaagttttataaatatctccatcattgatgacaatgaaagtgaatttgaggagcccattgaaattctactcactggagctactggaggagcggtccttgggcgccacctagtgagcagaatcataatagctaagagtgactctccctttggagttataaggtttctcaatcaaagcaaaatttctattgctaatcccaattccacaatgattttatcactggtgctggagcggactggaggactcttgggagagattcaggtgaactgggagacagtaggacccaactctcaagaagccttactgccacagaatagagacattgcagacccagtgagcgggttgttctattttggagaaggagaaggaggagtgagaaccataattctgacaatctatcctcatgaagaaattgaagttgaagagacattcattattaaacttcatcttgtgaaaggagaagctaaattagactccagagctaaagatgttacattaaccatacaagagtttggtgacccaaatggagttgttcagtttgctcctgaaactttgtctaagaagacttattcagagcctctggctctggaagggcccctgctcattaccttctttgtcagaagagtcaagggcacctttggagagattatggtttactgggaattaagtagtgagtttgacattactgaagactttctttccaccagtggatttttcaccattgctgatggagagagtgaagctagctttgatgttcatttgctaccagatgaggtacctgagatagaggaagattatgtgatccagcttgtttctgtagagggaggagccgaactggatctggagaagagtatcacatggttctctgtttatgcaaatgatgacccacatggagtatttgccctgtattcggatcgccagtcaatacttattgggcagaaccttattagatccatccaaattaacataacccggcttgctggaacatttggagatgtggctgttgggcttcgaatatcatcggatcataaagaacagccgattgttaccgaaaatgcagagaggcagctggtggtcaaagatggtgccacatataaagtggacgtggtgccaataaagaatcaggtcttcctatcactgggctctaatttcactttgcaactggtgactgtgatgcttgtcggtggacgtttctatggaatgccaacaattcttcaggaagcaaaatctgctgtccttccagtctctgagaaagctgccaattctcaggtcggatttgaatccactgcttttcaactcatgaacatcactgctggcacaagccacgttatgatttctaggagaggcacatatggagctctctcggttgcctggaccactggatatgctcctgggttagaaattcctgaattcattgttgttggcaacatgaccccaacactggggagcctttcattttcccacggtgaacaaaggaaaggagttttcctgtggacgtttcctagccctggttggccagaggcctttgttcttcacctatcaggagtgcagagcagtgctcctggcggagctcaactccgatcaggtttcattgttgctgaaattgaaccaatgggcgtcttccaattttccactagctcaagaaatatcatagtgtcagaagatacacagatgatcagattacatgtacaaagactatttgggttccacagcgatcttattaaagtttcttatcagaccactgcaggaagcgccaagccactggaagattttgagcctgttcagaatggggaactgttttttcaaaaattccaaactgaggttgattttgaaataaccattattaatgatcagctttctgagatagaagaatttttttacattaaccttacttcagtagaaattaggggattacaaaagtttgatgttaattggagcccacgcctgaatctagatttcagtgttgcagtgattacaatattggataatgatgacctggcaggaatggatatttccttccccgagacaactgtggctgtagcagttgacacaactctcattcctgtagaaactgaatccaccacatacctcagcacaagcaagacgactaccattctgcagccaaccaacgtggttgccattgttactgaggcaactggtgtatctgccatccctgagaaacttgtcacccttcatggcacacctgctgtgtctgaaaagcctgatgtggccactgtaactgccaatgtttccattcatggaacattcagccttgggccatccattgtttatattgaagaggagatgaagaatggcacattcaacactgcagaagttcttatccgaagaactggtgggtttactggcaatgtcagcataacagttaaaactttcggtgaaagatgtgctcagatggaaccaaatgcattgccctttcgtggtatctatgggatttccaacctaacatgggcagttgaagaagaagactttgaagaacaaactcttacccttatattcctagatggagaaagagaacgtaaagtatcagttcaaattttggatgatgatgagcctgaggggcaggaattcttctacgtgtttctcacaaaccctcaagggggagcacagattgtggaggagaaggatgatactggatttgcagcttttgccatggttattattacagggagtgaccttcacaatggcatcataggattcagtgaggagtcccagagtggactagaactcagggaaggagctgttatgagaagattgcaccttattgtcacaagacagccaaacagggcctttgaagatgtcaaggtcttttggcgagtcacacttaacaaaacagtcgtcgtgctccagaaggatggggtaaacctggtggaggaacttcagtctgtgtcagggaccacaacctgtacaatgggtcaaacaaaatgctttatcagcattgaactcaaaccagaaaaggtaccacaggttgaagtgtatttttttgtggaactatatgaagctactgctggagcagcaataaacaacagtgccagattcgcacagattaaaatcttagaaagtgatgaatctcaaagccttgtgtatttttctgtgggttctcggctggcagtggctcacaagaaggccactttaatcagtctgcaggtggccagagattctgggacaggactaatgatgtctgttaactttagtacccaggagttgaggagtgctgaaacaattggtcgtaccatcatatctccagctatttctggaaaggattttgtgataactgaaggcacattggtctttgaacctggccagagaagcactgtattggatgtcatcctaacgccagagacaggatctttaaattcatttcctaaacgcttccagattgtcctttttgacccaaaaggtggtgccagaattgataaagtgtatgggactgccaacatcactcttgtctcagatgcagattcgcaggccatttgggggcttgcagatcagctacatcagcctgtgaatgatgatattctcaacagagtgctccataccatcagcatgaaagtggccacagaaaacacagatgaacaactcagtgccatgatgcatttaatagaaaagataactactgaaggaaaaattcaagctttcagtgttgccagccgaactcttttctatgagattctttgttctcttattaacccaaagcgcaaggacactaggggattcagtcactttgctgaagtgactgagaattttgccttttctctgctgactaatgttacttgcggctctcctggtgaaaaaagcaaaaccatccttgatagttgcccatatttgtcaatattggctcttcactggtatcctcagcaaatcaatggacacaagtttgaaggaaaggaaggagattacattcgaattccagagaggctactggatgtccaggatgcagaaataatggctgggaaaagtacatgtaaattagtccagtttacagagtatagcagccaacagtggtttataagtggaaacaatcttcctaccctaaaaaataaggtattatctttgagtgtgaaaggtcagagttcacaactcctgactaatgacaatgaggttctctacaggatttatgctgctgagcctagaattattcctcagacatctctgtgtctcctttggaatcaggctgctgcaagctggttgtctgacagtcagttttgcaaagtggttgaggaaactgcagactatgtggaatgtgcctgttcacacatgtctgtgtatgctgtctatgctcggactgacaacttgtcttcatacaatgaagccttcttcacttctggatttatatgtatctcaggtctttgcttggctgttctttcccatatcttctgtgccaggtactccatgtttgcagctaaacttctgactcacatgatggcagccagcttaggtacacagattctgtttctggcgtctgcatacgcaagtccccaactcgctgaggagagctgttcagctatggctgctgtcacacattacctgtatctttgccagtttagctggatgctcattcagtctgtgaatttctggtacgtgctggtgatgaatgatgagcacacagagaggcgatatctgctgtttttccttctgagttggggactaccagcttttgtggtgattctcctcatagttattttgaaaggaatctatcatcagagcatgtcacagatctatggactcattcatggtgacctgtgttttattccaaacgtctatgctgctttgttcactgcagctcttgttcctttgacgtgcctcgtggtggtgttcgtggtgttcatccatgcctaccaggtgaagccacagtggaaagcatatgatgatgtcttcagaggaaggacaaatgctgcagaaattccactgattttatatctctttgctctgatttccgtgacatggctttggggaggactacacatggcctacagacacttctggatgttggttctctttgtcattttcaacagtctgcagggactttatgttttcatggtttatttcattttacacaaccaaatgtgttgccctatgaaggccagttacactgtggaaatgaatgggcatcctggacccagcacagcctttttcacgcccgggagtggaatgcctcctgctggaggggaaatcagcaagtccacccagaatctcatcggtgctatggaggaggtgccacctgactgggagagagcatccttccaacagggcagtcaggccagccctgatttaaagccaagtccacaaaatggagccacgttcccgtcctctggaggatatggccaggggtcactgatagccgatgaggagtcccaggagtttgatgatttaatatttgcattaaaaactggtgctggtctcagtgtcagtgataatgaatctggtcaaggcagccaggaggggggcaccttgactgactcccagatcgtggagctcaggaggatacccatcgccgacactcacctgtagcacctcactaaccattcgactgagcacactttcatatttgtatcagcttttgtgctaaaactctctaagtacatccacctgtgtaataggaacctgtgaattgtactggatgattaatacaaacgtgattgttgtatttggagtataaattactgattgtatgtgacctgaaaattcactgctataagaaaggtggagtcagtttgtatcagttaataggatgttcatattccaaggatattagttgtttttttaatcatcctatatggctaacattgtttaatgaaagtaataatcaataaagcaatagaatct

SEQ ID NO: 664 - DNA, 2467 bp, Homo sapiens
  source 1..2467: mol_type = unassigned DNA
acctttcagcatgggcaaaacttaagttttataaatatctccatcattgatgacaatgaaagtgaatttgaggagcccattgaaattctactcactggagctactggaggagcggtccttgggcgccacctagtgagcagaatcataatagctaagagtgactctccctttggagttataaggtttctcaatcaaagcaaaatttctattgctaatcccaattccacaatgattttatcactggtgctggagcggactggaggactcttgggagagattcaggtgaactgggagacagtaggacccaactctcaagaagccttactgccacagaatagagacattgcagacccagtgagcgggttgttctattttggagaaggagaaggaggagtgagaaccataattctgacaatctatcctcatgaagaaattgaagttgaagagacattcattattaaacttcatcttgtgaaaggagaagctaaattagactccagagctaaagatgttacattaaccatacaagagtttggtgacccaaatggagttgttcagtttgctcctgaaactttgtctaagaagacttattcagagcctctggctctggaagggcccctgctcattaccttctttgtcagaagagtcaagggcacctttggagagattatggtttactgggaattaagtagtgagtttgacattactgaagactttctttccaccagtggatttttcaccattgctgatggagagagtgaagctagctttgatgttcatttgctaccagatgaggtacctgagatagaggaagattatgtgatccagcttgtttctgtagagggaggagccgaactggatctggagaagagtatcacatggttctctgtttatgcaaatgatgacccacatggagtatttgccctgtattcggatcgccagtcaatacttattgggcagaaccttattagatccatccaaattaacataacccggcttgctggaacatttggagatgtggctgttgggcttcgaatatcatcggatcataaagaacagccgattgttaccgaaaatgcagagaggcagctggtggtcaaagatggtgccacatataaagtggacgtggtgccaataaagaatcaggtttgtggcatttcttcagtttcctgatcattccaataaaaccctttcaggagtgcccatgcttacctcataatcagtttgaaatcttattcaggtatttaaatggaaccacaaaaaaatgccctcgaaaatgtttagtaactactggataatacatttgcagattataataagtatattactatttggatggagataatagatttttgtgtagaaagtaacagacacttatttaatacttacaaagttctaggaaatgtttccagtggtgtgcatatacacctgcacacccatggacatgtgtatgcacacgcacacacactgatacttgtcaaaggggagaaatttataggcttctttgtgcttctagcaaagagtagtgcaatgaaatagattacatgaagaggatttgtgaatacagagactggtaactgcttctctttttgaaaagttgaaatgtaggaaattggctatgatattctctaatggtaatgaggagaaatcatagcaggctgctctgccaagatctggggtgggtgatcagaatgcatggatgtcctgtggctcaagcagacagcccagcagtctttctcagtctgaaccacagaaagtgattgagtgactttttttttaattcctcccaaggatggtacatgtcatatcatcctctgtgcatgcattatggcattcattgccactggatgcattatggcattgggattaattatctcatgggcaagaaaggctgtccaagaagtagacagattggtgtcatcttgagaaaaacttgcagggtgaattatgtagctagagagaatgaaaaaggagaatatattctctctgtcgaggaatggtgaagaggggaattctgaagcctttgggaacacccaaatcaactccatgaaggcttgagcatttgggtgctgctttcatggaggtgtgttattcagccagtgtcagcttagtttcatataaacttgtgatccatagaaaataggctatcatttccggataagcaacaagcctattacactaatccatacttacagtgctaccttttgatgtgttgtgtactcgagccttttgtagttgcttaataaagaaaacaaatggggtcttcttagtgagacatgggtttcatagctattcctacattcctgtacaatatgtcctcagttaatgtccacaggttcttggaaactgcagctttaagtgaaatgatgtacaatgtaaccaattttaccgtaagctaattgatataaaaaacaatagttaagttcctacagcatatttctggtcacaaaaacagcgccagacttat

SEQ ID NO: 665 - DNA, 5673 bp, Homo sapiens
  source 1..5673: mol_type = unassigned DNA
aattccacaatgattttatcactggtgctggagcggactggaggactcttgggagagattcaggtgaactgggagacagtaggacccaactctcaagaagccttactgccacagaatagagacattgcagacccagtgagcgggttgttctattttggagaaggagaaggaggagtgagaaccataattctgacaatctatcctcatgaagaaattgaagttgaagagacattcattattaaacttcatcttgtgaaaggagaagctaaattagactccagagctaaagatgttacattaaccatacaagagtttggtgacccaaatggagttgttcagtttgctcctgaaactttgtctaagaagacttattcagagcctctggctctggaagggcccctgctcattaccttctttgtcagaagagtcaagggcacctttggagagattatggtttactgggaattaagtagtgagtttgacattactgaagactttctttccaccagtggatttttcaccattgctgatggagagagtgaagctagctttgatgttcatttgctaccagatgaggtacctgagatagaggaagattatgtgatccagcttgtttctgtagagggaggagccgaactggatctggagaagagtatcacatggttctctgtttatgcaaatgatgacccacatggagtatttgccctgtattcggatcgccagtcaatacttattgggcagaaccttattagatccatccaaattaacataacccggcttgctggaacatttggagatgtggctgttgggcttcgaatatcatcggatcataaagaacagccgattgttaccgaaaatgcagagaggcagctggtggtcaaagatggtgccacatataaagtggacgtggtgccaataaagaatcaggtcttcctatcactgggctctaatttcactttgcaactggtgactgtgatgcttgtcggtggacgtttctatggaatgccaacaattcttcaggaagcaaaatctgctgtccttccagtctctgagaaagctgccaattctcaggtcggatttgaatccactgcttttcaactcatgaacatcactgctggcacaagccacgttatgatttctaggagaggcacatatggagctctctcggttgcctggaccactggatatgctcctgggttagaaattcctgaattcattgttgttggcaacatgaccccaacactggggagcctttcattttcccacggtgaacaaaggaaaggagttttcctgtggacgtttcctagccctggttggccagaggcctttgttcttcacctatcaggagtgcagagcagtgctcctggcggagctcaactccgatcaggtttcattgttgctgaaattgaaccaatgggcgtcttccaattttccactagctcaagaaatatcatagtgtcagaagatacacagatgatcagattacatgtacaaagactatttgggttccacagcgatcttattaaagtttcttatcagaccactgcaggaagcgccaagccactggaagattttgagcctgttcagaatggggaactgttttttcaaaaattccaaactgaggttgattttgaaataaccattattaatgatcagctttctgagatagaagaatttttttacattaaccttacttcagtagaaattaggggattacaaaagtttgatgttaattggagcccacgcctgaatctagatttcagtgttgcagtgattacaatattggataatgatgacctggcaggaatggatatttccttccccgagacaactgtggctgtagcagttgacacaactctcattcctgtagaaactgaatccaccacatacctcagcacaagcaagacgactaccattctgcagccaaccaacgtggttgccattgttactgaggcaactggtgtatctgccatccctgagaaacttgtcacccttcatggcacacctgctgtgtctgaaaagcctgatgtggccactgtaactgccaatgtttccattcatggaacattcagccttgggccatccattgtttatattgaagaggagatgaagaatggcacattcaacactgcagaagttcttatccgaagaactggtgggtttactggcaatgtcagcataacagttaaaactttcggtgaaagatgtgctcagatggaaccaaatgcattgccctttcgtggtatctatgggatttccaacctaacatgggcagttgaagaagaagactttgaagaacaaactcttacccttatattcctagatggagaaagagaacgtaaagtatcagttcaaattttggatgatgatgagcctgaggggcaggaattcttctacgtgtttctcacaaaccctcaagggggagcacagattgtggaggagaaggatgatactggatttgcagcttttgccatggttattattacagggagtgaccttcacaatggcatcataggattcagtgaggagtcccagagtggactagaactcagggaaggagctgttatgagaagattgcaccttattgtcacaagacagccaaacagggcctttgaagatgtcaaggtcttttggcgagtcacacttaacaaaacagtcgtcgtgctccagaaggatggggtaaacctggtggaggaacttcagtctgtgtcagggaccacaacctgtacaatgggtcaaacaaaatgctttatcagcattgaactcaaaccagaaaagagaaatgctactgagcccattatcaaaagtttcagttaggtaccacaggttgaagtgtatttttttgtggaactatatgaagctactgctggagcagcaataaacaacagtgccagattcgcacagattaaaatcttagaaagtgatgaatctcaaagccttgtgtatttttctgtgggttctcggctggcagtggctcacaagaaggccactttaatcagtctgcaggtggccagagattctgggacaggactaatgatgtctgttaactttagtacccaggagttgaggagtgctgaaacaattggtcgtaccatcatatctccagctatttctggaaaggattttgtgataactgaaggcacattggtctttgaacctggccagagaagcactgtattggatgtcatcctaacgccagagacaggatctttaaattcatttcctaaacgcttccagattgtcctttttgacccaaaaggtggtgccagaattgataaagtgtatgggactgccaacatcactcttgtctcagatgcagattcgcaggccatttgggggcttgcagatcagctacatcagcctgtgaatgatgatattctcaacagagtgctccataccatcagcatgaaagtggccacagaaaacacagatgaacaactcagtgccatgatgcatttaatagaaaagataactactgaaggaaaaattcaagctttcagtgttgccagccgaactcttttctatgagattctttgttctcttattaacccaaagcgcaaggacactaggggattcagtcactttgctgaagtgactgagaattttgccttttctctgctgactaatgttacttgcggctctcctggtgaaaaaagcaaaaccatccttgatagttgcccatatttgtcaatattggctcttcactggtatcctcagcaaatcaatggacacaagtttgaaggaaaggaaggagattacattcgaattccagagaggctactggatgtccaggatgcagaaataatggctgggaaaagtacatgtaaattagtccagtttacagagtatagcagccaacagtggtttataagtggaaacaatcttcctaccctaaaaaataaggtattatctttgagtgtgaaaggtcagagttcacaactcctgactaatgacaatgaggttctctacaggatttatgctgctgagcctagaattattcctcagacatctctgtgtctcctttggaatcaggctgctgcaagctggttgtctgacagtcagttttgcaaagtggttgaggaaactgcagactatgtggaatgtgcctgttcacacatgtctgtgtatgctgtctatgctcggactgacaacttgtcttcatacaatgaagccttcttcacttctggatttatatgtatctcaggtctttgcttggctgttctttcccatatcttctgtgccaggtactccatgtttgcagctaaacttctgactcacatgatggcagccagcttaggtacacagattctgtttctggcgtctgcatacgcaagtccccaactcgctgaggagagctgttcagctatggctgctgtcacacattacctgtatctttgccagtttagctggatgctcattcagtctgtgaatttctggtacgtgctggtgatgaatgatgagcacacagagaggcgatatctgctgtttttccttctgagttggggactaccagcttttgtggtgattctcctcatagttattttgaaaggaatctatcatcagagcatgtcacagatctatggactcattcatggtgacctgtgttttattccaaacgtctatgctgctttgttcactgcagctcttgttcctttgacgtgcctcgtggtggtgttcgtggtgttcatccatgcctaccaggtgaagccacagtggaaagcatatgatgatgtcttcagaggaaggacaaatgctgcagaaattccactgattttatatctctttgctctgatttccgtgacatggctttggggaggactacacatggcctacagacacttctggatgttggttctctttgtcattttcaacagtctgcagggactttatgttttcatggtttatttcattttacacaaccaaatgtgttgccctatgaaggccagttacactgtggaaatgaatgggcatcctggacccagcacagcctttttcacgcccgggagtggaatgcctcctgctggaggggaaatcagcaagtccacccagaatctcatcggtgctatggaggaggtgccacctgactgggagagagcatccttccaacagggcagtcaggccagccctgatttaaagccaagtccacaaaatggagccacgttcccgtcctctggaggatatggccaggggtcactgatagccgatgaggagtcccaggagtttgatgatttaatatttgcattaaaaactggtgctggtctcagtgtcagtgataatgaatctggtcaaggcagccaggaggggggcaccttgactgactcccagatcgtggagctcaggaggatacccatcgccgacactcacctgtagcacctcactaaccattcgactgagcacactttcatatttgtatcagcttttgtgctaaaactctctaagtacatccacctgtgtaataggaacctgtgaattgtactggatgattaatacaaacgtgattgttgtatttggagtataaattactgattgtatgtgacctgaaaattcactgctataagaaaggtggagtcagtttgtatcagttaataggatgttcatattccaaggatattagttgtttttttaatcatcctatatggctaacattgtttaatgaaagtaataatcaataaa

SEQ ID NO: 666 - DNA, 631 bp, Homo sapiens
  source 1..631: mol_type = unassigned DNA
ggagaagagtatcacatggttctctgtttatgcaaatgatgacccacatggagtatttgccctgtattcggatcgccagtcaatacttattgggcagaaccttattagatccatccaaattaacataacccggcttgctggaacatttggagatgtggctgttgggcttcgaatatcatcggatcataaagaacagccgattgttaccgaaaatgcagagaggcagctggtggtcaaagatggtgccacatataaagtggacgtggtgccaataaagaatcaggtcttcctatcactgggctctaatttcactttgcaactggtgactgtgatgcttgtcggtggacgtttctatggaatgccaacaattcttcaggaagcaaaatctgctgtccttccagtctctgagaaagctgccaattctcagatcaggtttcattgttgctgaaattgaaccaatgggcgtcttccaattttccactagctcaagaaatatcatagtgtcagaagatacacagatgatcagattacatgtacaaagactatttgggttccacagcgatcttattaaagtttcttatcagaccactgcaggaagcgccaagccactggaagattttgagcctgttca

SEQ ID NO: 667 - DNA, 698 bp, Homo sapiens
  source 1..698: mol_type = unassigned DNA
gggcagaaccttattagatccatccaaattaacataacccggcttgctggaacatttggagatgtggctgttgggcttcgaatatcatcggatcataaagaacagccgattgttaccgaaaatgcagagaggcagctggtggtcaaagatggtgccacatataaagtggacgtggtgccaataaagaatcaggttgtaggttgccagagccttccatggtagctcagggctcaaggcagggatcaaccctggacaggactccatcccatcgcagggcacagtcacactcacacccacactcactcagactggaatcattgacacatgctgattcagcctcacgtgcacatctttggaatgtgggggagactggaacacttggagagacccatgcagatatggggagaatgtgcagactccacacggacagttgccctggctggcaattgatttttttctcatcaacattatatgaaacagcattgagtgaaactgtgtgatttgaagacctgttgtagttccttgggaaactgactcaatgtcatgaccttactttatcaatttctaacctgcatttcctgtatccgacagctctcaaggctaaacagtacaaaaatggaaaaagagaagtggattaagttaaccagagtatcattgtatcaagtctcacttacaaattagaaaaagtttaaaaaata

SEQ ID NO: 668 - DNA, 596 bp, Homo sapiens
  source 1..596: mol_type = unassigned DNA
aaattttagttctacaaatgaggttctggaaagacccatgaacaagtcatattaaatgccatttaacatattttgctttcatttaaccataattatgcttatctttttttggatgttgttcattcaaaagataacgttttgattaaaaaaagaaaaagctatcaactataacctaaataataaagtaaaataaattttaaagtctgagatgttatttcttaagcacttctctttaattcagtatgagacaaggatatatattgtataaaccaagggaaagtttacgtttaacccattcctcagaaaacaggaaggtttagagagaaataaaatactctaagcatgattttccctcaggtcggatttgaatccactgcttttcaactcatgaacatcactgctggcacaagccacgttatgatttctaggagaggcacatatggagctctctcggttgcctggaccactggatatgctcctgggttagaaattcctgaattcattgttgttggcaacatgaccccaacactggggagcctttcattttcccacggtgaacaaaggaaaggagttttcctgtggacgtttcctagccc

SEQ ID NO: 669 - DNA, 584 bp, Homo sapiens
  source 1..584: mol_type = unassigned DNA
agtaatcagcgagactctgtgggcgtaggaccctccgagccaggtgcgggatataatctcgtggtgtgccgttttttaagccggtccgaaaagcgcaatatttgggtgggagtgacccgattttccaggagttgaggagtgctgaaacaattggtcgtaccatcatatctccagctatttctggaaaggattttgtgataactgaaggcacattggtctttgaacctggccagagaagcactgtattggatgtcatcctaacgccagagacaggatctttaaattcatttcctaaacgcttccagattgtcctttttgacccaaaaggtggtgccagaattgataaagtgtatgggactgccaacatcactcttgtctcagatgcagattcgcaggccatttgggggcttgcagatcagctacatcagcctgtgaatgatgatattctcaacagagtgctccataccatcagcatgaaagtggccacagaaaacacagatgaacaactcagtgccatgatgcatttaatagaaaagataactactgaaggaaaaattcaagctttcagtgttgccagccgaact

SEQ ID NO: 670 - DNA, 2433 bp, Homo sapiens
  source 1..2433: mol_type = unassigned DNA
agatgaacaactcagtgccatgatgcatttaatagaaaagataactactgaaggaaaaattcaagctttcagtgttgccagccgaactcttttctatgagattctttgttctcttattaacccaaagcgcaaggacactaggggattcagtcactttgctgaagtgactgagaattttgccttttctctgctgactaatgttacttgcggctctcctggtgaaaaatcaccagcatgttaaaatcacaaggttgtcttagatgtgaaccatctaccttgctgtgcatgttgagtcccatatctatgccttcaagggcccagtgaaaactcaagagcttataagatgcacagaaagagtggccttttctgttttgttttgttgaatgctgtattcactgggcctagaacaatgtctgaagcaaaaccatccttgatagttgcccatatttgtcaatattggctcttcactggtatcctcagcaaatcaatggacacaagtttgaaggaaaggaaggagattacattcgaattccagagaggctactggatgtccaggatgcagaaataatggctgggaaaagtacatgtaaattagtccagtttacagagtatagcagccaacagtggtttataagtggaaacaatcttcctaccctaaaaaataaggtattatctttgagtgtgaaaggtcagagttcacaactcctgactaatgacaatgaggttctctacaggatttatgctgctgagcctagaattattcctcagacatctctgtgtctcctttggaatcaggctgctgcaagctggttgtctgacagtcagttttgcaaagtggttgaggaaactgcagactatgtggaatgtgcctgttcacacatgtctgtgtatgctgtctatgctcggactgacaacttgtcttcatacaatgaagccttcttcacttctggatttatatgtatctcaggtctttgcttggctgttctttcccatatcttctgtgccaggtactccatgtttgcagctaaacttctgactcacatgatggcagccagcttaggtacacagattctgtttctggcgtctgcatacgcaagtccccaactcgctgaggagagctgttcagctatggctgctgtcacacattacctgtatctttgccagtttagctggatgctcattcagtctgtgaatttctggtacgtgctggtgatgaatgatgagcacacagagaggcgatatctgctgtttttccttctgagttggggactaccagcttttgtggtgattctcctcatagttattttgaaaggaatctatcatcagagcatgtcacagatctatggactcattcatggtgacctgtgttttattccaaacgtctatgctgctttgttcactgcagctcttgttcctttgacgtgcctcgtggtggtgttcgtggtgttcatccatgcctaccaggtgaagccacagtggaaagcatatgatgatgtcttcagaggaaggacaaatgctgcagaaattccactgattttatatctctttgctctgatttccgtgacatggctttggggaggactacacatggcctacagacacttctggatgttggttctctttgtcattttcaacagtctgcagggactttatgttttcatggtttatttcattttacacaaccaaatgtgttgccctatgaaggccagttacactgtggaaatgaatgggcatcctggacccagcacagcctttttcacgcccgggagtggaatgcctcctgctggaggggaaatcagcaagtccacccagaatctcatcggtgctatggaggaggtgccacctgactgggagagagcatccttccaacagggcagtcaggccagccctgatttaaagccaagtccacaaaatggagccacgttcccgtcctctggaggatatggccaggggtcactgatagccgatgaggagtcccaggagtttgatgatttaatatttgcattaaaaactggtgctggtctcagtgtcagtgataatgaatctggtcaaggcagccaggaggggggcaccttgactgactcccagatcgtggagctcaggaggatacccatcgccgacactcacctgtagcacctcactaaccattcgactgagcacactttcatatttgtatcagcttttgtgctaaaactctctaagtacatccacctgtgtaataggaacctgtgaattgtactggatgattaatacaaacgtgattgttgtatttggagtataaattactgattgtatgtgacctgaaaattcactgctataagaaaggtggagtcagtttgtatcagttaataggatgttcatattccaaggatattagttgtttttttaatcatcctatatggctaacattgtttaatgaaagtaataatcaat

SEQ ID NO: 671 - DNA, 559 bp, Homo sapiens
  source 1..559: mol_type = unassigned DNA
cttatcagaaggtaatggagtaagtggcttcacaccaatgcttaaacgataaagatgtggtcctgtgtccggaattggtgggttcttggtctcactgacttcaagaatgaagccgtggaccctcgcagtgagtgttacagttcttaaaggcggcgtgtctggagtttgttccttctgaggttcggatgtgttcagagtttcttccttctgataactactgaaggaaaaattcaagctttcagtgttgccagccgaactcttttctatgagattctttgttctcttattaacccaaagcgcaaggacactaggggattcagtcactttgctgaagtgactgagaattttgccttttctctgctgactaatgttacttgcggctctcctggtgaaaaaagcaaaaccatccttgatagttgcccatatttgtcaatattggctcttcactggtatcctcagcaaatcaatggacacaagtttgaaggaaaggaaggagattacattcgaattccagagaggctactggatgtccaggatgcagaaataatggctgggaaaa

SEQ ID NO: 672 - DNA, 1522 bp, Homo sapiens
  source 1..1522: mol_type = unassigned DNA
tatacattgtttgcaaagtaaatgaaacaggttaacttcctggatgcttacttttagcagaaatatatcagatagcaaacttgctgacagatgaatcacagctttgcccacctgtaatgaggatacactgctggatcccagattctgtttctggcgtctgcatacgcaagtccccaactcgctgaggagagctgttcagctatggctgctgtcacacattacctgtatctttgccagtttagctggatgctcattcagtctgtgaatttctggtacgtgctggtgatgaatgatgagcacacagagaggcgatatctgctgtttttccttctgagttggggactaccagcttttgtggtgattctcctcatagttattttgaaaggaatctatcatcagagcatgtcacagatctatggactcattcatggtgacctgtgttttattccaaacgtctatgctgctttgttcactgcagctcttgttcctttgacgtgcctcgtggtggtgttcgtggtgttcatccatgcctaccaggtgaagccacagtggaaagcatatgatgatgtcttcagaggaaggacaaatgctgcagaaattccactgattttatatctctttgctctgatttccgtgacatggctttggggaggactacacatggcctacagacacttctggatgttggttctctttgtcattttcaacagtctgcagggactttatgttttcatggtttatttcattttacacaaccaaatgtgttgccctatgaaggccagttacactgtggaaatgaatgggcatcctggacccagcacagcctttttcacgcccgggagtggaatgcctcctgctggaggggaaatcagcaagtccacccagaatctcatcggtgctatggaggaggtgccacctgactgggagagagcatccttccaacagggcagtcaggccagccctgatttaaagccaagtccacaaaatggagccacgttcccgtcctctggaggatatggccaggggtcactgatagccgatgaggagtcccaggagtttgatgatttaatatttgcattaaaaactggtgctggtctcagtgtcagtgataatgaatctggtcaaggcagccaggaggggggcaccttgactgactcccagatcgtggagctcaggaggatacccatcgccgacactcacctgtagcacctcactaaccattcgactgagcacactttcatatttgtatcagcttttgtgctaaaactctctaagtacatccacctgtgtaataggaacctgtgaattgtactggatgattaatacaaacgtgattgttgtatttggagtataaattactgattgtatgtgacctgaaaattcactgctataagaaaggtggagtcagtttgtatcagttaataggatgttcatattccaaggatattagttgtttttttaatcatcctatatggctaacattgtttaatgaaagtaataatcaataaagcaatagaatcta

SEQ ID NO: 673 - DNA, 893 bp, Homo sapiens
  source 1..893: mol_type = unassigned DNA
gccttgcaggttgatctcagactgctgtgctagcaatcagcgagactccatgggtgtaggaccctccgagccaggtgcgggatataatcttgtggtgcgtcgtgttttaagccggtcggaaaagcgcagtattcgggtgggagtggcccgattttccagattctgtttctggcgtctgcatacgcaagtccccaactcgctgaggagagctgttcagctatggctgctgtcacacattacctgtatctttgccagtttagctggatgctcattcagtctgtgaatttctggtacgtgctggtgatgaatgatgagcacacagagaggcgatatctgctgtttttccttctgagttggggactaccagcttttgtggtgattctcctcatagttattttgaaaggaatctatcatcagagcatgtcacagatctatggactcattcatggtgacctgtgttttattccaaacgtctatgctgctttgttcactgcagctcttgttcctttgacgtgcctcgtggtggtgttcgtggtgttcatccatgcctaccaggtgaagccacagtggaaagcatatgatgatgtcttcagaggaaggacaaatgctgcagaaattccactgattttatatctctttgctctgatttccgtgacatggctttggggaggactacacatggcctacagacacttctggatgttggttctctttgtcattttcaacagtctgcaggtgctggtctcagtgtcagtgataatgaatctggtcaaggcagccaggaggggggcaccttgactgactcccagatcgtggagctcaggaggatacccatcgccgacactcacctgtagcacctcactaaccattcgactgagcacactttcatattt

SEQ ID NO: 674 - DNA, 564 bp, Homo sapiens
  source 1..564: mol_type = unassigned DNA
tgtctggcactccctagtgagatgaacccggtacctcagatggaaatgcagaaatcacctggcttctgcgtcactcaggctgggagctgtagaccggagctgttcctattcggccatattggctcctccccccagattctgtttctggcgtctgcatacgcaagtccccaactcgctgaggagagctgttcagctatggctgctgtcacacattacctgtatctttgccagtttagctggatgctcattcagtctgtgaatttctggtacgtgctggtgatgaatgatgagcacacagagaggcgatatctgctgtttttccttctgagttggggactaccagcttttgtggtgattctcctcatagttattttgaaaggaatctatcatcagagcatgtcacagatctatggactcattcatggtgacctgtgttttattccaaacgtctatgctgctttgttcactgcagctcttgttcctttgacgtgcctcgtggtggtgttcgtggtgttcatccatgcctaccaggtgaagccacagtggaaagcatatgatgatgtc

SEQ ID NO: 675 - DNA, 500 bp, Homo sapiens
  source 1..500: mol_type = unassigned DNA
gcaggcagatccgacagaatgtcgtgtatggatggagaaagagaatgaaacagcagtttaagatgactgattctgtttctggcgtctgcatacgcaagtccccaactcgctgaggagagctgttcagctatggctgctgtcacacattacctgtatctttgccagtttagctggatgctcattcagtctgtgaatttctggtacgtgctggtgatgaatgatgagcacacagagaggcgatatctgctgtttttccttctgagttggggactaccagcttttgtggtgattctcctcatagttattttgaaaggaatctatcatcagagcatgtcacagatctatggactcattcatggtgacctgtgttttattccaaacgtctatgctgctttgttcactgcagctcttgttcctttgacgtgcctcgtggtggtgttcgtggtgttcatccatgcctaccaggtgaagccacagtggaaagcatatgatgatgtctt

SEQ ID NO: 676 - DNA, 904 bp, Homo sapiens
  source 1..904: mol_type = unassigned DNA
agaaccaacaagagatcacctgcagattggagactgaagaagctggtggtgtatttcaaaagcctgagaggcagaggtgaatggtgtagatttcagttttagttcgaaagcctgaaaaccgggaatgctaagggcagaagaaggaatgttccagctcaagcagtcaagcagaagaaagaaattccactgattttatatctctttgctctgatttccgtgacatggctttggggaggactacacatggcctacagacacttctggatgttggttctctttgtcattttcaacagtctgcaggtgccacctgactgggagagagcatccttccaacagggcagtcaggccagccctgatttaaagccaagtccacaaaatggagccacgttcccgtcctctggaggatatggccaggggtcactgatagccgatgaggagtcccaggagtttgatgatttaatatttgcattaaaaactggtgctggtctcagtgtcagtgataatgaatctggtcaaggcagccaggaggggggcaccttgactgactcccagatcgtggagctcaggaggatacccatcgccgacactcacctgtagcacctcactaaccattcgactgagcacactttcatatttgtatcagcttttgtgctaaaactctctaagtacatccacctgtgtaataggaacctgtgaattgtactggatgattaatacaaacgtgattgttgtatttggagtataaattactgattgtatgtgacctgaaaattcactgctataagaaaggtggagtcagtttgtatcagttaataggatgttcatattccaaggatattagttgtttttttaatcatcctatatggctaacattgtttaatgaaagtaataatcaataaagcaa

SEQ ID NO: 677 - DNA, 1101 bp, Homo sapiens
  source 1..1101: mol_type = unassigned DNA
agaaccaacaagagatcacctgcagattggagactgaagaagctggtggtgtatttcaaaagcctgagaggcagaggtgaatggtgtagatttcagttttagttcgaaagcctgaaaaccgggaatgctaagggcagaagaaggaatgttccagctcaagcagtcaagcagaagaaagaaattccactgattttatatctctttgctctgatttccgtgacatggctttggggaggactacacatggcctacagacacttctggatgttggttctctttgtcattttcaacagtctgcagggactttatgttttcatggtttatttcattttacacaaccaaatgtgttgccctatgaaggccagttacactgtggaaatgaatgggcatcctggacccagcacagcctttttcacgcccgggagtggaatgcctcctgctggaggggaaatcagcaagtccacccagaatctcatcggtgctatggaggaggtgccacctgactgggagagagcatccttccaacagggcagtcaggccagccctgatttaaagccaagtccacaaaatggagccacgttcccgtcctctggaggatatggccaggggtcactgatagccgatgaggagtcccaggagtttgatgatttaatatttgcattaaaaactggtgctggtctcagtgtcagtgataatgaatctggtcaaggcagccaggaggggggcaccttgactgactcccagatcgtggagctcaggaggatacccatcgccgacactcacctgtagcacctcactaaccattcgactgagcacactttcatatttgtatcagcttttgtgctaaaactctctaagtacatccacctgtgtaataggaacctgtgaattgtactggatgattaatacaaacgtgattgttgtatttggagtataaattactgattgtatgtgacctgaaaattcactgctataagaaaggtggagtcagtttgtatcagttaataggatgttcatattccaaggatattagttgtttttttaatcatcctatatggctaacattgtttaatgaaagtaataatcaataaagcaatagaa

SEQ ID NO: 678 - DNA, 1167 bp, Homo sapiens
  source 1..1167: mol_type = unassigned DNA
aaccaacaagagatcacctgcagattggagactgaagaagctggtggtgtatttcaaaagcctgagaggcagaggtgaatggtgtagatttcagttttagttcgaaagcctgaaaaccgggaatgctaagggcagaagaaggaatgttccagctcaagcagtcaagcagaagaaagaacttcaaacctacaaaggaagaaatagaatgagacaagatgagaagcagcaagaaattccactgattttatatctctttgctctgatttccgtgacatggctttggggaggactacacatggcctacagacacttctggatgttggttctctttgtcattttcaacagtctgcagggactttatgttttcatggtttatttcattttacacaaccaaatgtgttgccctatgaaggccagttacactgtggaaatgaatgggcatcctggacccagcacagcctttttcacgcccgggagtggaatgcctcctgctggaggggaaatcagcaagtccacccagaatctcatcggtgctatggaggaggtgccacctgactgggagagagcatccttccaacagggcagtcaggccagccctgatttaaagccaagtccacaaaatggagccacgttcccgtcctctggaggatatggccaggggtcactgatagccgatgaggagtcccaggagtttgatgatttaatatttgcattaaaaactggtgctggtctcagtgtcagtgataatgaatctggtcaaggcagccaggaggggggcaccttgactgactcccagatcgtggagctcaggaggatacccatcgccgacactcacctgtagcacctcactaaccattcgactgagcacactttcatatttgtatcagcttttgtgctaaaactctctaagtacatccacctgtgtaataggaacctgtgaattgtactggatgattaatacaaacgtgattgttgtatttggagtataaattactgattgtatgtgacctgaaaattcactgctataagaaaggtggagtcagtttgtatcagttaataggatgttcatattccaaggatattagttgtttttttaatcatcctatatggctaacattgtttaatgaaagtaataatcaataaagcaatagaatctatttggtatca

SEQ ID NO: 679 - DNA, 1885 bp, Homo sapiens
  source 1..1885: mol_type = unassigned DNA
atccgcgctgtcccttccgcgggctcttgctgttcttcgccaggaggctttgcactccgggccgcatgggtcctggataaggacctcaagaggttgtagtggcgccccttcgctccggcgtactgtctgaaccctgtgcccaaagagggctgtggcagttcctgcaccaaccgcctggagcccatacctaagccctctgggcacgagggacctcctctcccccgctcccccctccccccatcccaactccagccccaaaggaagcaatgcgcgcgtccgagagcaggagcgcgcgtggctgaggaaagaaagggaaggcaaccgggcagcccaggccccgccccgccgctcccccacccgtgcgcttataaagcacaggaaccagagctggccactcagtggtttcttggtgacactggatagaacagctcaagccttgccacttcgggcttctcactgcagctgggcttggacttcggagttttgccattgccagtgggacgtctgagactttctccttcaagtacttggcagatcactctcttagcagggtctgcgcttcgcagccgggatgaagctggtttccgtcgccctgatgtacctgggttcgctcgccttcctaggcgctgacaccgctcggttggatgtcgcgtcggagtttcgaaagaagtggaataagtgggctctgagtcgtgggaagagggaactgcggatgtccagcagctaccccaccgggctcgctgacgtgaaggccgggcctgcccagacccttattcggccccaggacatgaagggtgcctctcgaagccccgaagacagcagtccggatgccgcccgcatccgagtcaagcgctaccgccagagcatgaacaacttccagggcctccggagctttggctgccgcttcgggacgtgcacggtgcagaagctggcacaccagatctaccagttcacagataaggacaaggacaacgtcgcccccaggagcaagatcagcccccagggctacggccgccggcgccggcgctccctgcccgaggccggcccgggtcggactctggtgtcttctaagccacaagcacacggggctccagcccccccgagtggaagtgctccccactttctttaggatttaggcgcccatggtacaaggaatagtcgcgcaagcatcccgctggtgcctcccgggacgaaggacttcccgagcggtgtggggaccgggctctgacagccctgcggagaccctgagtccgggaggcaccgtccggcggcgagctctggctttgcaagggcccctccttctgggggcttcgcttccttagccttgctcaggtgcaagtgccccagggggcggggtgcagaagaatccgagtgtttgccaggcttaaggagaggagaaactgagaaatgaatgctgagacccccggagcaggggtctgagccacagccgtgctcgcccacaaactgatttctcacggcgtgtcaccccaccagggcgcaagcctcactattacttgaactttccaaaacctaaagaggaaaagtgcaatgcgtgttgtacatacagaggtaactatcaatatttaagtttgttgctgtcaagattttttttgtaacttcaaatatagagatatttttgtacgttatatattgtattaagggcattttaaaagcaattatattgtcctcccctattttaagacgtgaatgtctcagcgaggtgtaaagttgttcgccgcgtggaatgtgagtgtgtttgtgtgcatgaaagagaaagactgattacctcctgtgtggaagaaggaaacaccgagtctctgtataatctatttacataaaatgggtgatatgcgaacagcaaaccaataaactgtctcaatgctga

SEQ ID NO: 680 - DNA, 1640 bp, Homo sapiens
  source 1..1640: mol_type = unassigned DNA
actcagtggtttcttggtgacactggatagaacagctcaagccttgccacttcgggcttctcactgcagctgggcttggacttcggagttttgccattgccagtgggacgtctgagactttctccttcaagtacttggcagatcactctcttagcagggtctgcgcttcgcagccgggatgaagctggtttccgtcgccctgatgtacctgggttcgctcgccttcctaggcgctgacaccgctcggttggatgtcgcgtcggagtttcgaaagaagtgagtccgggcagcgccttcccccttgctggtacctggcaggcaaggggaactgaccgttggtcccgaaggtctagaagtgaatgggagcagggacaggcctgggcgtcacctgaacgcacgcgaatcgggtctgcttgtgttttccaggtggaataagtgggctctgagtcgtgggaagagggaactgcggatgtccagcagctaccccaccgggctcgctgacgtgaaggccgggcctgcccagacccttattcggccccaggacatgaagggtgcctctcgaagccccgaagacagcagtccggatgccgcccgcatccgagtcaagcgctaccgccagagcatgaacaacttccagggcctccggagctttggctgccgcttcgggacgtgcacggtgcagaagctggcacaccagatctaccagttcacagataaggacaaggacaacgtcgcccccaggagcaagatcagcccccagggctacggccgccggcgccggcgctccctgcccgaggccggcccgggtcggactctggtgtcttctaagccacaagcacacggggctccagcccccccgagtggaagtgctccccactttctttaggatttaggcgcccatggtacaaggaatagtcgcgcaagcatcccgctggtgcctcccgggacgaaggacttcccgagcggtgtggggaccgggctctgacagccctgcggagaccctgagtccgggaggcaccgtccggcggcgagctctggctttgcaagggcccctccttctgggggcttcgcttccttagccttgctcaggtgcaagtgccccagggggcggggtgcagaagaatccgagtgtttgccaggcttaaggagaggagaaactgagaaatgaatgctgagacccccggagcaggggtctgagccacagccgtgctcgcccacaaactgatttctcacggcgtgtcaccccaccagggcgcaagcctcactattacttgaactttccaaaacctaaagaggaaaagtgcaatgcgtgttgtacatacagaggtaactatcaatatttaagtttgttgctgtcaagattttttttgtaacttcaaatatagagatatttttgtacgttatatattgtattaagggcattttaaaagcaattatattgtcctcccctattttaagacgtgaatgtctcagcgaggtgtaaagttgttcgccgcgtggaatgtgagtgtgtttgtgtgcatgaaagagaaagactgattacctcctgtgtggaagaaggaaacaccgagtctctgtataatctatttacataaaatgggtgatatgcgaacagcaaaccaataaactgtctcaatgct

SEQ ID NO: 681 - DNA, 1839 bp, Homo sapiens
  source 1..1839: mol_type = unassigned DNA
ctcagtggtttcttggtgacactggatagaacagctcaagccttgccacttcgggcttctcactgcagctgggcttggacttcggagttttgccattgccagtgggacgtctgagactttctccttcaagtacttggcagatcactctcttagcagggtctgcgcttcgcagccgggatgaagctggtttccgtcgccctgatgtacctgggttcgctcgccttcctaggcgctgacaccgctcggttggatgtcgcgtcggagtttcgaaagaagtgagtccgggcagcgccttcccccttgctggtacctggcaggcaaggggaactgaccgttggtcccgaaggtctagaagtgaatgggagcagggacaggcctgggcgtcacctgaacgcacgcgaatcgggtctgcttgtgttttccaggtggaataagtgggctctgagtcgtgggaagagggaactgcggatgtccagcagctaccccaccgggctcgctgacgtgaaggccgggcctgcccagacccttattcggccccaggacatgaagggtgcctctcgaagccccgaagacaggtaactacgccctgtgctgtccagggacgggagggaaggaaggtgtgcgggaggagttctctgtctccactcccctggcccgggggatcgtcggggctggaccgcagctcagatggcgcgagcagtttccagctccctctggctctagaatggctcccgttcccggtgttggggccaaagctctgcttgatggggtctcaagttgcctttcttccccctccccccgcccgcagcagtccggatgccgcccgcatccgagtcaagcgctaccgccagagcatgaacaacttccagggcctccggagctttggctgccgcttcgggacgtgcacggtgcagaagctggcacaccagatctaccagttcacagataaggacaaggacaacgtcgcccccaggagcaagatcagcccccagggctacggccgccggcgccggcgctccctgcccgaggccggcccgggtcggactctggtgtcttctaagccacaagcacacggggctccagcccccccgagtggaagtgctccccactttctttaggatttaggcgcccatggtacaaggaatagtcgcgcaagcatcccgctggtgcctcccgggacgaaggacttcccgagcggtgtggggaccgggctctgacagccctgcggagaccctgagtccgggaggcaccgtccggcggcgagctctggctttgcaagggcccctccttctgggggcttcgcttccttagccttgctcaggtgcaagtgccccagggggcggggtgcagaagaatccgagtgtttgccaggcttaaggagaggagaaactgagaaatgaatgctgagacccccggagcaggggtctgagccacagccgtgctcgcccacaaactgatttctcacggcgtgtcaccccaccagggcgcaagcctcactattacttgaactttccaaaacctaaagaggaaaagtgcaatgcgtgttgtacatacagaggtaactatcaatatttaagtttgttgctgtcaagattttttttgtaacttcaaatatagagatatttttgtacgttatatattgtattaagggcattttaaaagcaattatattgtcctcccctattttaagacgtgaatgtctcagcgaggtgtaaagttgttcgccgcgtggaatgtgagtgtgtttgtgtgcatgaaagagaaagactgattacctcctgtgtggaagaaggaaacaccgagtctctgtataatctatttacataaaatgggtgatat

SEQ ID NO: 682 - DNA, 584 bp, Homo sapiens
  source 1..584: mol_type = unassigned DNA
agtggtttcttggtgacactggatagaacagctcaagccttgccacttcgggcttctcactgcagctgggcttggacttcggagttttgccattgccagtgggacgtctgagactttctccttcaagtacttggcagatcactctcttagcagggtctgcgcttcgcagccgggatgaagctggtttccgtcgccctgatgtacctgggttcgctcgccttcctaggcgctgacaccgctcggttggatgtcgcgtcggagtttcgaaagaagtggaataagtgggctctgagtcgtgggaagagggaactgcggatgtccagcagctaccccaccgggctcgctgacgtgaaggccgggcctgcccagacccttattcggccccaggacatgaagggtgcctctcgaagccccgaagacaggtaactacgccctgtgctgtccagggacgggagggaaggaaggtgtgcgggaggagttctctgtctccactcccctggcccgggggatcgtcggggctggaccgcagctcagatggcgcgagcagtttccagctccctctggctctagaatggctcccgttc

SEQ ID NO: 683 - DNA, 1889 bp, Homo sapiens
  source 1..1889: mol_type = unassigned DNA
tcttggtgacactggatagaacagctcaagccttgccacttcgggcttctcactgcagctgggcttggacttcggagttttgccattgccagtgggacgtctgagactttctccttcaagtacttggcagatcactctcttagcaggtaggtgccgcagaccctgcgggttaagaggtggggtggggggcagtgcttgccaaggccctaaactgggagcgctgggtgaggggaacaacccactttggagggttctctgagagatagatacaccccatatcctgggcccagctcgtgcacacagctggaggtccagagacccagtcccctctgctccgtcagccaagttccaagaagttgagcagagaccctctgggagcctggcggggtgcagcggcctcccctgcggggcctgtcacccggccggcgcgtgcaaacgcctctggcgcctctctgcgcggagggagataagcgtctgagccagggaaagcgcgggctaaacccgcctcgccggggcccctgcccgccctccgtgccccgcccgggcggtgcagctggcccgggtgctcacgctcgactctctttcttcttttccagggtctgcgcttcgcagccgggatgaagctggtttccgtcgccctgatgtacctgggttcgctcgccttcctaggcgctgacaccgctcggttggatgtcgcgtcggagtttcgaaagaagtggaataagtgggctctgagtcgtgggaagagggaactgcggatgtccagcagctaccccaccgggctcgctgacgtgaaggccgggcctgcccagacccttattcggccccaggacatgaagggtgcctctcgaagccccgaagacagcagtccggatgccgcccgcatccgagtcaagcgctaccgccagagcatgaacaacttccagggcctccggagctttggctgccgcttcgggacgtgcacggtgcagaagctggcacaccagatctaccagttcacagataaggacaaggacaacgtcgcccccaggagcaagatcagcccccagggctacggccgccggcgccggcgctccctgcccgaggccggcccgggtcggactctggtgtcttctaagccacaagcacacggggctccagcccccccgagtggaagtgctccccactttctttaggatttaggcgcccatggtacaaggaatagtcgcgcaagcatcccgctggtgcctcccgggacgaaggacttcccgagcggtgtggggaccgggctctgacagccctgcggagaccctgagtccgggaggcaccgtccggcggcgagctctggctttgcaagggcccctccttctgggggcttcgcttccttagccttgctcaggtgcaagtgccccagggggcggggtgcagaagaatccgagtgtttgccaggcttaaggagaggagaaactgagaaatgaatgctgagacccccggagcaggggtctgagccacagccgtgctcgcccacaaactgatttctcacggcgtgtcaccccaccagggcgcaagcctcactattacttgaactttccaaaacctaaagaggaaaagtgcaatgcgtgttgtacatacagaggtaactatcaatatttaagtttgttgctgtcaagattttttttgtaacttcaaatatagagatatttttgtacgttatatattgtattaagggcattttaaaagcaattatattgtcctcccctattttaagacgtgaatgtctcagcgaggtgtaaagttgttcgccgcgtggaatgtgagtgtgtttgtgtgcatgaaagagaaagactgattacctcctgtgtggaagaaggaaacaccgagtctctgtataatctatttacataaaatgg

SEQ ID NO: 684 - DNA, 641 bp, Homo sapiens
  source 1..641: mol_type = unassigned DNA
ggtgacactggatagaacagctcaagccttgccacttcgggcttctcactgcagctgggcttggacttcggagttttgccattgccagtgggacgtctgagactttctccttcaagtacttggcagatcactctcttagcagggtctgcgcttcgcagccgggatgaagctggtttccgtcgccctgatgtacctgggttcgctcgccttcctaggcgctgacaccgctcggttggatgtcgcgtcggagtttcgaaagaagtggaataagtgggctctgagtcgtgggaagagggaactgcggatgtccagcagctaccccaccgggctcgctgacgtgaaggccgggcctgcccagacccttattcggccccaggacatgaagggtgcctctcgaagccccgaagacagttgcctttcttccccctccccccgcccgcagcagtccggatgccgcccgcatccgagtcaagcgctaccgccagagcatgaacaacttccagggcctccggagctttggctgccgcttcgggacgtgcacggtgcagaagctggcacaccagatctaccagttcacagataaggacaaggacaacgtcgcccccaggagcaagatcagcccccagggctacggccgccgg

SEQ ID NO: 685 - DNA, 867 bp, Homo sapiens
  source 1..867: mol_type = unassigned DNA
ggtgacactggatagaacagctcaagccttgccacttcgggcttctcactgcagctgggcttggacttcggagttttgccattgccagtgggacgtctgagactttctccttcaagtacttggcagatcactctcttagcagggtctgcgcttcgcagccgggatgaagctggtttccgtcgccctgatgtacctgggttcgctcgccttcctaggcgctgacaccgctcggttggatgtcgcgtcggagtttcgaaagaagtggaataagtgggctctgagtcgtgggaagagggaactgcggatgtccagcagctaccccaccgggctcgctgacgtgaaggccgggcctgcccagacccttattcggccccaggacatgaagggtgcctctcgaagccccgaagacagcagtccggatgccgcccgcatccgagtcaagcgctaccgccagagcatgaacaacttccagggcctccggagctttggctgccgcttcgggacgtgcacggtgcagaagctggcacaccagatctaccagttcacagataaggacaaggacaacgtcgcccccaggagcaagatcagcccccagggctacggccgccggcgccggcgctccctgcccgaggccggcccgggtcggactctggtgtcttctaagccacaagcacacggggctccagcccccccgagtggaagtgctccccactttctttaggatttaggcaccgtccggcggcgagctctggctttgcaagggcccctccttctgggggcttcgcttccttagccttgctcaggtgcaagtgccccagggggcggggtgcagaagaatccgagtgtttgccaggcttaaggagagga

SEQ ID NO: 686 - DNA, 586 bp, Homo sapiens
  source 1..586: mol_type = unassigned DNA
gtgcacacagctggaggtccagagacccagtcccctctgctccgtcagccaagttccaagaagttgagcagagaccctctgggagcctggcggggtgcagcggcctcccctgcggggcctgtcacccggccggcgcgtgcaaacgcctctggcgcctctctgcgcggagggagataagcgtctgagccagggaaagcgcgggctaaacccgcctcgccggggcccctgcccgccctccgtgccccgcccgggcggtgcagctggcccgggtgctcacgctcgactctctttcttcttttccagggtctgcgcttcgcagccgggatgaagctggtttccgtcgccctgatgtacctgggttcgctcgccttcctaggcgctgacaccgctcggttggatgtcgcgtcggagtttcgaaagaagtggaataagtgggctctgagtcgtgggaagagggaactgcggatgtccagcagctaccccaccgggctcgctgacgtgaaggccgggcctgcccagacccttattcggccccaggacatgaagggtgcctctcgaagccccgaagacaggtaactacgccctg

SEQ ID NO: 687 - DNA, 2896 bp, Homo sapiens
  source 1..2896: mol_type = unassigned DNA
atgagtgtcagaagtgtgaagggtgcctgttctgaatcccagagcctcctctccctctgtgaggctggcaggtgaggaagggtttaacctcactggaaggaatccctggagctagcggctgctgaaggcgtcgaggtgtgggggcacttggacagaacagtcaggcagccgggagctctgccagctttggtgaccttgggccgggctgggagcgctgcggcgggagccggaggactatgagctgccgcgcgttgtccagagcccagcccagccctaccgcgcgcggcccggagctctgttccctggaactttgggcactgcctctgggacccctgccggccagcaggcaggatggtgcttgcctcgtgccccttggtgcccgtctgctgatgtgcccagcctgtgcccgccatgccgccctccatctcagctttccaggccgcctacatcggcatcgaggtgctcatcgccctggtctctgtgcccgggaacgtgctggtgatctgggcggtgaaggtgaaccaggcgctgcgggatgccaccttctgcttcatcgtgtcgctggcggtggctgatgtggccgtgggtgccctggtcatccccctcgccatcctcatcaacattgggccacagacctacttccacacctgcctcatggttgcctgtccggtcctcatcctcacccagagctccatcctggccctgctggcaattgctgtggaccgctacctccgggtcaagatccctctccggtacaagatggtggtgaccccccggagggcggcggtggccatagccggctgctggatcctctccttcgtggtgggactgacccctatgtttggctggaacaatctgagtgcggtggagcgggcctgggcagccaacggcagcatgggggagcccgtgatcaagtgcgagttcgagaaggtcatcagcatggagtacatggtctacttcaacttctttgtgtgggtgctgcccccgcttctcctcatggtcctcatctacctggaggtcttctacctaatccgcaagcagctcaacaagaaggtgtcggcctcctccggcgacccgcagaagtactatgggaaggagctgaagatcgccaagtcgctggccctcatcctcttcctctttgccctcagctggctgcctttgcacatcctcaactgcatcaccctcttctgcccgtcctgccacaagcccagcatccttacctacattgccatcttcctcacgcacggcaactcggccatgaaccccattgtctatgccttccgcatccagaagttccgcgtcaccttccttaagatttggaatgaccatttccgctgccagcctgcacctcccattgacgaggatctcccagaagagaggcctgatgactagaccccgccttccgctcccaccagcccacatccagtggggtctcagtccagtcctcacatgcccgctgtcccaggggtctccctgagcctgccccagctgggctgttggctgggggcatgggggaggctctgaagagatacccacagagtgtggtccctccactaggagttaactaccctacacctctgggccctgcaggaggcctgggagggcaagggtcctacggagggaccaggtgtctagaggcaacagtgttctgagcccccacctgcctgaccatcccatgagcagtccagagcttcagggctgggcaggtcctggggaggctgagactgcagaggagccacctgggctgggagaaggtgcttgggcttctgcggtgaggcaggggagtctgcttgtcttagatgttggtggtgcagccccaggaccaagcttaaggagaggagagcatctgctctgagacggatggaaggagagaggttgaggatgcactggcctgttctgtaggagagactggccagaggcagctaaggggcaggaatcaaggagcctccgttcccacctctgaggactctggaccccaggccataccaggtgctagggtgcctgctctccttgccctgggccagcccaggattgtacgtgggagaggcagaaagggtaggttcagtaatcatttctgatatttgctggagtgctggctccacgccctggggagtgagcttggtgcggtaggtgctggcctcaaacagccacgaggtggtagctctgagccctccttcttgccctgagctttccggggaggagccttggagtgtaattacctgtcatctgggccaccagctccactggcctgcccgttgccgggcctggactgtcctaggtgaccccatctctgctgcttctgggcctgatggagaggagaacactagacatgccaactcgggagcattctgcctgcctgggaacggggtggacgagggagtgtctgtaaggactcagtgttgactgtaggcgcccctggggtgggtttagcaggctgcagcaggcagaggagagtacccccctgagagcatgtgggggaaggccttgctgtcatgtgaatccctcaatacccctagtatctggctgggttttcaggggctttggaagctctgttgcaggtgtccgggggtctaggactttagggatctggggaaggaccaacccatgccctgccaagcctggagcccctgtgttggggggcaaggtgggggagcctggagcccctgtgtgggagggcgaggcgggggagcctggagcccctgtgtgggagggcgaggcgggggatcctggagcccctgtgtcggggggcgagggaggggaggtggccgtcgagttgaccttctgaacatgagtgtcaactccaggacttgcttccaagcccttccctctgttggaaattgggtgtgccctggctcccaagggaggcccatgtgactaataaaaaactgtgaaccct

SEQ ID NO: 688 - DNA, 3407 bp, Homo sapiens
  source 1..3407: mol_type = unassigned DNA
aacatgaggggattggactggatgccttatggcttagcgctgtgctatgaagaggaagaaggaggaaggaaaaggagcgcagagcgggttacactgccaggagatcctgggaagctaggtcacttccctgagcctcagcatccttatctgcaaaatagaaattgctaatagactaaaaggcaattctgaaagatggatgagaaaggaatataatgactcagggtagagcctgcaaaacaatatgggatgagaagatgcagggactggtttcatggagagagcagggttttaggattgggggagggtgccagggctaccgactgctttgggagatcccagagggggcattctgaagtcctgcagaagagatgctgtgccgtgaggggtgaggggtcgctggaggccagaccagggctcccaggagtcctgcattgagaagggagagagtggacacaggaaggatgcgcctctgtccagtcctgaggctgggcgcacacaccaggcccttcgaaaagctcacattttttccagcttttctcacccagtatcacttcctttgttaagaggagggggtgggggaggagacggaggatgaggagggaggggctggcgggtgccgccgccgcccccgccccctcccggtgtgcggagcccgattgtcactcagctcctgcgccgggggcgacagagccgcaggcgcccgagtcgagtcccagccagctaccatccctctggagcttaccggccggccttggcttccccaggaatccctggagctagcggctgctgaaggcgtcgaggtgtgggggcacttggacagaacagtcaggcagccgggagctctgccagctttggtgaccttgggtgcttgcctcgtgccccttggtgcccgtctgctgatgtgcccagcctgtgcccgccatgccgccctccatctcagctttccaggccgcctacatcggcatcgaggtgctcatcgccctggtctctgtgcccgggaacgtgctggtgatctgggcggtgaaggtgaaccaggcgctgcgggatgccaccttctgcttcatcgtgtcgctggcggtggctgatgtggccgtgggtgccctggtcatccccctcgccatcctcatcaacattgggccacagacctacttccacacctgcctcatggttgcctgtccggtcctcatcctcacccagagctccatcctggccctgctggcaattgctgtggaccgctacctccgggtcaagatccctctccggtacaagatggtggtgaccccccggagggcggcggtggccatagccggctgctggatcctctccttcgtggtgggactgacccctatgtttggctggaacaatctgagtgcggtggagcgggcctgggcagccaacggcagcatgggggagcccgtgatcaagtgcgagttcgagaaggtcatcagcatggagtacatggtctacttcaacttctttgtgtgggtgctgcccccgcttctcctcatggtcctcatctacctggaggtcttctacctaatccgcaagcagctcaacaagaaggtgtcggcctcctccggcgacccgcagaagtactatgggaaggagctgaagatcgccaagtcgctggccctcatcctcttcctctttgccctcagctggctgcctttgcacatcctcaactgcatcaccctcttctgcccgtcctgccacaagcccagcatccttacctacattgccatcttcctcacgcacggcaactcggccatgaaccccattgtctatgccttccgcatccagaagttccgcgtcaccttccttaagatttggaatgaccatttccgctgccagcctgcacctcccattgacgaggatctcccagaagagaggcctgatgactagaccccgccttccgctcccaccagcccacatccagtggggtctcagtccagtcctcacatgcccgctgtcccaggggtctccctgagcctgccccagctgggctgttggctgggggcatgggggaggctctgaagagatacccacagagtgtggtccctccactaggagttaactaccctacacctctgggccctgcaggaggcctgggagggcaagggtcctacggagggaccaggtgtctagaggcaacagtgttctgagcccccacctgcctgaccatcccatgagcagtccagagcttcagggctgggcaggtcctggggaggctgagactgcagaggagccacctgggctgggagaaggtgcttgggcttctgcggtgaggcaggggagtctgcttgtcttagatgttggtggtgcagccccaggaccaagcttaaggagaggagagcatctgctctgagacggatggaaggagagaggttgaggatgcactggcctgttctgtaggagagactggccagaggcagctaaggggcaggaatcaaggagcctccgttcccacctctgaggactctggaccccaggccataccaggtgctagggtgcctgctctccttgccctgggccagcccaggattgtacgtgggagaggcagaaagggtaggttcagtaatcatttctgatatttgctggagtgctggctccacgccctggggagtgagcttggtgcggtaggtgctggcctcaaacagccacgaggtggtagctctgagccctccttcttgccctgagctttccggggaggagccttggagtgtaattacctgtcatctgggccaccagctccactggcctgcccgttgccgggcctggactgtcctaggtgaccccatctctgctgcttctgggcctgatggagaggagaacactagacatgccaactcgggagcattctgcctgcctgggaacggggtggacgagggagtgtctgtaaggactcagtgttgactgtaggcgcccctggggtgggtttagcaggctgcagcaggcagaggagagtacccccctgagagcatgtgggggaaggccttgctgtcatgtgaatccctcaatacccctagtatctggctgggttttcaggggctttggaagctctgttgcaggtgtccgggggtctaggactttagggatctggggaaggaccaacccatgccctgccaagcctggagcccctgtgttggggggcaaggtgggggagcctggagcccctgtgtgggagggcgaggcgggggagcctggagcccctgtgtgggagggcgaggcgggggatcctggagcccctgtgtcggggggcgagggaggggaggtggccgtcgagttgaccttctgaacatgagtgtcaactccaggacttgcttccaagcccttccctctgttggaaattgggtgtgccctggctcccaagggaggcccatgtgactaataaaaaactgtgaaccctg

SEQ ID NO: 689 - DNA, 2219 bp, Homo sapiens
  source 1..2219: mol_type = unassigned DNA
cggaggactatgagctgccgcgcgttgtccagagcccagcccagccctaccgcgcgcggcccggagctctgttccctggaactttgggcactgcctctgggacccctgccggccagcaggcaggatggtgcttgcctcgtgccccttggtgcccgtctgctgatgtgcccagcctgtgcccgccatgccgccctccatctcagctttccaggccgcctacatcggcatcgaggtgctcatcgccctggtctctgtgcccgggaacgtgctggtgatctgggcggtgaaggtgaaccaggcgctgcgggatgccaccttctgcttcatcgtgtcgctggcggtggctgatgtggccgtgggtgccctggtcatccccctcgccatcctcatcaacattgggccacagacctacttccacacctgcctcatggttgcctgtccggtcctcatcctcacccagagctccatcctggccctgctggcaattgctgtggaccgctacctccgggtcaagatccctctccggagaataagccaatgcatggcaagcactaaatcttagatcctgaagactcagccctcgagcaaaagacatgcacctccccactcaccgggccctggaagaggagggtgctcctcttagaggcccctggaggccaggcgtgcctcagaggggcctttcgaggcagctgggaggcagatcctcacactctgccctcctctcccccaggtacaagatggtggtgaccccccggagggcggcggtggccatagccggctgctggatcctctccttcgtggtgggactgacccctatgtttggctggaacaatctgagtgcggtggagcgggcctgggcagccaacggcagcatgggggagcccgtgatcaagtgcgagttcgagaaggtcatcagcatggagtacatggtctacttcaacttctttgtgtgggtgctgcccccgcttctcctcatggtcctcatctacctggaggtcttctacctaatccgcaagcagctcaacaagaaggtgtcggcctcctccggcgacccgcagaagtactatgggaaggagctgaagatcgccaagtcgctggccctcatcctcttcctctttgccctcagctggctgcctttgcacatcctcaactgcatcaccctcttctgcccgtcctgccacaagcccagcatccttacctacattgccatcttcctcacgcacggcaactcggccatgaaccccattgtctatgccttccgcatccagaagttccgcgtcaccttccttaagatttggaatgaccatttccgctgccagcctgcacctcccattgacgaggatctcccagaagagaggcctgatgactagaccccgccttccgctcccaccagcccacatccagtggggtctcagtccagtcctcacatgcccgctgtcccaggggtctccctgagcctgccccagctgggctgttggctgggggcatgggggaggctctgaagagatacccacagagtgtggtccctccactaggagttaactaccctacacctctgggccctgcaggaggcctgggagggcaagggtcctacggagggaccaggtgtctagaggcaacagtgttctgagcccccacctgcctgaccatcccatgagcagtccagagcttcagggctgggcaggtcctggggaggctgagactgcagaggagccacctgggctgggagaaggtgcttgggcttctgcggtgaggcaggggagtctgcttgtcttagatgttggtggtgcagccccaggaccaagcttaaggagaggagagcatctgctctgagacggatggaaggagagaggttgaggatgcactggcctgttctgtaggagagactggccagaggcagctaaggggcaggaatcaaggagcctccgttcccacctctgaggactctggaccccaggccataccaggtgctagggtgcctgctctccttgccctgggccagcccaggattgtacgtgggagaggcagaaagggtaggttcagtaatcatttctgatatttgctggagtgctggctccacgccctggggagtgagcttggtgcggtaggtgctggcctcaaacagccacgaggtggtagctctgagccctccttcttgccctgagctttccggggaggagccttggagtgtaattacctgtcatctgggccaccagctc

SEQ ID NO: 690 - DNA, 751 bp, Homo sapiens
  source 1..751: mol_type = unassigned DNA
gctgcttctccagccagaccacggcaggcttcccaaaggcacgctttggctctctcattcaccaggagaataagccaatgcatggcaagcactaaatcttagatcctgaagactcagccctcgagcaaaagacatgcacctccccactcaccgggccctggaagaggagggtgctcctcttagaggcccctggaggccaggcgtgcctcagaggggcctttcgaggcagctgggaggcagatcctcacactctgccctcctctcccccaggtacaagatggtggtgaccccccggagggcggcggtggccatagccggctgctggatcctctccttcgtggtgggactgacccctatgtttggctggaacaatctgagtgcggtggagcgggcctgggcagccaacggcagcatgggggagcccgtgatcaagtgcgagttcgagaaggtcatcagcatggagtacatggtctacttcaacttctttgtgtgggtgctgcccccgcttctcctcatggtcctcatctacctggaggtcttctacctaatccgcaagcagctcaacaagaaggtgtcggcctcctccggcgacccgcagaagtactatgggaaggagctgaagatcgccaagtcgctggccctcatcctcttcctctttgccctcagctggctgcctttgcacatcctcaactgcatcaccctcttctgcccgtcctgccacaagcccagcatccttacctacattgccatc

SEQ ID NO: 691 - DNA, 1636 bp, Homo sapiens
  source 1..1636: mol_type = unassigned DNA
gtcccaaaagtggtgtcttcttgagttctgatgcagcaggaagaactgaagttagactctgggaaggactttctaatgtggaagcacaagctgtggaatgcggagctgagtgtgggggtggactctttctttggaaagatttccaaggtacaagatggtggtgaccccccggagggcggcggtggccatagccggctgctggatcctctccttcgtggtgggactgacccctatgtttggctggaacaatctgagtgcggtggagcgggcctgggcagccaacggcagcatgggggagcccgtgatcaagtgcgagttcgagaaggtcatcagcatggagtacatggtctacttcaacttctttgtgtgggtgctgcccccgcttctcctcatggtcctcatctacctggaggtcttctacctaatccgcaagcagctcaacaagaaggtgtcggcctcctccggcgacccgcagaagtactatgggaaggagctgaagatcgccaagtcgctggccctcatcctcttcctctttgccctcagctggctgcctttgcacatcctcaactgcatcaccctcttctgcccgtcctgccacaagcccagcatccttacctacattgccatcttcctcacgcacggcaactcggccatgaaccccattgtctatgccttccgcatccagaagttccgcgtcaccttccttaagatttggaatgaccatttccgctgccagcctgcacctcccattgacgaggatctcccagaagagaggcctgatgactagaccccgccttccgctcccaccagcccacatccagtggggtctcagtccagtcctcacatgcccgctgtcccaggggtctccctgagcctgccccagctgggctgttggctgggggcatgggggaggctctgaagagatacccacagagtgtggtccctccactaggagttaactaccctacacctctgggccctgcaggaggcctgggagggcaagggtcctacggagggaccaggtgtctagaggcaacagtgttctgagcccccacctgcctgaccatcccatgagcagtccagagcttcagggctgggcaggtcctggggaggctgagactgcagaggagccacctgggctgggagaaggtgcttgggcttctgcggtgaggcaggggagtctgcttgtcttagatgttggtggtgcagccccaggaccaagcttaaggagaggagagcatctgctctgagacggatggaaggagagaggttgaggatgcactggcctgttctgtaggagagactggccagaggcagctaaggggcaggaatcaaggagcctccgttcccacctctgaggactctggaccccaggccataccaggtgctagggtgcctgctctccttgccctgggccagcccaggattgtacgtgggagaggcagaaagggtaggttcagtaatcatttctgatatttgctggagtgctggctccacgccctggggagtgagcttggtgcggtaggtgctggcctcaaacagccacgaggtggtagctctgagccctccttcttgccctgagctttccggggaggagccttggagtgtaattacctgtcatctgggccaccagctc

SEQ ID NO: 692 - DNA, 968 bp, Homo sapiens
  source 1..968: mol_type = unassigned DNA
gctccttttgccatcccggtcttccttggagagatggagagaatcaaatctcagtgcagaaagagctgagaatgccaaggtctgggtccagttttcctgcatttactgtccaggtacaagatggtggtgaccccccggagggcggcggtggccatagccggctgctggatcctctccttcgtggtgggactgacccctatgtttggctggaacaatctgagtgcggtggagcgggcctgggcagccaacggcagcatgggggagcccgtgatcaagtgcgagttcgagaaggtcatcagcatggagtacatggtctacttcaacttctttgtgtgggtgctgcccccgcttctcctcatggtcctcatctacctggaggtcttctacctaatccgcaagcagctcaacaagaaggtgtcggcctcctccggcgacccgcagaagtactatgggaaggagctgaagatcgccaagtcgctggccctcatcctcttcctctttgccctcagctggctgcctttgcacatcctcaactgcatcaccctcttctgcccgtcctgccacaagcccagcatccttacctacattgccatcttcctcacgcacggcaactcggccatgaaccccattgtctatgccttccgcatccagaagttccgcgtcaccttccttaagatttggaatgaccatttccgctgccagcctgcacctcccattgacgaggatctcccagaagagaggcctgatgactagaccccgccttccgctcccaccagcccacatccagtggggtctcagtccagtcctcacatgcccgctgtcccaggggtctccctgagcctgccccagctgggctgttggctgggggcatgggggaggctctgaagagatacccacagagtgtggtccctccactaggagttaactaccctacacctctgggccctgcaggaggcctgggagggcaa

SEQ ID NO: 693 - DNA, 2919 bp, Homo sapiens
  source 1..2919: mol_type = unassigned DNA
gtgcggagcccgattgtcactcagctcctgcgccgggggcgacagagccgcaggcgcccgagtcgagtcccagccagctaccatccctctggagcttaccggccggccttggcttccccaggaatccctggagctagcggctgctgaaggcgtcgaggtgtgggggcacttggacagaacagtcaggcagccgggagctctgccagctttggtgaccttgggccgggctgggagcgctgcggcgggagccggaggactatgagctgccgcgcgttgtccagagcccagcccagccctaccgcgcgcggcccggagctctgttccctggaactttgggcactgcctctgggacccctgccggccagcaggcaggatggtgcttgcctcgtgccccttggtgcccgtctgctgatgtgcccagcctgtgcccgccatgccgccctccatctcagctttccaggccgcctacatcggcatcgaggtgctcatcgccctggtctctgtgcccgggaacgtgctggtgatctgggcggtgaaggtgaaccaggcgctgcgggatgccaccttctgcttcatcgtgtcgctggcggtggctgatgtggccgtgggtgccctggtcatccccctcgccatcctcatcaacattgggccacagacctacttccacacctgcctcatggttgcctgtccggtcctcatcctcacccagagctccatcctggccctgctggcaattgctgtggaccgctacctccgggtcaagatccctctccggtacaagatggtggtgaccccccggagggcggcggtggccatagccggctgctggatcctctccttcgtggtgggactgacccctatgtttggctggaacaatctgagtgcggtggagcgggcctgggcagccaacggcagcatgggggagcccgtgatcaagtgcgagttcgagaaggtcatcagcatggagtacatggtctacttcaacttctttgtgtgggtgctgcccccgcttctcctcatggtcctcatctacctggaggtcttctacctaatccgcaagcagctcaacaagaaggtgtcggcctcctccggcgacccgcagaagtactatgggaaggagctgaagatcgccaagtcgctggccctcatcctcttcctctttgccctcagctggctgcctttgcacatcctcaactgcatcaccctcttctgcccgtcctgccacaagcccagcatccttacctacattgccatcttcctcacgcacggcaactcggccatgaaccccattgtctatgccttccgcatccagaagttccgcgtcaccttccttaagatttggaatgaccatttccgctgccagcctgcacctcccattgacgaggatctcccagaagagaggcctgatgactagaccccgccttccgctcccaccagcccacatccagtggggtctcagtccagtcctcacatgcccgctgtcccaggggtctccctgagcctgccccagctgggctgttggctgggggcatgggggaggctctgaagagatacccacagagtgtggtccctccactaggagttaactaccctacacctctgggccctgcaggaggcctgggagggcaagggtcctacggagggaccaggtgtctagaggcaacagtgttctgagcccccacctgcctgaccatcccatgagcagtccagagcttcagggctgggcaggtcctggggaggctgagactgcagaggagccacctgggctgggagaaggtgcttgggcttctgcggtgaggcaggggagtctgcttgtcttagatgttggtggtgcagccccaggaccaagcttaaggagaggagagcatctgctctgagacggatggaaggagagaggttgaggatgcactggcctgttctgtaggagagactggccagaggcagctaaggggcaggaatcaaggagcctccgttcccacctctgaggactctggaccccaggccataccaggtgctagggtgcctgctctccttgccctgggccagcccaggattgtacgtgggagaggcagaaagggtaggttcagtaatcatttctgatatttgctggagtgctggctccacgccctggggagtgagcttggtgcggtaggtgctggcctcaaacagccacgaggtggtagctctgagccctccttcttgccctgagctttccggggaggagccttggagtgtaattacctgtcatctgggccaccagctccactggcctgcccgttgccgggcctggactgtcctaggtgaccccatctctgctgcttctgggcctgatggagaggagaacactagacatgccaactcgggagcattctgcctgcctgggaacggggtggacgagggagtgtctgtaaggactcagtgttgactgtaggcgcccctggggtgggtttagcaggctgcagcaggcagaggagagtacccccctgagagcatgtgggggaaggccttgctgtcatgtgaatccctcaatacccctagtatctggctgggttttcaggggctttggaagctctgttgcaggtgtccgggggtctaggactttagggatctggggaaggaccaacccatgccctgccaagcctggagcccctgtgttggggggcaaggtgggggagcctggagcccctgtgtgggagggcgaggcgggggagcctggagcccctgtgtgggagggcgaggcgggggatcctggagcccctgtgtcggggggcgagggaggggaggtggccgtcgagttgaccttctgaacatgagtgtcaactccaggacttgcttccaagcccttccctctgttggaaattgggtgtgccctggctcccaagggaggcccatgtgactaataaaaaactgtgaaccctg

SEQ ID NO: 694 - DNA, 653 bp, Homo sapiens
  source 1..653: mol_type = unassigned DNA
gtgcggagcccgattgtcactcagctcctgcgccgggggcgacagagccgcaggcgcccgagtcgagtcccagccagctaccatccctctggagcttaccggccggccttggcttccccaggaatccctggagctagcggctgctgaaggcgtcgaggtgtgggggcacttggacagaacagtcaggcagccgggagctctgccagctttggtgaccttgggtgcttgcctcgtgccccttggtgcccgtctgctgatgtgcccagcctgtgcccgccatgccgccctccatctcagctttccaggccgcctacatcggcatcgaggtgctcatcgccctggtctctgtgcccgggaacgtgctggtgatctgggcggtgaaggtgaaccaggcgctgcgggatgccaccttctgcttcatcgtgtcgctggcggtggctgatgtggccgtgggtgccctggtcatccccctcgccatcctcatcaacattgggccacagacctacttccacacctgcctcatggttgcctgtccggtcctcatcctcacccagagctccatcctggccctgctggcaattgctgtggaccgctacctccgggtcaagatccctctccggagaataagccaatgcatggcaagcactaaatct

SEQ ID NO: 695 - DNA, 862 bp, Homo sapiens
  source 1..862: mol_type = unassigned DNA
tctgttccctggaactttgggcactgcctctgggacccctgccggccagcaggcaggatggtacaagatggtggtgaccccccggagggcggcggtggccatagccggctgctggatcctctccttcgtggtgggactgacccctatgtttggctggaacaatctgagtgcggtggagcgggcctgggcagccaacggcagcatgggggagcccgtgatcaagtgcgagttcgagaaggtcatcagcatggagtacatggtctacttcaacttctttgtgtgggtgctgcccccgcttctcctcatggtcctcatctacctggaggtcttctacctaatccgcaagcagctcaacaagaaggtgtcggcctcctccggcgacccgcagaagtactatgggaaggagctgaagatcgccaagtcgctggccctcatcctcttcctctttgccctcagctggctgcctttgcacatcctcaactgcatcaccctcttctgcccgtcctgccacaagcccagcatccttacctacattgccatcttcctcacgcacggcaactcggccatgaaccccattgtctatgccttccgcatccagaagttccgcgtcaccttccttaagatttggaatgaccatttccgctgccagcctgcacctcccattgacgaggatctcccagaagagaggcctgatgactagaccccgccttccgctcccaccagcccacatccagtggggtctcagtccagtcctcacatgcccgctgtcccaggggtctccctgagcctgccccagctgggctgttggctgggggcatgggggaggctctgaagagatacccacagagtgtggtccctccac

SEQ ID NO: 696 - DNA, 1735 bp, Homo sapiens
  source 1..1735: mol_type = unassigned DNA
gggcaatttgttagttatccgccgccaccaagacgcggcacggcgcctggaccggaggggccccgcgcgggcgcgaactttgggctcgggcgagtgggtggtgctccgcccagcccgagacgggcgggcgcgcgggccaatgggtgccgcctcttggccgcggggggccccgacccgtgggtcccggccaccagcgccccagccccgaggctcagaagcggcaggcggaggcgcggtccgggcgctatggccatgcccggcgggtctcacgcggctgcccctcgcccggcgcgccttcggtagggggcgcccggggcccagctggcccggccatgctgctggagacacaggacgcgctgtacgtggcgctggagctggtcatcgccgcgctttcggtggcgggcaacgtgctggtgtgcgccgcggtgggcacggcgaacactctgcagacgcccaccaactacttcctggtgtccctggctgcggccgacgtggccgtggggctcttcgccatcccctttgccatcaccatcagcctgggcttctgcactgacttctacggctgcctcttcctcgcctgcttcgtgctggtgctcacgcagagctccatcttcagccttctggccgtggcagtcgacagatacctggccatctgtgtcccgctcaggtataaaagtttggtcacggggacccgagcaagaggggtcattgctgtcctctgggtccttgcctttggcatcggattgactccattcctggggtggaacagtaaagacagtgccaccaacaactgcacagaaccctgggatggaaccacgaatgaaagctgctgccttgtgaagtgtctctttgagaatgtggtccccatgagctacatggtatatttcaatttctttgggtgtgttctgcccccactgcttataatgctggtgatctacattaagatcttcctggtggcctgcaggcagcttcagcgcactgagctgatggaccactcgaggaccaccctccagcgggagatccatgcagccaagtcactggccatgattgtggggatttttgccctgtgctggttacctgtgcatgctgttaactgtgtcactcttttccagccagctcagggtaaaaataagcccaagtgggcaatgaatatggccattcttctgtcacatgccaattcagttgtcaatcccattgtctatgcttaccggaaccgagacttccgctacacttttcacaaaattatctccaggtatcttctctgccaagcagatgtcaagagtgggaatggtcaggctggggtacagcctgctctcggtgtgggcctatgatctaggctctcgcctcttccaggagaagatacaaatccacaagaaacaaagaggacacggctggttttcattgtgaaagatagctacacctcacaaggaaatggactgcctctcttgagcacttccctggagctaccacgtatctagctaatatgtatgtgtcagtagtaggctccaaggattgacaaatatatttatgatctattcagctgcttttactgtgtggattatgccaacagcttgaatggattctaacagactcttttgtttttaaaagtctgccttgtttatggtggaaaattactgaaactattttactgtgaaacagtgtgaactattataatgcaaatactttttaacttagaggcaatggaaaaataaaagttgactgtactaaaaatgta

SEQ ID NO: 697 - DNA, 1875 bp, Homo sapiens
  source 1..1875: mol_type = unassigned DNA
tgtataacaaagccaattttaccacagttgatactgttaaaagaaaaacttcggctgaattcaatttaaaagagcttaattgagcaaagaatgattcacaaattgtgcagcctgctgagccaaagcaggctcagagactccagtgcagtcacgtggtggaagataatttatggacagaaaaaagaaagtgatggacagaaaaaggaaaagtgacgtacagaaaatggaagtgaggaacagaaacagctggattggttatagctcagcatttgccctttttgaacagggttcgaacagttggccacatttgattggccaaaagtcgaggattggcatgagtgcaggctatagtctgtttacacgtccacttgttgtagtccacgatgtacagagaaacctttaggccaaatttaaaatatgtaaggaggcagctttaggctaaacttgatttaacaatataaacaagagttaacttcctatgacatatacttcaagtcacagtttgagaacccaccgaggacattgaggacttacagtactcccttaaggcttccccacctcttgtcattggccatcctgtgtcactaaacagaaaggagttgctaagtcaagaatgaagatcttactgagttttctagagcaaagctgctcatccctgcttgcatgtctttagtattgagggtaaaggccttagtgccctggaaggtgaactttagaggttgttaaagggtcatggaaaaaagaggaggtggggtcttggattgtggttgcagagcgctataaactgaccgtaacagatggtattcttttaaacaggtataaaagtttggtcacggggacccgagcaagaggggtcattgctgtcctctgggtccttgcctttggcatcggattgactccattcctggggtggaacagtaaagacagtgccaccaacaactgcacagaaccctgggatggaaccacgaatgaaagctgctgccttgtgaagtgtctctttgagaatgtggtccccatgagctacatggtatatttcaatttctttgggtgtgttctgcccccactgcttataatgctggtgatctacattaagatcttcctggtggcctgcaggcagcttcagcgcactgagctgatggaccactcgaggaccaccctccagcgggagatccatgcagccaagtcactggccatgattgtggggatttttgccctgtgctggttacctgtgcatgctgttaactgtgtcactcttttccagccagctcagggtaaaaataagcccaagtgggcaatgaatatggccattcttctgtcacatgccaattcagttgtcaatcccattgtctatgcttaccggaaccgagacttccgctacacttttcacaaaattatctccaggtatcttctctgccaagcagatgtcaagagtgggaatggtcaggctggggtacagcctgctctcggtgtgggcctatgatctaggctctcgcctcttccaggagaagatacaaatccacaagaaacaaagaggacacggctggttttcattgtgaaagatagctacacctcacaaggaaatggactgcctctcttgagcacttccctggagctaccacgtatctagctaatatgtatgtgtcagtagtaggctccaaggattgacaaatatatttatgatctattcagctgcttttactgtgtggattatgccaacagcttgaatggattctaacagactcttttgtttttaaaagtctgccttgtttatggtggaaaattactgaaactattttactgtgaaacagtgtgaactattataatgcaaatactttttaacttagaggcaatggaaaaataaaagttgactgtact

SEQ ID NO: 698 - DNA, 2304 bp, Homo sapiens
  source 1..2304: mol_type = unassigned DNA
gaattccgaatcatgtgcagaatgctgaatcttcccccagccaggacgaataagacagcgcggaaaagcagattctcgtaattctggaattgcatgttgcaaggagtctcctggatcttcgcacccagcttcgggtagggagggagtccgggtcccgggctaggccagcccggcaggtggagagggtccccggcagccccgcgcgcccctggccatgtctttaatgccctgccccttcatgtggccttctgagggttcccagggctggccagggttgtttcccacccgcgcgcgcgctctcacccccagccaaacccacctggcagggctccctccagccgagaccttttgattcccggctcccgcgctcccgcctccgcgccagcccgggaggtggccctggacagccggacctcgcccggccccggctgggaccatggtgtttctctcgggaaatgcttccgacagctccaactgcacccaaccgccggcaccggtgaacatttccaaggccattctgctcggggtgatcttggggggcctcattcttttcggggtgctgggtaacatcctagtgatcctctccgtagcctgtcaccgacacctgcactcagtcacgcactactacatcgtcaacctggcggtggccgacctcctgctcacctccacggtgctgcccttctccgccatcttcgaggtcctaggctactgggccttcggcagggtcttctgcaacatctgggcggcagtggatgtgctgtgctgcaccgcgtccatcatgggcctctgcatcatctccatcgaccgctacatcggcgtgagctacccgctgcgctacccaaccatcgtcacccagaggaggggtctcatggctctgctctgcgtctgggcactctccctggtcatatccattggacccctgttcggctggaggcagccggcccccgaggacgagaccatctgccagatcaacgaggagccgggctacgtgctcttctcagcgctgggctccttctacctgcctctggccatcatcctggtcatgtactgccgcgtctacgtggtggccaagagggagagccggggcctcaagtctggcctcaagaccgacaagtcggactcggagcaagtgacgctccgcatccatcggaaaaacgccccggcaggaggcagcgggatggccagcgccaagaccaagacgcacttctcagtgaggctcctcaagttctcccgggagaagaaagcggccaaaacgctgggcatcgtggtcggctgcttcgtcctctgctggctgccttttttcttagtcatgcccattgggtctttcttccctgatttcaagccctctgaaacagtttttaaaatagtattttggctcggatatctaaacagctgcatcaaccccatcatatacccatgctccagccaagagttcaaaaaggcctttcagaatgtcttgagaatccagtgtctctgcagaaagcagtcttccaaacatgccctgggctacaccctgcacccgcccagccaggccgtggaagggcaacacaaggacatggtgcgcatccccgtgggatcaagagagaccttctacaggatctccaagacggatggcgtttgtgaatggaaatttttctcttccatgccccgtggatctgccaggattacagtgtccaaagaccaatcctcctgtaccacagcccggacgaagtctcgctctgtcaccaggctggagtgcagtggcatgatcttggctcactgcaacctccgcctcccgggttcaagagattctcctgcctcagcctcccaagcagctgggactacagggatgtgccaccaggccgacgccaccaggcccagctaatttttgtatttttagtagagacggggtttcaccatgttggccaggatgatctcgatctcttgacctcatgatctgcctgcctcagcctcccaaagtgctgggattacaggcgtgagccaccgtgcccggcccaactattttttttttttatcttttttaacagtgcaatcctttctgtggatgaaatcttgctcagaagctcaatatgcaaaagaaagaaaaacagcagggctggacggatgttgggagtggggtaagaccccaaccactcagaaccacccccccaacacacacacacattctctccatggtgactggtgaggggcctctagagggtacatagtacaccatggagcacggtttaagcaccactggactacacattcttctgtggcagttatcttaccttcccatagacacccagcccatagccattggtt

SEQ ID NO: 699 - DNA, 2092 bp, Homo sapiens
  source 1..2092: mol_type = unassigned DNA
gaattccgaatcatgtgcagaatgctgaatcttcccccagccaggacgaataagacagcgcggaaaagcagattctcgtaattctggaattgcatgttgcaaggagtctcctggatcttcgcacccagcttcgggtagggagggagtccgggtcccgggctaggccagcccggcaggtggagagggtccccggcagccccgcgcgcccctggccatgtctttaatgccctgccccttcatgtggccttctgagggttcccagggctggccagggttgtttcccacccgcgcgcgcgctctcacccccagccaaacccacctggcagggctccctccagccgagaccttttgattcccggctcccgcgctcccgcctccgcgccagcccgggaggtggccctggacagccggacctcgcccggccccggctgggaccatggtgtttctctcgggaaatgcttccgacagctccaactgcacccaaccgccggcaccggtgaacatttccaaggccattctgctcggggtgatcttggggggcctcattcttttcggggtgctgggtaacatcctagtgatcctctccgtagcctgtcaccgacacctgcactcagtcacgcactactacatcgtcaacctggcggtggccgacctcctgctcacctccacggtgctgcccttctccgccatcttcgaggtcctaggctactgggccttcggcagggtcttctgcaacatctgggcggcagtggatgtgctgtgctgcaccgcgtccatcatgggcctctgcatcatctccatcgaccgctacatcggcgtgagctacccgctgcgctacccaaccatcgtcacccagaggaggggtctcatggctctgctctgcgtctgggcactctccctggtcatatccattggacccctgttcggctggaggcagccggcccccgaggacgagaccatctgccagatcaacgaggagccgggctacgtgctcttctcagcgctgggctccttctacctgcctctggccatcatcctggtcatgtactgccgcgtctacgtggtggccaagagggagagccggggcctcaagtctggcctcaagaccgacaagtcggactcggagcaagtgacgctccgcatccatcggaaaaacgccccggcaggaggcagcgggatggccagcgccaagaccaagacgcacttctcagtgaggctcctcaagttctcccgggagaagaaagcggccaaaacgctgggcatcgtggtcggctgcttcgtcctctgctggctgccttttttcttagtcatgcccattgggacatacattcttaaatatgacgtgctgttttggagaaaagggctgtcggtctgcactaggctgcgggagaggaaagagattaaaaactgaaaccagggcagggatgagtgtgctatccacagctgagaagtgaaacacccatgtttaatagggactgacccaggaaaatcagacgaagtctcgctctgtcaccaggctggagtgcagtggcatgatcttggctcactgcaacctccgcctcccgggttcaagagattctcctgcctcagcctcccaagcagctgggactacagggatgtgccaccaggccgacgccaccaggcccagctaatttttgtatttttagtagagacggggtttcaccatgttggccaggatgatctcgatctcttgacctcatgatctgcctgcctcagcctcccaaagtgctgggattacaggcgtgagccaccgtgcccggcccaactattttttttttttatcttttttaacagtgcaatcctttctgtggatgaaatcttgctcagaagctcaatatgcaaaagaaagaaaaacagcagggctggacggatgttgggagtggggtaagaccccaaccactcagaaccacccccccaacacacacacacattctctccatggtgactggtgaggggcctctagagggtacatagtacaccatggagcacggtttaagcaccactggactacacattcttctgtggcagttatcttaccttcccatagacacccagcccatagccattggtt

SEQ ID NO: 700 - DNA, 2089 bp, Homo sapiens
  source 1..2089: mol_type = unassigned DNA
gaattccgaatcatgtgcagaatgctgaatcttcccccagccaggacgaataagacagcgcggaaaagcagattctcgtaattctggaattgcatgttgcaaggagtctcctggatcttcgcacccagcttcgggtagggagggagtccgggtcccgggctaggccagcccggcaggtggagagggtccccggcagccccgcgcgcccctggccatgtctttaatgccctgccccttcatgtggccttctgagggttcccagggctggccagggttgtttcccacccgcgcgcgcgctctcacccccagccaaacccacctggcagggctccctccagccgagaccttttgattcccggctcccgcgctcccgcctccgcgccagcccgggaggtggccctggacagccggacctcgcccggccccggctgggaccatggtgtttctctcgggaaatgcttccgacagctccaactgcacccaaccgccggcaccggtgaacatttccaaggccattctgctcggggtgatcttggggggcctcattcttttcggggtgctgggtaacatcctagtgatcctctccgtagcctgtcaccgacacctgcactcagtcacgcactactacatcgtcaacctggcggtggccgacctcctgctcacctccacggtgctgcccttctccgccatcttcgaggtcctaggctactgggccttcggcagggtcttctgcaacatctgggcggcagtggatgtgctgtgctgcaccgcgtccatcatgggcctctgcatcatctccatcgaccgctacatcggcgtgagctacccgctgcgctacccaaccatcgtcacccagaggaggggtctcatggctctgctctgcgtctgggcactctccctggtcatatccattggacccctgttcggctggaggcagccggcccccgaggacgagaccatctgccagatcaacgaggagccgggctacgtgctcttctcagcgctgggctccttctacctgcctctggccatcatcctggtcatgtactgccgcgtctacgtggtggccaagagggagagccggggcctcaagtctggcctcaagaccgacaagtcggactcggagcaagtgacgctccgcatccatcggaaaaacgccccggcaggaggcagcgggatggccagcgccaagaccaagacgcacttctcagtgaggctcctcaagttctcccgggagaagaaagcggccaaaacgctgggcatcgtggtcggctgcttcgtcctctgctggctgccttttttcttagtcatgcccattgggtctttcttccctgatttcaagccctctgaaacagtttttaaaatagtattttggctcggatatctaaacagctgcatcaaccccatcatatacccatgctccagccaagagttcaaaaaggcctttcagaatgtcttgagaatccagtgtctctgcagaaagcagtcttccaaacatgccctgggctacaccctgcacccgcccagccaggccgtggaagggcaacacaaggacatggtgcgcatccccgtgggatcaagagagaccttctacaggatctccaagacggatggcgtttgtgaatggaaatttttctcttccatgccccgtggatctgccaggattacagtgtccaaagaccaatcctcctgtaccacagcccggggacacacacccatgacatgaagccagcttcccgtccacgactgttgtccttactgcccaaggaaggggagcatgaaacccaccactggtcctgcgacccactgtctttggaatccaccccaggagcccaggagccttgcctgacacttggatttacttctttatcaagcatccatctgactaaggcacaaatccaacatgttactgttactgatacaggaaaaacagtaacttaaggaatgatcatgaatgcaaagggaaagaggaaaagagccttcagggacaaatagctcgattttttgtaaatcagtttcatacaacctccctcccccatttcattcttaaaagttaattgagaatcatcagccacgtgtagggtgtgag

SEQ ID NO: 701 - DNA, 1877 bp, Homo sapiens
  source 1..1877: mol_type = unassigned DNA
gaattccgaatcatgtgcagaatgctgaatcttcccccagccaggacgaataagacagcgcggaaaagcagattctcgtaattctggaattgcatgttgcaaggagtctcctggatcttcgcacccagcttcgggtagggagggagtccgggtcccgggctaggccagcccggcaggtggagagggtccccggcagccccgcgcgcccctggccatgtctttaatgccctgccccttcatgtggccttctgagggttcccagggctggccagggttgtttcccacccgcgcgcgcgctctcacccccagccaaacccacctggcagggctccctccagccgagaccttttgattcccggctcccgcgctcccgcctccgcgccagcccgggaggtggccctggacagccggacctcgcccggccccggctgggaccatggtgtttctctcgggaaatgcttccgacagctccaactgcacccaaccgccggcaccggtgaacatttccaaggccattctgctcggggtgatcttggggggcctcattcttttcggggtgctgggtaacatcctagtgatcctctccgtagcctgtcaccgacacctgcactcagtcacgcactactacatcgtcaacctggcggtggccgacctcctgctcacctccacggtgctgcccttctccgccatcttcgaggtcctaggctactgggccttcggcagggtcttctgcaacatctgggcggcagtggatgtgctgtgctgcaccgcgtccatcatgggcctctgcatcatctccatcgaccgctacatcggcgtgagctacccgctgcgctacccaaccatcgtcacccagaggaggggtctcatggctctgctctgcgtctgggcactctccctggtcatatccattggacccctgttcggctggaggcagccggcccccgaggacgagaccatctgccagatcaacgaggagccgggctacgtgctcttctcagcgctgggctccttctacctgcctctggccatcatcctggtcatgtactgccgcgtctacgtggtggccaagagggagagccggggcctcaagtctggcctcaagaccgacaagtcggactcggagcaagtgacgctccgcatccatcggaaaaacgccccggcaggaggcagcgggatggccagcgccaagaccaagacgcacttctcagtgaggctcctcaagttctcccgggagaagaaagcggccaaaacgctgggcatcgtggtcggctgcttcgtcctctgctggctgccttttttcttagtcatgcccattgggacatacattcttaaatatgacgtgctgttttggagaaaagggctgtcggtctgcactaggctgcgggagaggaaagagattaaaaactgaaaccagggcagggatgagtgtgctatccacagctgagaagtgaaacacccatgtttaatagggactgacccaggaaaatcagggacacacacccatgacatgaagccagcttcccgtccacgactgttgtccttactgcccaaggaaggggagcatgaaacccaccactggtcctgcgacccactgtctttggaatccaccccaggagcccaggagccttgcctgacacttggatttacttctttatcaagcatccatctgactaaggcacaaatccaacatgttactgttactgatacaggaaaaacagtaacttaaggaatgatcatgaatgcaaagggaaagaggaaaagagccttcagggacaaatagctcgattttttgtaaatcagtttcatacaacctccctcccccatttcattcttaaaagttaattgagaatcatcagccacgtgtagggtgtgag

SEQ ID NO: 702 - DNA, 1838 bp, Homo sapiens
  source 1..1838: mol_type = unassigned DNA
tgggaccatggtgtttctctcgggaaatgcttccgacagctccaactgcacccaaccgccggcaccggtgaacatttccaaggccattctgctcggggtgatcttggggggcctcattcttttcggggtgctgggtaacatcctagtgatcctctccgtagcctgtcaccgacacctgcactcagtcacgcactactacatcgtcaacctggcggtggccgacctcctgctcacctccacggtgctgcccttctccgccatcttcgaggtcctaggctactgggccttcggcagggtcttctgcaacatctgggcggcagtggatgtgctgtgctgcaccgcgtccatcatgggcctctgcatcatctccatcgaccgctacatcggcgtgagctacccgctgcgctacccaaccatcgtcacccagaggaggggtctcatggctctgctctgcgtctgggcactctccctggtcatatccattggacccctgttcggctggaggcagccggcccccgaggacgagaccatctgccagatcaacgaggagccgggctacgtgctcttctcagcgctgggctccttctacctgcctctggccatcatcctggtcatgtactgccgcgtctacgtggtggccaagagggagagccggggcctcaagtctggcctcaagaccgacaagtcggactcggagcaagtgacgctccgcatccatcggaaaaacgccccggcaggaggcagcgggatggccagcgccaagaccaagacgcacttctcagtgaggctcctcaagttctcccgggagaagaaagcggccaaaacgctgggcatcgtggtcggctgcttcgtcctctgctggctgccttttttcttagtcatgcccattgggtctttcttccctgatttcaagccctctgaaacagtttttaaaatagtattttggctcggatatctaaacagctgcatcaaccccatcatatacccatgctccagccaagagttcaaaaaggcctttcagaatgtcttgagaatccagtgtctctgcagaaagcagtcttccaaacatgccctgggctacaccctgcacccgcccagccaggccgtggaagggcaacacaaggacatggtgcgcatccccgtgggatcaagagagaccttctacaggatctccaagacggatggcgtttgtgaatggaaatttttctcttccatgccccgtggatctgccaggattacagtgtccaaagaccaatcctcctgtaccacagcccggtcttctggattttgagaagcagctgcaaggatgaacggattggtgttggcccaaattaaaaagaagagtattcagttctttcagtgtttggagaaagaagaccaaaagcatcatctcacagggagcagaatgtgaccagcctggctaatgaggaaatgagagggatcctcaacttgagaacccgctctactgaagtctgaacttggaaaaatggacacattgggtttggagtaagaattcttactctacaaaaggataaaattgtgatcacattgatgcatgatgcctaggatattaaaaatgcatgattaattaaatgttagtctaccttgtgttttaaagggacacacacccatgacatgaagccagcttcccgtccacgactgttgtccttactgcccaaggaaggggagcatgaaacccaccactggtcctgcgacccactgtctttggaatccaccccaggagcccaggagccttgcctgacacttggatttacttctttatcaagcatccatctgactaaggcacaaatccaacatgttactgttactgatacagg

SEQ ID NO: 703 - DNA, 1765 bp, Homo sapiens
  source 1..1765: mol_type = unassigned DNA
tcatgtggccttctgagggttcccagggctggccagggttgtttcccacccgcgcgcgcgctctcacccccagccaaacccacctggcagggctccctccagccgagaccttttgattcccggctcccgcgctcccgcctccgcgccagcccgggaggtggccctggacagccggacctcgcccggccccggctgggaccatggtgtttctctcgggaaatgcttccgacagctccaactgcacccaaccgccggcaccggtgaacatttccaaggccattctgctcggggtgatcttggggggcctcattcttttcggggtgctgggtaacatcctagtgatcctctccgtagcctgtcaccgacacctgcactcagtcacgcactactacatcgtcaacctggcggtggccgacctcctgctcacctccacggtgctgcccttctccgccatcttcgaggtcctaggctactgggccttcggcagggtcttctgcaacatctgggcggcagtggatgtgctgtgctgcaccgcgtccatcatgggcctctgcatcatctccatcgaccgctacatcggcgtgagctacccgctgcgctacccaaccatcgtcacccagaggaggggtctcatggctctgctctgcgtctgggcactctccctggtcatatccattggacccctgttcggctggaggcagccggcccccgaggacgagaccatctgccagatcaacgaggagccgggctacgtgctcttctcagcgctgggctccttctacctgcctctggccatcatcctggtcatgtactgccgcgtctacgtggtggccaagagggagagccggggcctcaagtctggcctcaagaccgacaagtcggactcggagcaagtgacgctccgcatccatcggaaaaacgccccggcaggaggcagcgggatggccagcgccaagaccaagacgcacttctcagtgaggctcctcaagttctcccgggagaagaaagcggccaaaacgctgggcatcgtggtcggctgcttcgtcctctgctggctgccttttttcttagtcatgcccattgggtctttcttccctgatttcaagccctctgaaacagtttttaaaatagtattttggctcggatatctaaacagctgcatcaaccccatcatatacccatgctccagccaagagttcaaaaaggcctttcagaatgtcttgagaatccagtgtctctgcagaaagcagtcttccaaacatgccctgggctacaccctgcacccgcccagccaggccgtggaagggcaacacaaggacatggtgcgcatccccgtgggatcaagagagaccttctacaggatctccaagacggatggcgtttgtgaatggaaatttttctcttccatgccccgtggatctgccaggattacagtgtccaaagaccaatcctcctgtaccacagcccggaggggaatggattgtagatatttcaccaagaattgcagagagcatatcaagcatgtgaattttatgatgccaccgtggagaaagggttcagaatgctgatctccaggtagctggagacctaggcagtctgcaaatgaggagtcagctggaagctatggctatgtattatgtgacatcgcttgttcctaagtgaaaactggatatcccaaccttctggcccagtaggtttcatggttaagacctggtagtgagaacattttaggaactatttgcttgggcaggcaatttttcactct

SEQ ID NO: 704 - DNA, 2281 bp, Homo sapiens
  source 1..2281: mol_type = unassigned DNA
gaattccgaatcatgtgcagaatgctgaatcttcccccagccaggacgaataagacagcgcggaaaagcagattctcgtaattctggaattgcatgttgcaaggagtctcctggatcttcgcacccagcttcgggtagggagggagtccgggtcccgggctaggccagcccggcaggtggagagggtccccggcagccccgcgcgcccctggccatgtctttaatgccctgccccttcatgtggccttctgagggttcccagggctggccagggttgtttcccacccgcgcgcgcgctctcacccccagccaaacccacctggcagggctccctccagccgagaccttttgattcccggctcccgcgctcccgcctccgcgccagcccgggaggtggccctggacagccggacctcgcccggccccggctgggaccatggtgtttctctcgggaaatgcttccgacagctccaactgcacccaaccgccggcaccggtgaacatttccaaggccattctgctcggggtgatcttggggggcctcattcttttcggggtgctgggtaacatcctagtgatcctctccgtagcctgtcaccgacacctgcactcagtcacgcactactacatcgtcaacctggcggtggccgacctcctgctcacctccacggtgctgcccttctccgccatcttcgaggtcctaggctactgggccttcggcagggtcttctgcaacatctgggcggcagtggatgtgctgtgctgcaccgcgtccatcatgggcctctgcatcatctccatcgaccgctacatcggcgtgagctacccgctgcgctacccaaccatcgtcacccagaggaggggtctcatggctctgctctgcgtctgggcactctccctggtcatatccattggacccctgttcggctggaggcagccggcccccgaggacgagaccatctgccagatcaacgaggagccgggctacgtgctcttctcagcgctgggctccttctacctgcctctggccatcatcctggtcatgtactgccgcgtctacgtggtggccaagagggagagccggggcctcaagtctggcctcaagaccgacaagtcggactcggagcaagtgacgctccgcatccatcggaaaaacgccccggcaggaggcagcgggatggccagcgccaagaccaagacgcacttctcagtgaggctcctcaagttctcccgggagaagaaagcggccaaaacgctgggcatcgtggtcggctgcttcgtcctctgctggctgccttttttcttagtcatgcccattgggtctttcttccctgatttcaagccctctgaaacagtttttaaaatagtattttggctcggatatctaaacagctgcatcaaccccatcatatacccatgctccagccaagagttcaaaaaggcctttcagaatgtcttgagaatccagtgtctctgcagaaagcagtcttccaaacatgccctgggctacaccctgcacccgcccagccaggccgtggaagggcaacacaaggacatggtgcgcatccccgtgggatcaagagagaccttctacaggatctccaagacggatggcgtttgtgaatggaaatttttctcttccatgccccgtggatctgccaggattacagtgtccaaagaccaatcctcctgtaccacagcccgggtgagaagtaaaagctttttgcaggtctgctgctgtgtagggccctcaacccccagccttgacaagaaccatcaagttccaaccattaaggtccacaccatctccctcagtgagaacggggaggaagtctaggacaggaaagatgcagaggaaaggggaataatcttaggtacccaccccacttccttctcggaaggccagctcttcttggaggacaagacaggaccaatcaaagaggggacctgctgggaatggggtgggtggtagacccaactcatcaggcagcgggtagggcacagggaagagggagggtgtctcacaaccaaccagttcagaatgatacggaacagcatttccctgcagctaatgctttcttggtcactctgtgcccacttcaacgaaaaccaccatgggaaacagaatttcatgcacaatccaaaagactataaatataggattatgatttcatcatgaatattttgagcacacactctaagtttggagctatttcttgatggaagtgaggggattttattttcaggctcaacctactgacagccacatttgacatttatg

SEQ ID NO: 705 - DNA, 2548 bp, Homo sapiens
  source 1..2548: mol_type = unassigned DNA
acgtcagcgagagctgcaaagttccttgctattcttttctggtgtcggggagctgaatattaaaagggtgattgtggagttaccggttatctgcatttttttttcttttcttattttgactctttttaaaaaatgcaggtaaagtgacagcggttcaggagcttaaagacatcagtggtggaggggtgagtcagcgggtgcaaaaggacaaggatttggtgcctcggagacacggtcccctctccgcctccagagaagagcaggcaggcagctcccgggaccgaagccgggtccacatcccccgcgcgcgagctggtggctcagcagcggcgcttcaggtggacgcggtcaaacgatgccccgcagcctcctgggtctcagcacatattccacacctacgtcccctgacctgtgctcctagaagctggagagagcaggagccttcggtggggcagctcaaaatgtaggtaactgcgggccaggagcagcgcccaacctgtagcgctgcgctacccaaccatcggtccctgcctttgagcgtcgacggctgatcttttggtttgagggagagactggcgctggagttttgaattccgaatcatgtgcagaatgctgaatcttcccccagccaggacgaataagacagcgcggaaaagcagattctcgtaattctggaattgcatgttgcaaggagtctcctggatcttcgcacccagcttcgggtagggagggagtccgggtcccgggctaggccagcccggcaggtggagagggtccccggcagccccgcgcgcccctggccatgtctttaatgccctgccccttcatgtggccttctgagggttcccagggctggccagggttgtttcccacccgcgcgcgcgctctcacccccagccaaacccacctggcagggctccctccagccgagaccttttgattcccggctcccgcgctcccgcctccgcgccagcccgggaggtggccctggacagccggacctcgcccggccccggctgggaccatggtgtttctctcgggaaatgcttccgacagctccaactgcacccaaccgccggcaccggtgaacatttccaaggccattctgctcggggtgatcttggggggcctcattcttttcggggtgctgggtaacatcctagtgatcctctccgtagcctgtcaccgacacctgcactcagtcacgcactactacatcgtcaacctggcggtggccgacctcctgctcacctccacggtgctgcccttctccgccatcttcgaggtcctaggctactgggccttcggcagggtcttctgcaacatctgggcggcagtggatgtgctgtgctgcaccgcgtccatcatgggcctctgcatcatctccatcgaccgctacatcggcgtgagctacccgctgcgctacccaaccatcgtcacccagaggaggggtctcatggctctgctctgcgtctgggcactctccctggtcatatccattggacccctgttcggctggaggcagccggcccccgaggacgagaccatctgccagatcaacgaggagccgggctacgtgctcttctcagcgctgggctccttctacctgcctctggccatcatcctggtcatgtactgccgcgtctacgtggtggccaagagggagagccggggcctcaagtctggcctcaagaccgacaagtcggactcggagcaagtgacgctccgcatccatcggaaaaacgccccggcaggaggcagcgggatggccagcgccaagaccaagacgcacttctcagtgaggctcctcaagttctcccgggagaagaaagcggccaaaacgctgggcatcgtggtcggctgcttcgtcctctgctggctgccttttttcttagtcatgcccattgggtctttcttccctgatttcaagccctctgaaacagtttttaaaatagtattttggctcggatatctaaacagctgcatcaaccccatcatatacccatgctccagccaagagttcaaaaaggcctttcagaatgtcttgagaatccagtgtctctgcagaaagcagtcttccaaacatgccctgggctacaccctgcacccgcccagccaggccgtggaagggcaacacaaggacatggtgcgcatccccgtgggatcaagagagaccttctacaggatctccaagacggatggcgtttgtgaatggaaatttttctcttccatgccccgtggatctgccaggattacagtgtccaaagaccaatcctcctgtaccacagcccgggtgagaagtaaaagctttttgcaggtctgctgctgtgtagggccctcaacccccagccttgacaagaaccatcaagttccaaccattaaggtccacaccatctccctcagtgagaacggggaggaagtctaggacaggaaagatgcagaggaaaggggaataatcttaggtacccaccccacttccttctcggaaggccagctcttcttggaggacaagacaggaccaatcaaagaggggacctgctgggaatgg

SEQ ID NO: 706 - DNA, 553 bp, Homo sapiens
  source 1..553: mol_type = unassigned DNA
cacagagagcctggtgggttccttccacaccacactctctaccccaccacactggctgccacattaacagggatgctcagagagaccttccacaatggtctttcttccctgatttcaagccctctgaaacagtttttaaaatagtattttggctcggatatctaaacagctgcatcaaccccatcatatacccatgctccagccaagagttcaaaaaggcctttcagaatgtcttgagaatccagtgtctctgcagaaagcagtcttccaaacatgccctgggctacaccctgcacccgcccagccaggccgtggaagggcaacacaaggacatggtgcgcatccccgtgggatcaagagagaccttctacaggatctccaagacggatggcgtttgtgaatggaaatttttctcttccatgccccgtggatctgccaggattacagtgtccaaagaccaatcctcctgtaccacagcccgggtgagaagtaaaagctttttgcaggtctgctgctgtgtagggccctcaacccccagccttgacaagaacca

SEQ ID NO: 707 - DNA, 1697 bp, Homo sapiens
  source 1..1697: mol_type = unassigned DNA
gaattccgaatcatgtgcagaatgctgaatcttcccccagccaggacgaataagacagcgcggaaaagcagattctcgtaattctggaattgcatgttgcaaggagtctcctggatcttcgcacccagcttcgggtagggagggagtccgggtcccgggctaggccagcccggcaggtggagagggtccccggcagccccgcgcgcccctggccatgtctttaatgccctgccccttcatgtggccttctgagggttcccagggctggccagggttgtttcccacccgcgcgcgcgctctcacccccagccaaacccacctggcagggctccctccagccgagaccttttgattcccggctcccgcgctcccgcctccgcgccagcccgggaggtggccctggacagccggacctcgcccggccccggctgggaccatggtgtttctctcgggaaatgcttccgacagctccaactgcacccaaccgccggcaccggtgaacatttccaaggccattctgctcggggtgatcttggggggcctcattcttttcggggtgctgggtaacatcctagtgatcctctccgtagcctgtcaccgacacctgcactcagtcacgcactactacatcgtcaacctggcggtggccgacctcctgctcacctccacggtgctgcccttctccgccatcttcgaggtcctaggctactgggccttcggcagggtcttctgcaacatctgggcggcagtggatgtgctgtgctgcaccgcgtccatcatgggcctctgcatcatctccatcgaccgctacatcggcgtgagctacccgctgcgctacccaaccatcgtcacccagaggaggggtctcatggctctgctctgcgtctgggcactctccctggtcatatccattggacccctgttcggctggaggcagccggcccccgaggacgagaccatctgccagatcaacgaggagccgggctacgtgctcttctcagcgctgggctccttctacctgcctctggccatcatcctggtcatgtactgccgcgtctacgtggtggccaagagggagagccggggcctcaagtctggcctcaagaccgacaagtcggactcggagcaagtgacgctccgcatccatcggaaaaacgccccggcaggaggcagcgggatggccagcgccaagaccaagacgcacttctcagtgaggctcctcaagttctcccgggagaagaaagcggccaaaacgctgggcatcgtggtcggctgcttcgtcctctgctggctgccttttttcttagtcatgcccattgatgaggaaactgaggcccaagaaggaaaaaatgactcacccagctttaaacaaccagttcaccatgcagcagtgctggggttggaggtgatggagaaggaaaatttggaaggtgtttcaaggaaagacacctgtggggtttggtgaccagttggaatgtaagaggcaaaaaaaagggagaaggaactagatacatattcttctggcaggaactgttaattgggttcctgctcccatcttgcactacagtgagagagataacctggtctcctaccattggaaagcatatcatctgtgctctggaggatgagacaatcaaagaaaacaagtaaataagaaaacttaaaaactgtgatatgtaccgtgaaataaataagcc

SEQ ID NO: 708 - DNA, 806 bp, Homo sapiens
  source 1..806: mol_type = unassigned DNA
gtccctgcagccctgtgaacaactttgacaacctcctgcaccaaattctcaacaatgtttccatcccagtctcagggcacagagagcctggtgggttccttccacaccacactctctaccccaccacactggctgccacattaacagacatggtcttgctgtgtcacccaggctggagtgaagtggcacaatcatggctcactgcagcctagaaccctgggttcaagtgatcctctcttctcagcctcctgagtagttggaactacagacatgcaccaccgtgcccagccaatcttcaggcattcctaccactcttgttgagagagagggctcagaacaaatgccaactgcctctttccactaccttcttccccacctttctcacagtccctcagggaagacagggaagtctttcctcttccttgttctggctaaaggggacactcctcctcctttccagagtggcatccaccttctatggaatagcaaagccaagtggacagcagagagagagagaggcagagagagagagagaggcagagagagagagaggtttactaagaaaagaataaagatgaggaatattttaaaatattataatccttatacatatttaaaactatcttttccacttggttatttgcattttgttgttttatggtttttgcaaatgtttagacatttaaaatatttatatagtcaaatattttcatgttttttcattgaatgtgccttctcagggatgctcagagagaccttccacaatgtaagtctgtttcctcctcattcttttagagcatcatttg

SEQ ID NO: 709 - DNA, 487 bp, Homo sapiens
  source 1..487: mol_type = unassigned DNA
ctggacattcctggacattgctgggagccagacactgagttgatcatagtgtgctgtcaacagtgaaagaaaatctgagggatcctcacagaaacggggcgcactttggaatgaaggagcacttttggtgctggacaagttgcatatcccgttaaatccggggcccactccgggagccccctattaaaggcgagcgagcgactcggtgcaggcaggagacgtgctgccgggctgggctgcccgggggagatgactcctcgccaggagggcgcctctgggaagaagaccacgggggaagcaaagtttcagggcagctgaggagccttcgccgcagcccttccgagcccaatcatccccctggctatggagggcggactctaagatgaatcccgacctggacaccggccacaacacatcagcacctgcccactggggagagttgaaaaatgccaacttcactggccccaaccagacctcgagcaactcc

SEQ ID NO: 710 - DNA, 537 bp, Homo sapiens
  source 1..537: mol_type = unassigned DNA
gatcatagtgtgctgtcaacagtgaaagaaaatctgagggatcctcacagaaacggggcgcactttggaatgaaggagcacttttggagaaaagcatgcagcccagagaagtcaagacttgcccaaggttgcacagctagctactaataaaatctggactagaattccaggcttagagatcagcacacttgcctaaaaagagctattggaaacatttttttttgcaaacatacacttcaaatattcatgaccgtcactgtaaacatcaacaaacactactgtcatatacctactatgagtatggggtgctgtatttggcaccttagagcttgggaggacagagtgtgggggttgataacagagaagacgtcatggaagaactaatgcctgaacaaatttttgaatagtgcatacgagttccccagatgaaaaggggaagtaatggagcctatttggaataggctccttcaaacatgaaacctatttggaattgacaactatgttataaatgtaaagtattttattcttaccaaatta

SEQ ID NO: 711 - DNA, 2047 bp, Homo sapiens
  source 1..2047: mol_type = unassigned DNA
cgccgtgcagtcagcccagaagcggctcattgaaagcagaccctcttcggcgctcgctgggcggaggacgcgccgcggtccgcagacccgagcgagctgggcaccgccgggcgcccccggccctgccgccccctcctccccgccgctcccccgcgagcccggccaggcgcgcctgacgtggaccattaaacttggagctgccgcctcgtcccctctcctcctcctcctccctctgacaggcgagcgagcgactcggtgcaggcaggagacgtgctgccgggctgggctgcccgggggagatgactcctcgccaggagggcgcctctgggaagaagaccacgggggaagcaaagtttcagggcagctgaggagccttcgccgcagcccttccgagcccaatcatccccctggctatggagggcggactctaagatgaatcccgacctggacaccggccacaacacatcagcacctgcccactggggagagttgaaaaatgccaacttcactggccccaaccagacctcgagcaactccacactgccccagctggacatcaccagggccatctctgtgggcctggtgctgggcgccttcatcctctttgccatcgtgggcaacatcctagtcatcttgtctgtggcctgcaaccggcacctgcggacgcccaccaactacttcattgtcaacctggccatggccgacctgctgttgagcttcaccgtcctgcccttctcagcggccctagaggtgctcggctactgggtgctggggcggatcttctgtgacatctgggcagccgtggatgtcctgtgctgcacagcgtccattctgagcctgtgcgccatctccatcgatcgctacatcggggtgcgctactctctgcagtatcccacgctggtcacccggaggaaggccatcttggcgctgctcagtgtctgggtcttgtccaccgtcatctccatcgggcctctccttgggtggaaggagccggcacccaacgatgacaaggagtgcggggtcaccgaagaacccttctatgccctcttctcctctctgggctccttctacatccctctggcggtcattctagtcatgtactgccgtgtctatatagtggccaagagaaccaccaagaacctagaggcaggagtcatgaaggagatgtccaactccaaggagctgaccctgaggatccattccaagaactttcacgaggacacccttagcagtaccaaggccaagggccacaaccccaggagttccatagctgtcaaactttttaagttctccagggaaaagaaagcagctaagacgttgggcattgtggtcggtatgttcatcttgtgctggctacccttcttcatcgctctaccgcttggctccttgttctccaccctgaagccccccgacgccgtgttcaaggtggtgttctggctgggctacttcaacagctgcctcaaccccatcatctacccatgctccagcaaggagttcaagcgcgctttcgtgcgcatcctcgggtgccagtgccgcggccgcggccgccgccgacgccgccgccgccgtcgcctgggcggctgcgcctacacctaccggccgtggacgcgcggcggctcgctggagcgctcgcagtcgcgcaaggactcgctggacgacagcggcagctgcctgagcggcagccagcggaccctgccctcggcctcgccgagcccgggctacctgggccgcggcgcgccaccgccagtcgagctgtgcgccttccccgagtggaaggcgcccggcgccctcctgagcctgcccgcgcctgagccccccggccgccgcggccgccacgactcgggcccgctcttcaccttcaagctcctgaccgagcccgagagccccgggaccgacggcggcgccagcaacggaggctgcgaggccgcggccgacgtggccaacgggcagccgggcttcaaaagcaacatgcccctggcgcccgggcagttttagggcccccgtgcgcagctttctttccctggggaggaaaacatcgtggggggga

SEQ ID NO: 712 - DNA, 2728 bp, Homo sapiens
  source 1..2728: mol_type = unassigned DNA
ccgacgggacccgtgcgcggagctgcatctggagccccgcggctatgccctgtgctcccctccctgccggccgctcgttctgtgccccggcccggccaccgacggccgcgcgttgagatgactttccgcgatctcctgagcgtcagtttcgagggaccccgcccggacagcagcgcagggggctccagcgcgggcggcggcgggggcagcgcgggcggcgcggccccctcggagggcccggcggtgggcggcgtgccggggggcgcgggcggcggcggcggcgtggtgggcgcaggcagcggcgaggacaaccggagctccgcgggggagccggggagcgcgggcgcgggcggcgacgtgaatggcacggcggccgtcgggggactggtggtgagcgcgcagggcgtgggcgtgggcgtcttcctggcagccttcatccttatggccgtggcaggtaacctgcttgtcatcctctcagtggcctgcaaccgccacctgcagaccgtcaccaactatttcatcgtgaacctggccgtggccgacctgctgctgagcgccaccgtactgcccttctcggccaccatggaggttctgggcttctgggcctttggccgcgccttctgcgacgtatgggccgccgtggacgtgctgtgctgcacggcctccatcctcagcctctgcaccatctccgtggaccggtacgtgggcgtgcgccactcactcaagtacccagccatcatgaccgagcgcaaggcggccgccatcctggccctgctctgggtcgtagccctggtggtgtccgtagggcccctgctgggctggaaggagcccgtgccccctgacgagcgcttctgcggtatcaccgaggaggcgggctacgctgtcttctcctccgtgtgctccttctacctgcccatggcggtcatcgtggtcatgtactgccgcgtgtacgtggtcgcgcgcagcaccacgcgcagcctcgaggcgggcgtcaagcgcgagcgaggcaaggcctccgaggtggtgctgcgcatccactgtcgcggcgcggccacgggcgccgacggggcgcacggcatgcgcagcgccaagggccacaccttccgcagctcgctctccgtgcgcctgctcaagttctcccgtgagaagaaagcggccaagactctggccatcgtcgtgggtgtcttcgtgctctgctggttccctttcttctttgtcctgccgctcggctccttgttcccgcagctgaagccatcggagggcgtcttcaaggtcatcttctggctcggctacttcaacagctgcgtgaacccgctcatctacccctgttccagccgcgagttcaagcgcgccttcctccgtctcctgcgctgccagtgccgtcgtcgccggcgccgccgccctctctggcgtgtctacggccaccactggcgggcctccaccagcggcctgcgccaggactgcgccccgagttcgggcgacgcgccccccggagcgccgctggccctcaccgcgctccccgaccccgaccccgaacccccaggcacgcccgagatgcaggctccggtcgccagccgtcgaaagccacccagcgccttccgcgagtggaggctgctggggccgttccggagacccacgacccagctgcgcgccaaagtctccagcctgtcgcacaagatccgcgccgggggcgcgcagcgcgcagaggcagcgtgcgcccagcgctcagaggtggaggctgtgtccctaggcgtcccacacgaggtggccgagggcgccacctgccaggcctacgaattggccgactacagcaacctacgggagaccgatatttaaggaccccagagctaggccgcggagtgtgctgggcttgggggtaagggggaccagagaggcgggctggtgttctaagagcccccgtgcaaatcggagacccggaaactgatcagggcagctgctctgtgacatccctgaggaactgggcagagcttgaggctggagcccttgaaaggtgaaaagtagtggggccccctgctggactcaggtgcccagaactcttttcttagaagggagaggctgcgggctccgtggggccttttgctcccaatccctatttgagaaacactgccccatcctccatgccctgaaccctgagtagacagccccaagcatggccaggaaggcctgcccctcctcttctgggaaataggcacagaagctttggccggctaccccagtgcctcccttagggaaaaagtcagtgggaccagggctcctcagtggacaaatttctccttcttactgccaactggaggaacccagtggacctaccaccacccacaagctttggtggcagattgtatagccgtcatacaagcctgctgtatttatccatgggcccgctgtccgccacccaggctcctccgtgcacaccccatcacctggcccctaccccttattacttcccctcaagggccttactgtttacactctgtacatagctcatcgtgcctgtgcccatcacttcttgctgggattccaagccaccaattggagagctttatttgtcattttgagacatatttattggtaagagtacttctattttgtccaagctgtgcaaactgtccctctttagcccataacccattaaaaaaaaaatactttttcccctaaagtctgtcaagaactaaaggcccgcaacagaatagattgggtctacatttgc

SEQ ID NO: 713 - DNA, 512 bp, Homo sapiens
  source 1..512: mol_type = unassigned DNA
tctaactctactctggtttgttgcctacattcattgaaggtaatcctcaatatcaggtagaggctccttgttcccgcagctgaagccatcggagggcgtcttcaaggtcatcttctggctcggctacttcaacagctgcgtgaacccgctcatctacccctgttccagccgcgagttcaagcgcgccttcctccgtctcctgcgctgccagtgccgtcgtcgccggcgccgccgccctctctggcgtgtctacggccaccactggcgggcctccaccagcggcctgcgccaggactgcgccccgagttcgggcgacgcgccccccggagcgccgctggccctcaccgcgctccccgaccccgaccccgaacccccaggcacgcccgagatgcaggctccggtcgccagccgtcgaaagccacccagcgccttccgcgagtggaggctgctggggccgttccggagacccacgacccagctgcgcgccaaagtctccagcctgtcgcacaaga

SEQ ID NO: 714 - DNA, 3371 bp, Homo sapiens
  source 1..3371: mol_type = unassigned DNA
aggggcgacgctcttgtctagccgagccgggcagcgctgtcgtccacggtgcgcactgggcgggcagcgctccctctgcccacctcccgccccgtcatggaccaccaggacccctactccgtgcaggccacagcggccatagcggcggccatcaccttcctcattctctttaccatcttcggcaacgctctggtcatcctggctgtgttgaccagccgctcgctgcgcgcccctcagaacctgttcctggtgtcgctggccgccgccgacatcctggtggccacgctcatcatccctttctcgctggccaacgagctgctgggctactggtacttccggcgcacgtggtgcgaggtgtacctggcgctcgacgtgctcttctgcacctcgtccatcgtgcacctgtgcgccatcagcctggaccgctactgggccgtgagccgcgcgctggagtacaactccaagcgcaccccgcgccgcatcaagtgcatcatcctcactgtgtggctcatcgccgccgtcatctcgctgccgcccctcatctacaagggcgaccagggcccccagccgcgcgggcgcccccagtgcaagctcaaccaggaggcctggtacatcctggcctccagcatcggatctttctttgctccttgcctcatcatgatccttgtctacctgcgcatctacctgatcgccaaacgcagcaaccgcagaggtcccagggccaagggggggcctgggcagggtgagtccaagcagccccgacccgaccatggtggggctttggcctcagccaaactgccagccctggcctctgtggcttctgccagagaggtcaacggacactcgaagtccactggggagaaggaggagggggagacccctgaagatactgggacccgggccttgccacccagttgggctgcccttcccaactcaggccagggccagaaggagggtgtttgtggggcatctccagaggatgaagctgaagaggaggaagaggaggaggaggaggaggaagagtgtgaaccccaggcagtgccagtgtctccggcctcagcttgcagccccccgctgcagcagccacagggctcccgggtgctggccaccctacgtggccaggtgctcctgggcaggggcgtgggtgctataggtgggcagtggtggcgtcgacgggcgcagctgacccgggagaagcgcttcaccttcgtgctggctgtggtcattggcgtttttgtgctctgctggttccccttcttcttcagctacagcctgggagccatctgcccgaagcactgcaaggtgccccatggcctcttccagttcttcttctggatcggctactgcaacagctcactgaaccctgttatctacaccatcttcaaccaggacttccgccgtgccttccggaggatcctgtgccgcccgtggacccagacggcctggtgagcccgcctgcgctgcccctgtggggttggtgcggtggcgccggggtcaccctgcttcttgccctgctgtgtgtggctgcctcccctgggctttctgctccctgcccagatcctgtaggcctcatcttaggaaccccttgggaggggtgggcaggggggctgctagcaagggtcccagtgaagcttccccttgccggcttagctgtgggggaccccttctccaccctctccctgagcacaggccgatggaggtggttcaaatcctctggaacatagccaagaccaggagaagagagagcactttcttcccagagccccatgctctccagaccaatgtctgggcttccctttcttgaggaccttgtgttcctggcaggtcacttgcttgtggtgttttcgtttctttttcatctcccccccacccacaaagagcacggagccagccttccacttttcccagtggggcctgctgctgagggggaggaagaaacgaagactgatcacccacgctaggcactcgcggtccctggcaggcgctgggatgggggcttatggggtggcatcgtctctgggccctcctttccccctttgcctgttttcggatctgtggttcctttgaaagccagaacaatggatcggcttccttacccagcacccctccggtaggtgggtggccacgtggatgcctcgctggggcggtcttggaggcctggtctctgcctcgacgggagatccccgatcactggcattcaccccctgcaaaaatcggggcgacaatagctcactgcctacttgctgcagggagatgaaaggctttgcagaaagctttgagctctgtgggggaacacactagagaaccaaaaatgtgattatatggtgatataaaaatccctttcctctgtgtttaccaccacctgtcttcctgtagacttttgttctgtccctggggtgtgtgaattcctaccccgaactggaagccgggagtggcagacagaatcactatttcaagttaaaggatctctttgagaatgtgttcttctggctgcaaaggtctgagttattacgctacatgacaacgtttcgacatttcaccggcaacaccaagagggtttttagtggcttgggtctccccagtgggggataagtcttttgtcatcaaggaggcaaattgtctccccaagacagctcaaaatatccacacctcggcaacagtctaagatgagagcctgtgacaggtggcagcgcccccaggtggggtactggcatcagagcctggtgcgcccctaggggagcctcccactggagtgcccggccaggtctccaagccccaaatgagtccttgtgaaccacaactgatccccccaggtgggtgcttgtggactgcctcggacccagccacgctgctccccgcaatgctgatggggctgtgcattgaggacccctgcttcctggttctcagtcccaccccaaaacctggcacccagaacagttggaagtgtggaaaggaggtttatcggccttcccttggagagggcctggcttcaacattgggccagtaggcatcttagcttggcaggtgtcgggggaatgggccagatggacctgctagatttggaagggcaccgagggagttttctgggtgtagagagaatggaggggaccaaaaagagtccttcctggggtgtgggaggcttcccagcttggtcctcagtgggttgttgaggccagagtatcgccctgggatgtggtggggagctgggccaggagagggactgactgtgaccctctgctggccggtcttgtgtgcgccccatgggacccccagtgttcttgcctgtgacctcttattgcgacatgcaggtggtgttttttttttttttaaactctgagctattttatcaataaaggatattttgtaataag

SEQ ID NO: 715 - DNA, 3443 bp, Homo sapiens
  source 1..3443: mol_type = unassigned DNA
cccgggttcaagagattctcctgtctcagcctcccgagtagctgggactacaggtacgtgccaccacacctggctaatttttgtatttttagtagagacaagagttacaccatattggccaggatcttttgctttctatagcttcaaaatgttcttaatgttaagacattcttaatactctgaaccatatgaatttgccattttggtaagtcacagacgccagatggtggcaatttcacatggcacaacccgaaagattaacaaactatccagcagatgaaaggattttttttagtttcattgggtttactgaagaaattgtttgaattctcattgcatctccagttcaacagataatgagtgagtgatgccacactctcaagagttaaaaacaaaacaacaaaaaaattaaaacaaaagcacacaactttctctctctgtcccaaaatacatacttgcatacccccgctccagataaaatccaaagggtaaaactgtcttcatgcctgcaaattcctaaggagggcacctaaagtacttgacagcgagtgtgctgaggaaatcagcagctgttgaagtcacctcctgtgctcttgccaaatgtttgaaagggaatacactgggttaccgggtgtatgttgggaggggagcattatcagtgctcgggtgaggcaagttcggagtacccagatggagacatccgtgtctgtgtcgctctggatgcctccaagccagcgtgtgtttactttctgtgtgtgtcaccatgtctttgtgcttctgggtgcttctgtgtttgtttctggccgcgtttctgtgttggacaggggtgactttgtgccggatggcttctgtgtgagagcgcgcgcgagtgtgcatgtcggtgagctgggagggtgtgtctcagtgtctatggctgtggttcggtataagtctgagcatgtctgccagggtgtatttgtgcctgtatgtgcgtgcctcggtgggcactctcgtttccttccgaatgtggggcagtgccggtgtgctgccctctgccttgagacctcaagccgcgcaggcgcccagggcaggcaggtagcggccacagaagagccaaaagctcccgggttggctggtaaggacaccacctccagctttagccctctggggccagccagggtagccgggaagcagtggtggcccgccctccagggagcagttgggccccgcccgggccagccccaggagaaggagggcgaggggaggggagggaaaggggaggagtgcctcgccccttcgcggctgccggcgtgccattggccgaaagttcccgtacgtcacggcgagggcagttcccctaaagtcctgtgcacataacgggcagaacgcactgcgaagcggcttcttcagagcacgggctggaactggcaggcaccgcgagcccctagcacccgacaagctgagtgtgcaggacgagtccccaccacacccacaccacagccgctgaatgaggcttccaggcgtccgctcgcggcccgcagagccccgccgtgggtccgcccgctgaggcgcccccagccagtgcgctcacctgccagactgcgcgccatggggcaacccgggaacggcagcgccttcttgctggcacccaatggaagccatgcgccggaccacgacgtcacgcaggaaagggacgaggtgtgggtggtgggcatgggcatcgtcatgtctctcatcgtcctggccatcgtgtttggcaatgtgctggtcatcacagccattgccaagttcgagcgtctgcagacggtcaccaactacttcatcacttcactggcctgtgctgatctggtcatgggcctggcagtggtgccctttggggccgcccatattcttatgaaaatgtggacttttggcaacttctggtgcgagttttggacttccattgatgtgctgtgcgtcacggccagcattgagaccctgtgcgtgatcgcagtggatcgctactttgccattacttcacctttcaagtaccagagcctgctgaccaagaataaggcccgggtgatcattctgatggtgtggattgtgtcaggccttacctccttcttgcccattcagatgcactggtaccgggccacccaccaggaagccatcaactgctatgccaatgagacctgctgtgacttcttcacgaaccaagcctatgccattgcctcttccatcgtgtccttctacgttcccctggtgatcatggtcttcgtctactccagggtctttcaggaggccaaaaggcagctccagaagattgacaaatctgagggccgcttccatgtccagaaccttagccaggtggagcaggatgggcggacggggcatggactccgcagatcttccaagttctgcttgaaggagcacaaagccctcaagacgttaggcatcatcatgggcactttcaccctctgctggctgcccttcttcatcgttaacattgtgcatgtgatccaggataacctcatccgtaaggaagtttacatcctcctaaattggataggctatgtcaattctggtttcaatccccttatctactgccggagcccagatttcaggattgccttccaggagcttctgtgcctgcgcaggtcttctttgaaggcctatgggaatggctactccagcaacggcaacacaggggagcagagtggatatcacgtggaacaggagaaagaaaataaactgctgtgtgaagacctcccaggcacggaagactttgtgggccatcaaggtactgtgcctagcgataacattgattcacaagggaggaattgtagtacaaatgactcactgctgtaaagcagtttttctacttttaaagacccccccccccaacagaacactaaacagactatttaacttgagggtaataaacttagaataaaattgtaaaattgtatagagatatgcagaaggaagggcatccttctgccttttttatttttttaagctgtaaaaagagagaaaacttatttgagtgattatttgttatttgtacagttcagttcctctttgcatggaatttgtaagtttatgtctaaagagctttagtcctagaggacctgagtctgctatattttcatgacttttccatgtatctacctcactattcaagtattaggggtaatatattgctgctggtaatttgtatctgaaggagattttccttcctacacccttggacttgaggattttgagtatctcggacctttcagctgtgaacatggactcttcccccactcctcttatttgctcacacggggtattttaggcagggatttgaggagcagcttcagttgttttcccgagcaaagtctaaagtttacagtaaataaattgtttgaccatgccttcattgcacctgtttctccaaaaccccttgactggagtgctgttgcctcccccactggaaa

SEQ ID NO: 716 - DNA, 6732 bp, Homo sapiens
  source 1..6732: mol_type = unassigned DNA
gccctgcgcccggggcgcctcggagaactgacctgaagtttcagtgtagtcagagagctcttcaagtaataaatcatggagaccagtcaggaaacttccctcttcttggtgaagatcttggaggaactggacagcaagcaaaataccgtttcttatcaggacctgtgcaaatctctctgtgcccggttcgacctgtcgcagcttgccaaactgagaagtgtgctcttctacacagcttgtctcgatcccaattttccagccacgctattcaaagacaagatgaaatgcactgtgaataaccagcaatcaaagaaaatcatggtggcagcagatattgtgacgatattcaacctgatccaaatgaatggcggggctgccaaggagaagctgcccacgggccgccagaaggtacgcaagaaggaggcatcctttgaatcatgtaggtcggacacagagatctgcaatgcagctgagtgtgagcccctgaactgtgagctgagtgagaggtctttcagccggggctaccccatcaggcagtcgtccaagtgccggaagatggactgcaaggactgcccacagtttgtccctgcctctgagcctaacttcctgttgggagttagcaaagaggtgaaaaaccgcgccgcttccctggacaggttgcaggccctggctccgtactctgtgaccagccctcagccctgtgagatgcagaggacctacttccccatgaacatcgaaaacgagtccatttcagaccaggactccctgcccatcaatcagagcatcaaggagaccttcatttccaatgaggagccatttgtggtccagtcctgtgtccagaaaaggaatatcttcaaagaggattttcacaatttgatggcagtgtcccccagtttggttggccccatcagcaaagcagagaatgagcacagggaaccccagagtcgaaaggaaccccacaagccacccttcttcaaccacagctttgaaatgccctataacagccagtacctgaatccagtgtattccccggttcctgacaaaaggcgagcaaagcacgaaagcttagatgaccttcaagcctctacatattttgggcccactcccgtgatgggaacccaagaagccaggcgctgtctagggaagcccaacaagcagactccctggccagccaaaagctggagcctaaacacagaggaagttcctgactttgaacggtcctttttcaatagaaatccctccgaggagaagctacactatccaaatgccagtagccagacccccaatttcccagccccagaaaggcgcccaacttaccttgtgccaaaggatcaacagccaattctccccattgcttatgcggcaaaacaaaatgggctcaaatctaaagagatctcatcccctgttgacctggagaagcatgaaccagtcaaaaagtttaaagacaagagcattaactgcaccagtgggcagctcagctcagacaccagtagcgtgggcacccagactgagcacgtgctggagcccaagaaatgcagagacctgtgcacctctggtcagggcaagtacagtgacaggcacaccatgaagcactcagacgatgactcagaaattgtcagcgacgacatcagtgacattttccgatttcttgatgacatgagcatcagtggctccacgggagtgatacagtcgtcctgctacaacagcacaggatccttgtctcagctccataagtcagactgcgacagttcccctgagcacaacttaaccaaaattgccaatggggtccccaacagcaagggagacaagggcaaccggcctgaaaacacccaccactcggaagaagagctgaagaccagtgtgtgcaaactggtgctcaggattggcgaaattgaacggaagctggaatccctgtcgggtgtccgtgatgaaatctcccaggtcttgggcaaactaaataaattggaccagaaaatgcaacagcctgagaaggtgagtgtgcagatagatctgaactccttgacaagcgagggtccgtctgatgacagtgcctctccccggatgttccacgcacacagtggctcccacggacccaaactagagaacaaccctgactggtgctgctctgatgctagcgggagcaacagtgaaagcctgcgggtcaaggccttaaaaaaaagcctcttcaccaggccatcctctaggtccctaacagaggagaacagtgccacagagtccaaaattgccagcatctccaactcgcccagagactggcgcaccatcacttataccaaccgtgtgggcctcaatgaggaggagataaaagacacaggcccaggagataataaagactggcatcggaaatctaaagaggcagacaggcagtacgacattcccccacagcaccgactgcccaagcagcccaaagatggcttcctggtggagcaggtgttcagccctcacccctaccctgcctccctcaaggcccacatgaagagcaaccccctgtacacagacatgcggctgaccgagttggccgaggtgaagcggggccaaccttcttggaccattgaggagtatgcacggaatgcgggcgacaagggcaagctgacagccctggacctgcagacgcaagaatctttaaacccaaataatttagagtactggatggaagacatttatactccaggatacgattcattactaaaacgtaaagaagccgaattcagacgagccaaggtctgcaagatagctgctctgatcgctgctgcggcatgcaccgtcatcctcgttattgtcgtgcccatctgcacaatgaaatcatgagctaagaatgcaaccttacgtacagcttatgactaccaatgtcgtcgtctgtatcttagaatcttgcagcagtgaggcaacaatttgttgaaatggagatgaaatcatggaggcatttctacaaatgttgaatgaaggtggttttcagaaagtatacattctagtgagaaatctacctacctattagctttgactcaattacactctgacgcatttttagaagtgcaatatcttttcctaccaaaagaacatcatggactatcaataaatacaaattgaatattccaagccaaaaaaggaagattaattgggttctttccattttgatgatgtttcatggtggggaataagttatacagaagatatttaatacacgcctctttagaagaaactaagggaaatagcaacataagaagaaaagaggtggcttctcttttccataatgttcttagaccattgctggtgaagtaacagggtgtgtgtccctaaagggtattacttctctgtcgacttttatcaagggctactgacgtttcattcttgcccttttgtcatcaacacgacagagtgtctgcatcactgcagatcttcatggaaacattctggaccttcttccttgcacttggagtgagaaggagctggactaccaagtcaggcgtggaatgaagtatgctcagactgcatgatgggccaaggtattcaggccaggagacctcgtcctcaatccaaagtgtaggggagctgcctgctaacgatgtaaggtcagtatttgaaaatcatggccactccaaaggatctcctgttcttgctttggtgtgtggctccattccttgattttctatctcctggtggtaccagatgctctgcctctcatacatgagttgaagagtttggaacttgtccttgtgccttgaagagtagagacaatggctaaacgttgacattctatctgtaaaccatggttttcacgcaccactaatatctgccattttcaatggctttaaaaagattttgaaagcttgctcaataatgttcaataatataataataataaaggcactgaggtcttctcagttaccccaacacctactccagagttttgaatacttgtcagcagtgcaaaaaatattatctgtttaaccacttatctatatgtctatctatctatctatatgtctatctatctatctaaatacttgatttttatttattgtcttctctgttaaataacttgagagcaaggtttctttcgtgtaaaagaagctgttgtaatttcatccaaatttgatctgtttccacctgctgaatggtgctctgacaataatggaacagaaagaatccttatcagcatctgattccaatgtcttgttacaggtcaaagaaaaaaggattgacagaaactagctaccttatatatattttttgataataaggtgggatataaatagattttggtagcaagtgtaatcactccgtatgatataataaatttctaaaagatttgagagcatctcaatttttaaagcaataggagtctagcatccattctgaaaaatcgcaaataatgcttagcttgctgtgtctgattctgttgttcaccattaaggggtagacagttaattttattatgttaacaagtgagggatgaatgttttcatctgtggtgaacctttatttttagaagtcttcatgttatctatttgtattatcatgtttatgtatggattttcaatttcagtaaccgaaaacttaagccttagtatgaaaaactgaggatttataattgaaaatgaaaaaaatatgttactctctatcatcagaattatagtctttggtgctctgttttcaatggggcatattacataaggttgtttctttcaccccaaagagactactaggttaccactctgggcattgcctttccacctaacccctcaaccagtaagactctacaccatattgtagccccactattctcctctttatcacagatgaagtgccagagcatcagagataggtagctcccaacctcttgctctggatttgcagaagagggggagatgtacttacccaggataagaaaaatctagtcaaatccaccccaaatcttccatttaacaggtaggaccatcgaggctggaccaaaccactttttccactgcccttggtgaatctattcctagtggaccccatttgggcatgtgcctagctaccttgggaaggcatgactataagtcacacctcaggcttggaaatgaaaggattctatagaatattctatactttccatagctggagaggtagtcagaaattcagtcttgctctgagtccacagtagctttaaaattcaactcaacattgttgtcacgtaacggaaacatctagacctggtaataatccaggaaattgcaaaatggaggccaaaagtaaggtgggtttctctggaaaggggtcatcctcagtctgataataccaagtctgacgctgaggttatgaatcattaccatggcttggagctattggatgcttggggtcttgggatagatagaaggtgaggttcacagttggagcttttcttgccattgaccccaagctcaccccagccttccttccctgaccctgagactcaccctatctatctcccctattccctcagtttgcagaatgagcaagatagagtctggctaggagggaaacatctatccatctctctaatctttgcccatcacctcctgttgcaatgagttcccgcaggtgacatacggactggcctctctactgtactgggtgccatctcccaccatactctggcatttttatgtaaaggataatttcttgtacctgagtctaaaattacaacgttatcaaaattcacttcgtttttcctgcattttaaaagtaataaaatattatttgagattattttgaaattaaatatccttaaccaatgattaaattcataatcatttcatcttctttcataatcatttcatcttctaatctgaatttgttttgaacacagccttgcagaaaagcaaaaaatatttccccgctcaaattttgccgacattttataccagtatccccttcattacagtaaactaaatcataacttacatcatccattactagctgatcataaattgttagtattttaaggtatgcaactatgtgattgacatctgtaaggctagtttaatagacgtgctaaatatcactgttctgaatatctgtgccatagttctgatacccttattggaatcaaggcagtgctgtttctgtttacaagttatcaagataagagcagtggcatcacatttgttgttgttgtttttttttttgaaatagaaaaaaacagaagaagctctgccaacaataaaagattttgttaagtggtataaaaatttgtgaatgttgaaattcaacatgcttcatattataaccaacctgcaagaatattgtggtcaattgtgtgaataccaaatcagtatatactgtatactgtactatgaaaatttgtatttaaaggcaaagatacaagtaattgttggtataattggggaaaagggtattcaatatttattaagtaacaatgagaaatgcaacaaacttccttatttatgccttatgaataaaagagtgtggaatgtaaggtgaaattttatgtgcaagatcctgaaggaatgggtattcttgaaggcagggactgtcttttctatgtttgttctgtacagctctcagcacactcttggtgcttgataaatgttatgttatataataccaataactaagcacatttttagatcttttttcaaatggcttgtgtaaaatttggttaatgtacaatggttggtttgaagctatcatgtaaaattggcctctccaaatataatcagaaataaaccg

SEQ ID NO: 717 - DNA, 5629 bp, Homo sapiens
  source 1..5629: mol_type = unassigned DNA
agaactgacctgaagtttcagtgtagtcagagagctcttcaagtaataaatcatggagaccagtcaggaaacttccctcttcttggtgaagatcttggaggaactggacagcaagcaaaataccgtttcttatcaggacctgtgcaaatctctctgtgcccggttcgacctgtcgcagcttgccaaactgagaagtgtgctcttctacacagcttgtctcgatcccaattttccagccacgctattcaaagacaagatgaaatgcactgtgaataaccagcaatcaaagaaaatcatggtggcagcagatattgtgacgatattcaacctgatccaaatgaatggcggggctgccaaggagaagctgcccacgggccgccagaaggtacgcaagaaggaggcatcctttgaatcatgtaggtcggacacagagatctgcaatgcagctgagtgtgagcccctgaactgtgagctgagtgagaggtctttcagccggggctaccccatcaggcagtcgtccaagtgccggaagatggactgcaaggactgcccacagtttgtccctgcctctgagcctaacttcctgttgggagttagcaaagaggtgaaaaaccgcgccgcttccctggacaggttgcaggccctggctccgtactctgtgaccagccctcagccctgtgagatgcagaggacctacttccccatgaacatcgaaaacgagtccatttcagaccaggactccctgcccatcaatcagagcatcaaggagaccttcatttccaatgaggagccatttgtggtccagtcctgtgtccagaaaaggaatatcttcaaagaggattttcacaatttgatggcagtgtcccccagtttggttggccccatcagcaaagcagagaatgagcacagggaaccccagagtcgaaaggaaccccacaagccacccttcttcaaccacagctttgaaatgccctataacagccagtacctgaatccagtgtattccccggttcctgacaaaaggcgagcaaagcacgaaagcttagatgaccttcaagcctctacatattttgggcccactcccgtgatgggaacccaagaagccaggcgctgtctagggaagcccaacaagcagactccctggccagccaaaagctggagcctaaacacagaggaagttcctgactttgaacggtcctttttcaatagaaatccctccgaggagaagctacactatccaaatgccagtagccagacccccaatttcccagccccagaaaggcgcccaacttaccttgtgccaaaggatcaacagccaattctccccattgcttatgcggcaaaacaaaatgggctcaaatctaaagagatctcatcccctgttgacctggagaagcatgaaccagtcaaaaagtttaaagacaagagcattaactgcaccagtgggcagctcagctcagacaccagtagcgtgggcacccagactgagcacgtgctggagcccaagaaatgcagagacctgtgcacctctggtcagggcaagtacagtgacaggcacaccatgaagcactcagacgatgactcagaaattgtcagcgacgacatcagtgacattttccgatttcttgatgacatgagcatcagtggctccacgggagtgatacagtcgtcctgctacaacagcacaggatccttgtctcagctccataagtcagactgcgacagttcccctgagcacaacttaaccaaaattgccaatggggtccccaacagcaagggagacaagggcaaccggcctgaaaacacccaccactcggaagaagagctgaagaccagtgtgtgcaaactggtgctcaggattggcgaaattgaacggaagctggaatccctgtcgggtgtccgtgatgaaatctcccaggtcttgggcaaactaaataaattggaccagaaaatgcaacagcctgagaaggtgagtgtgcagatagatctgaactccttgacaagcgagggtccgtctgatgacagtgcctctccccggatgttccacgcacacagtggctcccacggacccaaactagagaacaaccctgactggtgctgctctgatgctagcgggagcaacagtgaaagcctgcgggtcaaggccttaaaaaaaagcctcttcaccaggccatcctctaggtccctaacagaggagaacagtgccacagagtccaaaattgccagcatctccaactcgcccagagactggcgcaccatcacttataccaaccgtgtgggcctcaatgaggaggagataaaagacacaggcccaggagataataaagactggcatcggaaatctaaagaggcagacaggcagtacgacattcccccacagcaccgactgcccaagcagcccaaagatggcttcctggtggagcaggtgttcagccctcacccctaccctgcctccctcaaggcccacatgaagagcaaccccctgtacacagacatgcggctgaccgagttggccgaggtgaagcggggccaaccttcttggaccattgaggagtatgcacggaatgcgggcgacaagggcaagctgacagccctggacctgcagcacgtgggataagcatatttgtgggagccaagctatggattatgtttccatacggagcagccccagacgcaagaatctttaaacccaaataatttagagtactggatggaagacatttatactccaggatacgattcattactaaaacgtaaagaagccgaattcagacgagccaaggtctgcaagatagctgctctgatcgctgctgcggcatgcaccgtcatcctcgttattgtcgtgcccatctgcacaatgaaatcatgagctaagaatgcaaccttacgtacagcttatgactaccaatgtcgtcgtctgtatcttagaatcttgcagcagtgaggcaacaatttgttgaaatggagatgaaatcatggaggcatttctacaaatgttgaatgaaggtggttttcagaaagtatacattctagtgagaaatctacctacctattagctttgactcaattacactctgacgcatttttagaagtgcaatatcttttcctaccaaaagaacatcatggactatcaataaatacaaattgaatattccaagccaaaaaaggaagattaattgggttctttccattttgatgatgtttcatggtggggaataagttatacagaagatatttaatacacgcctctttagaagaaactaagggaaatagcaacataagaagaaaagaggtggcttctcttttccataatgttcttagaccattgctggtgaagtaacagggtgtgtgtccctaaagggtattacttctctgtcgacttttatcaagggctactgacgtttcattcttgcccttttgtcatcaacacgacagagtgtctgcatcactgcagatcttcatggaaacattctggaccttcttccttgcacttggagtgagaaggagctggactaccaagtcaggcgtggaatgaagtatgctcagactgcatgatgggccaaggtattcaggccaggagacctcgtcctcaatccaaagtgtaggggagctgcctgctaacgatgtaaggtcagtatttgaaaatcatggccactccaaaggatctcctgttcttgctttggtgtgtggctccattccttgattttctatctcctggtggtaccagatgctctgcctctcatacatgagttgaagagtttggaacttgtccttgtgccttgaagagtagagacaatggctaaacgttgacattctatctgtaaaccatggttttcacgcaccactaatatctgccattttcaatggctttaaaaagattttgaaagcttgctcaataatgttcaataatataataataataaaggcactgaggtcttctcagttaccccaacacctactccagagttttgaatacttgtcagcagtgcaaaaaatattatctgtttaaccacttatctatatgtctatctatctatctatatgtctatctatctatctaaatacttgatttttatttattgtcttctctgttaaataacttgagagcaaggtttctttcgtgtaaaagaagctgttgtaatttcatccaaatttgatctgtttccacctgctgaatggtgctctgacaataatggaacagaaagaatccttatcagcatctgattccaatgtcttgttacaggtcaaagaaaaaaggattgacagaaactagctaccttatatatattttttgataataaggtgggatataaatagattttggtagcaagtgtaatcactccgtatgatataataaatttctaaaagatttgagagcatctcaatttttaaagcaataggagtctagcatccattctgaaaaatcgcaaataatgcttagcttgctgtgtctgattctgttgttcaccattaaggggtagacagttaattttattatgttaacaagtgagggatgaatgttttcatctgtggtgaacctttatttttagaagtcttcatgttatctatttgtattatcatgtttatgtatggattttcaatttcagtaaccgaaaacttaagccttagtatgaaaaactgaggatttataattgaaaatgaaaaaaatatgttactctctatcatcagaattatagtctttggtgctctgttttcaatggggcatattacataaggttgtttctttcaccccaaagagactactaggttaccactctgggcattgcctttccacctaacccctcaaccagtaagactctacaccatattgtagccccactattctcctctttatcacagatgaagtgccagagcatcagagataggtagctcccaacctcttgctctggatttgcagaagagggggagatgtacttacccaggataagaaaaatctagtcaaatccaccccaaatcttccatttaacaggtaggaccatcgaggctggaccaaaccactttttccactgcccttggtgaatctattcctagtggaccccatttgggcatgtgcctagctaccttgggaaggcatgactataagtcacacctcaggcttggaaatgaaaggattctatagaatattctatactttccatagctggagaggtagtcagaaattcagtcttgctctgagtccacagtagctttaaaattcaactcaacattgttgtcacgtaacggaaacatctagacctggtaataatccaggaaattgcaaaatggaggccaaaagtaaggtgggtttctctggaaaggggtcatcctcagtctgataataccaagtctgacgctgaggttatgaatcattaccatggcttggagctattggatgcttggggtcttgggatagatagaaggtgaggttcacagttggagcttttcttgccattgaccccaagctcaccccagccttccttccctgaccctgagactcaccctatctatctcccctattccctcagtttgcagaatgagcaagatagagtctggctaggagggaaacatctatccatctctctaatctttgcccatcacctcctgttgcaatgagttcccgcaggtgaca

SEQ ID NO: 718 - DNA, 7479 bp, Homo sapiens
  source 1..7479: mol_type = unassigned DNA
ctcccagttgaattttgctgccttaaagcagaagcaaaggagtagtgcatttgttaagaagaagacgcctgaatcttttagtggacctgctttcagcaaacttgttttttaggtcagaatactatatccaatgatcaagctaaacatgaaatgcttcgagtaagactcagtattcatactttgacatttgcaaatcactgggtctaataatactcttcctcttttgttgtcagcaatggaagagttaatagttgaacttcgtctctttcttgaactcctggaccatgaatatctaacctcaactgtcagggagaaaaaggcagtgataaccaacattctgctaagaatacagtcatccaaaggttttgatgtgaaggaccatgctcagaagcaggagaccgctaacagcctgccagcccctcctcagatgcccctgccggagatccctcagccctggctgcctcctgacagtgggcctccaccattgccaacatcctccctcccagaaggttattatgaggaagctgtgccgctgagccccggaaaagctccggaatacatcacatcaaattatgattccgatgcgatgagcagctcttatgagtcgtatgatgaagaggaggaggatgggaaggggaagaaaacccggcaccagtggccctccgaggaggcctccatggacctggtcaaggacgccaaaatctgcgccttcctgctgcggaagaagcggttcggccagtggaccaagttgctctgcgtcatcaaagacaccaaactgctgtgctataaaagttccaaggaccagcagcctcagatggaactgccactccaaggctgtaacattacgtacatcccgaaagacagcaaaaagaagaagcacgagctgaagattactcagcagggcacggacccgcttgttctcgccgtccagagcaaggaacaggccgagcagtggctgaaggtgatcaaagaagcctacagtggttgtagtggccccgtggattcagagtgtcctcctccaccaagctccccggtgcacaaggcagaactggagaagaaactgtcttcagagagacccagctcagatggggagggtgttgtggaaaatggaattaccacatgtaatggaaaggagcaagtgaagaggaagaaaagttccaaatcagaggccaagggcactgtgtcgaaagtcactgggaaaaaaatcaccaagatcatcagtctgggaaagaaaaagccgtccacagacgagcagacctcctcagctgaggaagatgttcccacctgcggctatctgaacgtgctctccaacagccgctggcgagagcgctggtgccgagtgaaagataacaagctcattttccacaaggacaggaccgacctgaagacccatattgtgtctattccgctccgtggctgcgaggtgatcccgggtttggattctaaacatcctctgacgttccggctgctgcgcaacggccaggaggttgcagtattggaggcatcttcttctgaagacatgggcaggtggattgggattttactcgcagagacgggatcgtccacagacccggaggctctgcactatgactacattgatgtggagatgtctgcaagtgtcattcagacagccaaacagaccttctgtttcatgaacaggcgtgttatatctgctaacccatatctagggggcacctccaacggctatgcccaccccagcgggacggcacttcattatgacgatgtcccgtgcatcaacggctcgctcaagggtaaaaagccccccgtggcgtctaatggggtcacaggaaaagggaagactctgagcagtcagccaaagaaagcggatcccgcggctgttgtgaaaaggacgggttcgaatgctgcccagtacaagtatggcaagaaccgggtagaagcagatgccaagcggctacagaccaaagaggaggagctgctgaagaggaaagaggccctgcggaataggctggcccagctccgcaaggaaagaaaagaccttcgagcggctattgaagtgaacgccggcaggaagccgcaggcgatcctggaggagaagctgaagcagctggaggaggagtgccggcagaaggaggcggagcgtgtcagcctggagctggagctgacggaggtcaaggagagcctgaagaaagcgctggcgggcggagtcaccctggggctggccatcgagcccaagtcagggacatcgagtccacagtctccagtgttccggcaccggaccctggaaaactcgcccatctccagctgtgacaccagtgacaccgagggccccgtgccggtgaacagcgcggccgtcttgaagaagagccaggctgccccgggcagctccccctgccgagggcatgtgctgcggaaggccaaggaatgggaattgaagaacgggacctaggggacagcagcaccactccagcctcagagactgcacacccccttgcctgtatcctcatctgtgtgacggcaggaagctctgcccagagtggcctcagctgcacgactccagaggctccacgactgagctctgaggccagtgcctgtcccccaggcccacttgtattctttctactgtaaaatggcgcctttaaaaaagatgtaagactttggttcccaactttgttaaaaaacaaaaaaagtgatggaaaggtgtttgaaaggatgctatcaggcgaagtgacatctttctaaccagataggccattgctttcaccgattccaacccagccctggactgaggatggatggttccatgagcccccagatgaaaacctggattcgacagggaagagcttggatccccggctgccccgggcatgagtgtggctggccatgggcactgggctcgccttgcacgcccaccaggagggccaggggcatacgcagtcctgacgtggactttgtgtcttggcgtaccctctccacgtgcccgtccccctcgtcatcagaggtaaaggcatgagaaaatcgcgctgtgaaacgttttttaccttttattattattttttggacagatgcttttgtcaccaagacatgaaaagctgccattcttcttaacctgttttttaggaatgtctttttactgtgtgtcacacttagatcaaggagttttcagaggttccttattttattaattaattatttgtgctgcttttgacaggtagcagagggttttaatacttcactaacagtacaccctcctcccccttgggctagcatccccagcccttaatccacgtcggagccggcaggtgcttctcacaccaggagcctctgggggcaggggctggctcctcgccgctgtacaggacgtttactgctgcttggggccagggcagtcctttgaaagggaagcaagttccggaatttgttcgctcatggaactataacaccttagagcaagaggcaggaattccagggcctcctgcccctccccttcctccagcttgtcaagttaaaccactaatgtgttggtgggcctggccgtgctgcctctcctgagtagggtgggtgcaagtagggcctctttcccagctttcttgcttgccttctgtgcaatatttcttggagaatttggatgcctaaggcataaaggaaaaaaacagagttcatagtttgagctggtatttaccccctgggtttaaaaatcagattaacttcttggtctcccggaggctgctgtcaggaattctccagtacgggaagatgcagtcacttatgacgaaataagtcacccctgaacgcctccgcaggcagattcatggagaccagtcccagtagcaaccgccccttccccaagcatagaatacagaggtgccatacttggtgtaagccttccttctgtccactgtccagaatgtcctttttcacacagaggaagagatggcgggaaaacactgactgactccttgggtttcccccagacatactttcagagcgctagctgtgtggtgcacgggactttacagttaggattcatgtttaaggtggtggcgcttgaggcctgcaagggccacgttggattactgaagcggaaagcggtctcccatgtataagaaaaagttttacaacacgaattggaagctgcttgagtccacctgaacttgaattgattgcaaagccatctgctgggaacggttttgggttcctgagccatcagccagcctttctttcccctctgatgcacgttcctcccggcctagtccgtggaggcccatcacaccagcatccgtgacgccagcttcccactaggacatccaggcaggtcgggcggggacgccacacacctcagggccgtccgctgcattgccatagaggagccctccctccagtggtcacttcccaccattgcaggcagacttcccaccattgcaggcagctgggcccacttcatatcacacaaaatgaattttctataaagggaaaaaagtttgctcctccatagatttttgctgccttcgggtcaaatagtttccctggttgacactcttgggccactctgattggcagcctgctttgccaaagagaactgtgtgaggttttggtggttagtaagagaagggggagatggccagcctgaagtcacggtcctggcccagcacaggtgggcagcagcgagctggcaggtgaagtgtgagcagcacgcaaagtgtcacgtgggccttagccgtcacccaccagcttcctcaccaggcaaggaggccccggagccttagcagggacttgcccaacggcacagctgattggtgctcgactcccagcatgcatattttgttgtaaaaacccaggtttgtaattcacatccacaaccctaagccttttaaagcggaggcaaacgttaacaaaccccatcgtggtccatggagcctttcaaaatgggtgccctggaggggcctgacagtgggttccttccatggcggatactcccttgaaatttcacattccatcaaagtttaaagcatttacttcagaataagttatttatgtgtatatgttcaataaatatagtttttaatttatatctgtacatattagacacacgcgagccatcttgccagaattctgacagtgatgtcattttattcccctcccaaaacatgccccaggaacaagcaccccttgcctctgtggcagctgcgagtgtgtctgatttcataacgaagccaggctgagggcaagaggcccgacaggcaggccagggtccccggagaagccggatttcttcgcaatgtcactggtacttagcagatggtcgtgttcacaggggctagccacctgtactacggtgccgaccgcaatgcgaggaatgtggtggccacgcgatggagctggccggaggacaggtcaggtgagggggccgacccctgcggggctcagggctccttccattctaaccttgagccacagtgtcactcttcagggctctgctcctggctctattttgttaaggtgtcatcagccttcaacctccatttatatatttttataatgttaagccactgaccaactttttcatagaaacaactatcagattcgagggctccctttgtccccctgacctgggcacaggcatgggcgatggctccctcttcccagaatctgcggggaactggggcaaggcccatctgtctgcaaggctggtagctctctccctcggcttccagagtccacggcagttgcaaggtaaccagtgtggatctgctgagtcaccccaggcaccagacttaccccaggagcatgggccactgtccatggggccttccttgagaccttcccttggggctggcgggcggcggcttaccagctgggtcagtcccatctcgcccctctgtgcctatgccctggcgttgccaggcttaaccttcccctgtatcttactcatcccagaattattactggccatttctaaatagacaaaaactaccctaaaatgtggagatttactccttttgaaaagtctgtttcaaaaagtgtggcctcagctctggaggccacccccaggaaggagtttgaggttcattgtcattatggccacagtttggtgcttgtgcacgggactcaaagggcagcgtcgaagctggggttaggtgtagggttgtgagcaaagctcccctgtttgtggccacaccttccctttccaaaaaggctattaattctactcacccactatttggggggatgtaaattttgcccacagactttgccacccaggtgaggtgctgtgttcatgcacggaactgatgtcattagacaccatccaaggatgggcagcctgcagtgtggccggcgactgccatccagagaaaaggcaccttgtgccacagggcggggccgacaccctgagctcacaggtggcccctgcattcaggtggatgtccatccttgaaacagcctcttctgggaacacagcactggaggtctccaggcatcagggttggccggcagggtgccctgcagcttacataaaggtcgtggcaatgtttcaatgttaaactaaactattgccttcctcttacttttcctaaaatgattttctaatgggaacagtcacttcaagttcatgacatagtttgaaggaggataattcattttttcctggttgtcactgtcttcttatccccttggtgggctgggttcatactgtgaaataaactaaaatgaaaccaaaacgttcctgccgtaaatacgtggcacagcactgcagaaaaagcagtcacctctattcgtgagtccccaagccatagcagggcgtctgtaaaagaagggaaactgcacccaggaagtggtgggcgtcagacgcatcctttcgcccgtagttcatgaaatagttccggctttggtcttccagaaaatctcaacttcaccgtgcacaagtgttaccgggtctttttagtgtagccatggaagatactttcaaaaggacatcttcagatcataagtcttaggaccaaaggtgtttttaatgagataatctttttgattttctaacaagaaaggaaatattcactttacattttaacatcaacttttaagtgatattcagaattaattgaccatggtgatacgttgtaaaatgttttcatattaagaatgtaattatttccttattgtattttttaaaagctaaagtcatatttaaaattctctttgaaagaaacaggcaaagaaacagcaaagatttttttaaattaaatatgttagtagtgcccacttcaaatgactgtaaatatattttcactgtttctcaatgtatttaattcataaagtaaaaattttatgaaaagaaacttgcaaggaaaatcctagttttcagtccactcgccccactttgtagtagcttcactgaatttcctgctttcctggttgaattttctactgtttcacgtggtgtaaccctagactggcgcccttggcgtgcccctttgtgtatgaataaacttctctccccca

SEQ ID NO: 719 - DNA, 1517 bp, Homo sapiens
  source 1..1517: mol_type = unassigned DNA
gggtagtcagctgcctgcgccagcttggttagcatttgtggtctgccagtagaaaggggccacttctgcagtgttccagcggaacacatcctacagagcctctgccgtaccctccttagccattccccagaatcccagcagcccagtgtttggaaaccatcttggttttctttcactttcgatttttcctccatctatgccagtttctacaatacttagagactgaaagaaatgactccagaaaaaaaaaagaccaagatttgtttgactttgtgtttatttttaatgttcttatatgtttatttcaacagctcaagggtaaaaagccccccgtggcgtctaatggggtcacaggaaaagggaagactctgagcagtcagccaaagaaagcggatcccgcggctgttgtgaaaaggacgggttcgaatgctgcccagtacaagtatggcaagaaccgggtagaagcagatgccaagcggctacagaccaaagaggaggagctgctgaagaggaaagaggccctgcggaataggctggcccagctccgcaaggaaagaaaagaccttcgagcggctattgaagtgaacgccggcaggaagccgcaggcgatcctggaggagaagctgaagcagctggaggaggagtgccggcagaaggaggcggagcgtgtcagcctggagctggagctgacggaggtcaaggagagcctgaagaaagcgctggcgggcggagtcaccctggggctggccatcgagcccaagtcagggacatcgagtccacagtctccagtgttccggcaccggaccctggaaaactcgcccatctccagctgtgacaccagtgacaccgagggccccgtgccggtgaacagcgcggccgtcttgaagaagagccaggctgccccgggcagctccccctgccgagggcatgtgctgcggaaggccaaggaatgggaattgaagaacgggacctaggggacagcagcaccactccagcctcagagactgcacacccccttgcctgtatcctcatctgtgtgacggcaggaagctctgcccagagtggcctcagctgcacgactccagaggctccacgactgagctctgaggccagtgcctgtcccccaggcccacttgtattctttctactgtaaaatggcgcctttaaaaaagatgtaagactttggttcccaactttgttaaaaaacaaaaaaagtgatggaaaggtgtttgaaaggatgctatcaggcgaagtgacatctttctaaccagataggccattgctttcaccgattccaacccagccctggactgaggatggatggttccatgagcccccagatgaaaacctggattcgacagggaagagcttggatccccggctgccccgggcatgagtgtggctggccatgggcactgggctcgccttgcacgcccaccaggagggccaggggcatacgcagtcctgacgtggactttgtgtcttggcgtaccctctccacgtgcccgtccccctcg

SEQ ID NO: 720 - DNA, 1638 bp, Homo sapiens
  source 1..1638: mol_type = unassigned DNA
gtgcagaccctgaccacggccaaagcttttgttctctctcagcttctttacccaccgtaaaacacgaatgctgagctagagtcagtgtaccttgtaaacatttatgtaggctgaaaactggagggtggatggcggtggaaaaaagctgaaaacttaaataaagaaactgtactcttgatgtaacaatgcgggtctcccatgagagctctgacagcagatctgagaagggttgcaaggagaaggaggcatgaattggcacgggcatcttcttctgaagacatgggcaggtggattgggattttactcgcagagacgggatcgtccacagacccggaggctctgcactatgactacattgatgtggagatgtctgcaagtgtcattcagacagccaaacagaccttctgtttcatgaacaggcgtgttatatctgctaacccatatctagggggcacctccaacggctatgcccaccccagcgggacggcacttcattatgacgatgtcccgtgcatcaacggctcgtgggaaccggaagacggctttcctgcttcctgcagcagaggcttgggagaagaggtgctttatgataacgcaggcctgtacgataacttgccgcctccgcacatctttgcccgctactctcctgctgacagaaaggcctctaggctgtctgctgacaagctgtcctctaaccattacaaataccctgcctccgctcagtctgtcactaatacctcttctgtggggagggcgtctctcgggctcaactcgcagctcaagggtaaaaagccccccgtggcgtctaatggggtcacaggaaaagggaagactctgagcagtcagccaaagaaagcggatcccgcggctgttgtgaaaaggacgggttcgaatgctgcccagtacaagtatggcaagaaccgggtagaagcagatgccaagcggctacagaccaaagaggaggagctgctgaagaggaaagaggccctgcggaataggctggcccagctccgcaaggaaagaaaagaccttcgagcggctattgaagtgaacgccggcaggaagccgcaggcgatcctggaggagaagctgaagcagctggaggaggagtgccggcagaaggaggcggagcgtgtcagcctggagctggagctgacggaggtcaaggagagcctgaagaaagcgctggcgggcggagtcaccctggggctggccatcgagcccaagtcagggacatcgagtccacagtctccagtgttccggcaccggaccctggaaaactcgcccatctccagctgtgacaccagtgacaccgagggccccgtgccggtgaacagcgcggccgtcttgaagaagagccaggctgccccgggcagctccccctgccgagggcatgtgctgcggaaggccaaggaatgggaattgaagaacgggacctaggggacagcagcaccactccagcctcagagactgcacacccccttgcctgtatcctcatctgtgtgacggcaggaagctctgcccagagtggcctcagctgcacgactccagaggctccacgactgagctctgaggccagtgcctgtcccccaggcccacttgtattctttctactgtaaaatggcgcctttaaaaaag

SEQ ID NO: 721 - DNA, 2590 bp, Homo sapiens
  source 1..2590: mol_type = unassigned DNA
agcaatggaagagttaatagttgaacttcgtctctttcttgaactcctggaccatgaatatctaacctcaactgtcagggagaaaaaggcagtgataaccaacattctgctaagaatacagtcatccaaaggttttgatgtgaaggaccatgctcagaagcaggagaccgctaacagcctgccagcccctcctcagatgcccctgccggagatccctcagccctggctgcctcctgacagtgggcctccaccattgccaacatcctccctcccagaaggttattatgaggaagctgtgccgctgagccccggaaaagctccggaatacatcacatcaaattatgattccgatgcgatgagcagctcttatgagtcgtatgatgaagaggaggaggatgggaaggggaagaaaacccggcaccagtggccctccgaggaggcctccatggacctggtcaaggacgccaaaatctgcgccttcctgctgcggaagaagcggttcggccagtggaccaagttgctctgcgtcatcaaagacaccaaactgctgtgctataaaagttccaaggaccagcagcctcagatggaactgccactccaaggctgtaacattacgtacatcccgaaagacagcaaaaagaagaagcacgagctgaagattactcagcagggcacggacccgcttgttctcgccgtccagagcaaggaacaggccgagcagtggctgaaggtgatcaaagaagcctacagtggttgtagtggccccgtggattcagagtgtcctcctccaccaagctccccggtgcacaaggcagaactggagaagaaactgtcttcagagagacccagctcagatggggagggtgttgtggaaaatggaattaccacatgtaatggaaaggagcaagtgaagaggaagaaaagttccaaatcagaggccaagggcactgtgtcgaaagtcactgggaaaaaaatcaccaagatcatcagtctgggaaagaaaaagccgtccacagacgagcagacctcctcagctgaggaagatgttcccacctgcggctatctgaacgtgctctccaacagccgctggcgagagcgctggtgccgagtgaaagataacaagctcattttccacaaggacaggaccgacctgaagacccatattgtgtctattccgctccgtggctgcgaggtgatcccgggtttggattctaaacatcctctgacgttccggctgctgcgcaacggccaggaggttgcagtattggaggcatcttcttctgaagacatgggcaggtggattgggattttactcgcagagacgggatcgtccacagacccggaggctctgcactatgactacattgatgtggagatgtctgcaagtgtcattcagacagccaaacagaccttctgtttcatgaacaggcgtgttatatctgctaacccatatctagggggcacctccaacggctatgcccaccccagcgggacggcacttcattatgacgatgtcccgtgcatcaacggctcgtgggaaccggaagacggctttcctgcttcctgcagcagaggcttgggagaagaggtgctttatgataacgcaggcctgtacgataacttgccgcctccgcacatctttgcccgctactctcctgctgacagaaaggcctctaggctgtctgctgacaagctgtcctctaaccattacaaataccctgcctccgctcagtctgtcactaatacctcttctgtggggagggcgtctctcgggctcaactcgcagctcaagggtaaaaagccccccgtggcgtctaatggggtcacaggaaaagggaagactctgagcagtcagccaaagaaagcggatcccgcggctgttgtgaaaaggacgggttcgaatgctgcccagtacaagtatggcaagaaccgggtagaagcagatgccaagcggctacagaccaaagaggaggagctgctgaagaggaaagaggccctgcggaataggctggcccagctccgcaaggaaagaaaagaccttcgagcggctattgaagtgaacgccggcaggaagccgcaggcgatcctggaggagaagctgaagcagctggaggaggagtgccggcagaaggaggcggagcgtgtcagcctggagctggagctgacggaggtcaaggagagcctgaagaaagcgctggcgggcggagtcaccctggggctggccatcgagcccaagtcagggacatcgagtccacagtctccagtgttccggcaccggaccctggaaaactcgcccatctccagctgtgacaccagtgacaccgagggccccgtgccggtgaacagcgcggccgtcttgaagaagagccaggctgccccgggcagctccccctgccgagggcatgtgctgcggaaggccaaggaatgggaattgaagaacgggacctaggggacagcagcaccactccagcctcagagactgcacacccccttgcctgtatcctcatctgtgtgacggcaggaagctctgcccagagtggcctcagctgcacgactccagaggctccacgactgagctctgaggccagtg

SEQ ID NO: 722 - DNA, 546 bp, Homo sapiens
  source 1..546: mol_type = unassigned DNA
agacatgggcaggtggattgggattttactcgcagagacgggatcgtccacagacccggaggctctgcactatgactacattgatgtggagatgtctgcaagtgtcattcagacagccaaacagaccttctggtcctgccagatgagcctgtcagaggcatcctgcagtggctcttcccagcacagaagcaggagtggagccccccagggcctctgttctgaccccatcctttgtccctgctgcagcagggtgagtgcagggcatatgctggaaactgaagatgcaagcccgtgagagacgtgcctgccgctggaaggagaaagacccaaggcagtacggcccagggcacaggggaggggatggtccctgtggccaggctttattcattcctccatttactgcctctcgctgacagaaagtatacatagcgctgtctccctaaaagccttccaatgaggcatttaattagaaaaccttaaatatgtattttttaaaaatcaaaatcttttactgtggaactcttaaatgttcaagttttgctgtgc

SEQ ID NO: 723 - DNA, 356 bp, Homo sapiens
  source 1..356: mol_type = unassigned DNA
ggaattaccacatgtaatggaaaggagcaagtgaagaggaagaaaagttccaaatcagaggccaagggcactgtgtcgaaagtcactgggaaaaaaatcaccaagatcatcagtctgggaaagaaaaagccgtccacagacgagcagacctcctcagctgaggaagatgttcccacctgcggtaagactgcgcttcccggagacgagcagcgtgcacctaagtgggtttcattttctcctgcagtggtgtcggtacccagttcatccaaggctcgttaatttgagctcttttgcattggacttggaatcattcagatagtgggaaatgtattaaatgtttacatttttgcctctta

SEQ ID NO: 724 - DNA, 764 bp, Homo sapiens
  source 1..764: mol_type = unassigned DNA
gcttaggctggagtgcagtggcatgatcacagctcactgcagccttgacctcccaggctcaagtgatcctcttacctcagcctcccgagtagctgggactacagatgtacaccatcacacctggctaatttttgtattttttgtggagacggggtttttccatgtttcccaggctagtcttgaactcctgggcttaagtgattctcccacctcaccctcctgagtagcggggactacagatgtgagccaccacactcggcctgaaacagtgaagttttgataccaggcgttaccatcttcccatcgatgcatttcgccctttctcagcctcctgacagtgggcctccaccattgccaacatcctccctcccagaaggttattatgaggaagctgtgccgctgagccccggaaaagctccggaatacatcacatcaaattatgattccgatgcgatgagcagctcttatgagtcgtatgatgaagaggaggaggatgggaaggggaagaaaacccggcaccagtggccctccgaggaggcctccatggacctggtcaaggacgccaaaatctgcgccttcctgctgcggaagaagcggttcggccagtggaccaagttgctctgcgtcatcaaagacaccaaactgctgtgctataaaagttccaaggaccagcagcctcagatggaactgccactccaaggctgtaacattacgtacatcccgaaagacagcaaaaagaagaagcacgagctgaagattactca

SEQ ID NO: 725 - DNA, 758 bp, Homo sapiens
  source 1..758: mol_type = unassigned DNA
cccttggttgcatattgagtgtcagagatgttgtgcacgtggggatgccagcagggagaagcagattgcagccttgggaggtctttgacataaagattatgattccgatgcgatgagcagctcttatgagtcgtatgatgaagaggaggaggatgggaaggggaagaaaacccggcaccagtggccctccgaggaggcctccatggacctggtcaaggacgccaaaatctgcgccttcctgctgcggaagaagcggttcggccagtggaccaagttgctctgcgtcatcaaagacaccaaactgctggtaagacatttggaatcgcttgcattttttgtaagattgctgcactcagaagccatggcgtttatatccagtcaccattaacatcagctgtgcaggaagggcagcactcaggtgtcagccaggtgccctgagctagccgcagtaccatgccaggggcccccacatgccatcagggagcactcgcccgtgttgtgtgttcaaggttgccggtttcccagctccaaaagcagccagcgaacaaaatcattcccattcccgggcagggcctgtggtttgcgtctgtggaaatgcacaagattttaacttgccaggagttgcaagatggattttctcatttgtagtgagtcagtggattcctcaaagccagctcatagaagtgggacggggagcagccaggaaaggaaattcttctggaaagcttggggccaattcccatttttttttttttttt

SEQ ID NO: 726 - DNA, 7516 bp, Homo sapiens
  source 1..7516: mol_type = unassigned DNA
gggcgcccggctccgctgggggcgggacggcgggcggcgggcggggccgtgtgcgcctgcgtggtgtctgtcccggccgcagccccacgccggctgcagctccgcgagccgagccggatctcgagcggggtacacgggctgaggcggcggcggcggccccgccccggggctccattgttaaggcggctgcggctctgtcggctgttcagctgcgctccagtcggcccaggcgccgcggcgaggagcgagcgctgcgaggtggcggcctgagcaatggaagagttaatagttgaacttcgtctctttcttgaactcctggaccatgaatatctaacctcaactgtcagggagaaaaaggcagtgataaccaacattctgctaagaatacagtcatccaaaggttttgatgtgaaggaccatgctcagaagcaggagaccgctaacagcctgccagcccctcctcagatgcccctgccggagatccctcagccctggctgcctcctgacagtgggcctccaccattgccaacatcctccctcccagaaggttattatgaggaagctgtgccgctgagccccggaaaagctccggaatacatcacatcaaattatgattccgatgcgatgagcagctcttatgagtcgtatgatgaagaggaggaggatgggaaggggaagaaaacccggcaccagtggccctccgaggaggcctccatggacctggtcaaggacgccaaaatctgcgccttcctgctgcggaagaagcggttcggccagtggaccaagttgctctgcgtcatcaaagacaccaaactgctgtgctataaaagttccaaggaccagcagcctcagatggaactgccactccaaggctgtaacattacgtacatcccgaaagacagcaaaaagaagaagcacgagctgaagattactcagcagggcacggacccgcttgttctcgccgtccagagcaaggaacaggccgagcagtggctgaaggtgatcaaagaagcctacagtggttgtagtggccccgtggattcagagtgtcctcctccaccaagctccccggtgcacaaggcagaactggagaagaaactgtcttcagagagacccagctcagatggggagggtgttgtggaaaatggaattaccacatgtaatggaaaggagcaagtgaagaggaagaaaagttccaaatcagaggccaagggcactgtgtcgaaagtcactgggaaaaaaatcaccaagatcatcagtctgggaaagaaaaagccgtccacagacgagcagacctcctcagctgaggaagatgttcccacctgcggctatctgaacgtgctctccaacagccgctggcgagagcgctggtgccgagtgaaagataacaagctcattttccacaaggacaggaccgacctgaagacccatattgtgtctattccgctccgtggctgcgaggtgatcccgggtttggattctaaacatcctctgacgttccggctgctgcgcaacggccaggaggttgcagtattggaggcatcttcttctgaagacatgggcaggtggattgggattttactcgcagagacgggatcgtccacagacccggaggctctgcactatgactacattgatgtggagatgtctgcaagtgtcattcagacagccaaacagaccttctgtttcatgaacaggcgtgttatatctgctaacccatatctagggggcacctccaacggctatgcccaccccagcgggacggcacttcattatgacgatgtcccgtgcatcaacggctcgctcaagggtaaaaagccccccgtggcgtctaatggggtcacaggaaaagggaagactctgagcagtcagccaaagaaagcggatcccgcggctgttgtgaaaaggacgggttcgaatgctgcccagtacaagtatggcaagaaccgggtagaagcagatgccaagcggctacagaccaaagaggaggagctgctgaagaggaaagaggccctgcggaataggctggcccagctccgcaaggaaagaaaagaccttcgagcggctattgaagtgaacgccggcaggaagccgcaggcgatcctggaggagaagctgaagcagctggaggaggagtgccggcagaaggaggcggagcgtgtcagcctggagctggagctgacggaggtcaaggagagcctgaagaaagcgctggcgggcggagtcaccctggggctggccatcgagcccaagtcagggacatcgagtccacagtctccagtgttccggcaccggaccctggaaaactcgcccatctccagctgtgacaccagtgacaccgagggccccgtgccggtgaacagcgcggccgtcttgaagaagagccaggctgccccgggcagctccccctgccgagggcatgtgctgcggaaggccaaggaatgggaattgaagaacgggacctaggggacagcagcaccactccagcctcagagactgcacacccccttgcctgtatcctcatctgtgtgacggcaggaagctctgcccagagtggcctcagctgcacgactccagaggctccacgactgagctctgaggccagtgcctgtcccccaggcccacttgtattctttctactgtaaaatggcgcctttaaaaaagatgtaagactttggttcccaactttgttaaaaaacaaaaaaagtgatggaaaggtgtttgaaaggatgctatcaggcgaagtgacatctttctaaccagataggccattgctttcaccgattccaacccagccctggactgaggatggatggttccatgagcccccagatgaaaacctggattcgacagggaagagcttggatccccggctgccccgggcatgagtgtggctggccatgggcactgggctcgccttgcacgcccaccaggagggccaggggcatacgcagtcctgacgtggactttgtgtcttggcgtaccctctccacgtgcccgtccccctcgtcatcagaggtaaaggcatgagaaaatcgcgctgtgaaacgttttttaccttttattattattttttggacagatgcttttgtcaccaagacatgaaaagctgccattcttcttaacctgttttttaggaatgtctttttactgtgtgtcacacttagatcaaggagttttcagaggttccttattttattaattaattatttgtgctgcttttgacaggtagcagagggttttaatacttcactaacagtacaccctcctcccccttgggctagcatccccagcccttaatccacgtcggagccggcaggtgcttctcacaccaggagcctctgggggcaggggctggctcctcgccgctgtacaggacgtttactgctgcttggggccagggcagtcctttgaaagggaagcaagttccggaatttgttcgctcatggaactataacaccttagagcaagaggcaggaattccagggcctcctgcccctccccttcctccagcttgtcaagttaaaccactaatgtgttggtgggcctggccgtgctgcctctcctgagtagggtgggtgcaagtagggcctctttcccagctttcttgcttgccttctgtgcaatatttcttggagaatttggatgcctaaggcataaaggaaaaaaacagagttcatagtttgagctggtatttaccccctgggtttaaaaatcagattaacttcttggtctcccggaggctgctgtcaggaattctccagtacgggaagatgcagtcacttatgacgaaataagtcacccctgaacgcctccgcaggcagattcatggagaccagtcccagtagcaaccgccccttccccaagcatagaatacagaggtgccatacttggtgtaagccttccttctgtccactgtccagaatgtcctttttcacacagaggaagagatggcgggaaaacactgactgactccttgggtttcccccagacatactttcagagcgctagctgtgtggtgcacgggactttacagttaggattcatgtttaaggtggtggcgcttgaggcctgcaagggccacgttggattactgaagcggaaagcggtctcccatgtataagaaaaagttttacaacacgaattggaagctgcttgagtccacctgaacttgaattgattgcaaagccatctgctgggaacggttttgggttcctgagccatcagccagcctttctttcccctctgatgcacgttcctcccggcctagtccgtggaggcccatcacaccagcatccgtgacgccagcttcccactaggacatccaggcaggtcgggcggggacgccacacacctcagggccgtccgctgcattgccatagaggagccctccctccagtggtcacttcccaccattgcaggcagacttcccaccattgcaggcagctgggcccacttcatatcacacaaaatgaattttctataaagggaaaaaagtttgctcctccatagatttttgctgccttcgggtcaaatagtttccctggttgacactcttgggccactctgattggcagcctgctttgccaaagagaactgtgtgaggttttggtggttagtaagagaagggggagatggccagcctgaagtcacggtcctggcccagcacaggtgggcagcagcgagctggcaggtgaagtgtgagcagcacgcaaagtgtcacgtgggccttagccgtcacccaccagcttcctcaccaggcaaggaggccccggagccttagcagggacttgcccaacggcacagctgattggtgctcgactcccagcatgcatattttgttgtaaaaacccaggtttgtaattcacatccacaaccctaagccttttaaagcggaggcaaacgttaacaaaccccatcgtggtccatggagcctttcaaaatgggtgccctggaggggcctgacagtgggttccttccatggcggatactcccttgaaatttcacattccatcaaagtttaaagcatttacttcagaataagttatttatgtgtatatgttcaataaatatagtttttaatttatatctgtacatattagacacacgcgagccatcttgccagaattctgacagtgatgtcattttattcccctcccaaaacatgccccaggaacaagcaccccttgcctctgtggcagctgcgagtgtgtctgatttcataacgaagccaggctgagggcaagaggcccgacaggcaggccagggtccccggagaagccggatttcttcgcaatgtcactggtacttagcagatggtcgtgttcacaggggctagccacctgtactacggtgccgaccgcaatgcgaggaatgtggtggccacgcgatggagctggccggaggacaggtcaggtgagggggccgacccctgcggggctcagggctccttccattctaaccttgagccacagtgtcactcttcagggctctgctcctggctctattttgttaaggtgtcatcagccttcaacctccatttatatatttttataatgttaagccactgaccaactttttcatagaaacaactatcagattcgagggctccctttgtccccctgacctgggcacaggcatgggcgatggctccctcttcccagaatctgcggggaactggggcaaggcccatctgtctgcaaggctggtagctctctccctcggcttccagagtccacggcagttgcaaggtaaccagtgtggatctgctgagtcaccccaggcaccagacttaccccaggagcatgggccactgtccatggggccttccttgagaccttcccttggggctggcgggcggcggcttaccagctgggtcagtcccatctcgcccctctgtgcctatgccctggcgttgccaggcttaaccttcccctgtatcttactcatcccagaattattactggccatttctaaatagacaaaaactaccctaaaatgtggagatttactccttttgaaaagtctgtttcaaaaagtgtggcctcagctctggaggccacccccaggaaggagtttgaggttcattgtcattatggccacagtttggtgcttgtgcacgggactcaaagggcagcgtcgaagctggggttaggtgtagggttgtgagcaaagctcccctgtttgtggccacaccttccctttccaaaaaggctattaattctactcacccactatttggggggatgtaaattttgcccacagactttgccacccaggtgaggtgctgtgttcatgcacggaactgatgtcattagacaccatccaaggatgggcagcctgcagtgtggccggcgactgccatccagagaaaaggcaccttgtgccacagggcggggccgacaccctgagctcacaggtggcccctgcattcaggtggatgtccatccttgaaacagcctcttctgggaacacagcactggaggtctccaggcatcagggttggccggcagggtgccctgcagcttacataaaggtcgtggcaatgtttcaatgttaaactaaactattgccttcctcttacttttcctaaaatgattttctaatgggaacagtcacttcaagttcatgacatagtttgaaggaggataattcattttttcctggttgtcactgtcttcttatccccttggtgggctgggttcatactgtgaaataaactaaaatgaaaccaaaacgttcctgccgtaaatacgtggcacagcactgcagaaaaagcagtcacctctattcgtgagtccccaagccatagcagggcgtctgtaaaagaagggaaactgcacccaggaagtggtgggcgtcagacgcatcctttcgcccgtagttcatgaaatagttccggctttggtcttccagaaaatctcaacttcaccgtgcacaagtgttaccgggtctttttagtgtagccatggaagatactttcaaaaggacatcttcagatcataagtcttaggaccaaaggtgtttttaatgagataatctttttgattttctaacaagaaaggaaatattcactttacattttaacatcaacttttaagtgatattcagaattaattgaccatggtgatacgttgtaaaatgttttcatattaagaatgtaattatttccttattgtattttttaaaagctaaagtcatatttaaaattctctttgaaagaaacaggcaaagaaacagcaaagatttttttaaattaaatatgttagtagtgcccacttcaaatgactgtaaatatattttcactgtttctcaatgtatttaattcataaagtaaaaattttatgaaaagaaacttgcaaggaaaatcctagttttcagtccactcgccccactttgtagtagcttcactgaatttcctgctttcctggttgaattttctactgtttcacgtggtgtaaccctagactggcgcccttggcgtgcccctttgtgtatgaataaacttctctccccc

SEQ ID NO: 727 - DNA, 7768 bp, Homo sapiens
  source 1..7768: mol_type = unassigned DNA
gggcgcccggctccgctgggggcgggacggcgggcggcgggcggggccgtgtgcgcctgcgtggtgtctgtcccggccgcagccccacgccggctgcagctccgcgagccgagccggatctcgagcggggtacacgggctgaggcggcggcggcggccccgccccggggctccattgttaaggcggctgcggctctgtcggctgttcagctgcgctccagtcggcccaggcgccgcggcgaggagcgagcgctgcgaggtggcggcctgagcaatggaagagttaatagttgaacttcgtctctttcttgaactcctggaccatgaatatctaacctcaactgtcagggagaaaaaggcagtgataaccaacattctgctaagaatacagtcatccaaaggttttgatgtgaaggaccatgctcagaagcaggagaccgctaacagcctgccagcccctcctcagatgcccctgccggagatccctcagccctggctgcctcctgacagtgggcctccaccattgccaacatcctccctcccagaaggttattatgaggaagctgtgccgctgagccccggaaaagctccggaatacatcacatcaaattatgattccgatgcgatgagcagctcttatgagtcgtatgatgaagaggaggaggatgggaaggggaagaaaacccggcaccagtggccctccgaggaggcctccatggacctggtcaaggacgccaaaatctgcgccttcctgctgcggaagaagcggttcggccagtggaccaagttgctctgcgtcatcaaagacaccaaactgctgtgctataaaagttccaaggaccagcagcctcagatggaactgccactccaaggctgtaacattacgtacatcccgaaagacagcaaaaagaagaagcacgagctgaagattactcagcagggcacggacccgcttgttctcgccgtccagagcaaggaacaggccgagcagtggctgaaggtgatcaaagaagcctacagtggttgtagtggccccgtggattcagagtgtcctcctccaccaagctccccggtgcacaaggcagaactggagaagaaactgtcttcagagagacccagctcagatggggagggtgttgtggaaaatggaattaccacatgtaatggaaaggagcaagtgaagaggaagaaaagttccaaatcagaggccaagggcactgtgtcgaaagtcactgggaaaaaaatcaccaagatcatcagtctgggaaagaaaaagccgtccacagacgagcagacctcctcagctgaggaagatgttcccacctgcggctatctgaacgtgctctccaacagccgctggcgagagcgctggtgccgagtgaaagataacaagctcattttccacaaggacaggaccgacctgaagacccatattgtgtctattccgctccgtggctgcgaggtgatcccgggtttggattctaaacatcctctgacgttccggctgctgcgcaacggccaggaggttgcagtattggaggcatcttcttctgaagacatgggcaggtggattgggattttactcgcagagacgggatcgtccacagacccggaggctctgcactatgactacattgatgtggagatgtctgcaagtgtcattcagacagccaaacagaccttctgtttcatgaacaggcgtgttatatctgctaacccatatctagggggcacctccaacggctatgcccaccccagcgggacggcacttcattatgacgatgtcccgtgcatcaacggctcgtgggaaccggaagacggctttcctgcttcctgcagcagaggcttgggagaagaggtgctttatgataacgcaggcctgtacgataacttgccgcctccgcacatctttgcccgctactctcctgctgacagaaaggcctctaggctgtctgctgacaagctgtcctctaaccattacaaataccctgcctccgctcagtctgtcactaatacctcttctgtggggagggcgtctctcgggctcaactcgcagctcaagggtaaaaagccccccgtggcgtctaatggggtcacaggaaaagggaagactctgagcagtcagccaaagaaagcggatcccgcggctgttgtgaaaaggacgggttcgaatgctgcccagtacaagtatggcaagaaccgggtagaagcagatgccaagcggctacagaccaaagaggaggagctgctgaagaggaaagaggccctgcggaataggctggcccagctccgcaaggaaagaaaagaccttcgagcggctattgaagtgaacgccggcaggaagccgcaggcgatcctggaggagaagctgaagcagctggaggaggagtgccggcagaaggaggcggagcgtgtcagcctggagctggagctgacggaggtcaaggagagcctgaagaaagcgctggcgggcggagtcaccctggggctggccatcgagcccaagtcagggacatcgagtccacagtctccagtgttccggcaccggaccctggaaaactcgcccatctccagctgtgacaccagtgacaccgagggccccgtgccggtgaacagcgcggccgtcttgaagaagagccaggctgccccgggcagctccccctgccgagggcatgtgctgcggaaggccaaggaatgggaattgaagaacgggacctaggggacagcagcaccactccagcctcagagactgcacacccccttgcctgtatcctcatctgtgtgacggcaggaagctctgcccagagtggcctcagctgcacgactccagaggctccacgactgagctctgaggccagtgcctgtcccccaggcccacttgtattctttctactgtaaaatggcgcctttaaaaaagatgtaagactttggttcccaactttgttaaaaaacaaaaaaagtgatggaaaggtgtttgaaaggatgctatcaggcgaagtgacatctttctaaccagataggccattgctttcaccgattccaacccagccctggactgaggatggatggttccatgagcccccagatgaaaacctggattcgacagggaagagcttggatccccggctgccccgggcatgagtgtggctggccatgggcactgggctcgccttgcacgcccaccaggagggccaggggcatacgcagtcctgacgtggactttgtgtcttggcgtaccctctccacgtgcccgtccccctcgtcatcagaggtaaaggcatgagaaaatcgcgctgtgaaacgttttttaccttttattattattttttggacagatgcttttgtcaccaagacatgaaaagctgccattcttcttaacctgttttttaggaatgtctttttactgtgtgtcacacttagatcaaggagttttcagaggttccttattttattaattaattatttgtgctgcttttgacaggtagcagagggttttaatacttcactaacagtacaccctcctcccccttgggctagcatccccagcccttaatccacgtcggagccggcaggtgcttctcacaccaggagcctctgggggcaggggctggctcctcgccgctgtacaggacgtttactgctgcttggggccagggcagtcctttgaaagggaagcaagttccggaatttgttcgctcatggaactataacaccttagagcaagaggcaggaattccagggcctcctgcccctccccttcctccagcttgtcaagttaaaccactaatgtgttggtgggcctggccgtgctgcctctcctgagtagggtgggtgcaagtagggcctctttcccagctttcttgcttgccttctgtgcaatatttcttggagaatttggatgcctaaggcataaaggaaaaaaacagagttcatagtttgagctggtatttaccccctgggtttaaaaatcagattaacttcttggtctcccggaggctgctgtcaggaattctccagtacgggaagatgcagtcacttatgacgaaataagtcacccctgaacgcctccgcaggcagattcatggagaccagtcccagtagcaaccgccccttccccaagcatagaatacagaggtgccatacttggtgtaagccttccttctgtccactgtccagaatgtcctttttcacacagaggaagagatggcgggaaaacactgactgactccttgggtttcccccagacatactttcagagcgctagctgtgtggtgcacgggactttacagttaggattcatgtttaaggtggtggcgcttgaggcctgcaagggccacgttggattactgaagcggaaagcggtctcccatgtataagaaaaagttttacaacacgaattggaagctgcttgagtccacctgaacttgaattgattgcaaagccatctgctgggaacggttttgggttcctgagccatcagccagcctttctttcccctctgatgcacgttcctcccggcctagtccgtggaggcccatcacaccagcatccgtgacgccagcttcccactaggacatccaggcaggtcgggcggggacgccacacacctcagggccgtccgctgcattgccatagaggagccctccctccagtggtcacttcccaccattgcaggcagacttcccaccattgcaggcagctgggcccacttcatatcacacaaaatgaattttctataaagggaaaaaagtttgctcctccatagatttttgctgccttcgggtcaaatagtttccctggttgacactcttgggccactctgattggcagcctgctttgccaaagagaactgtgtgaggttttggtggttagtaagagaagggggagatggccagcctgaagtcacggtcctggcccagcacaggtgggcagcagcgagctggcaggtgaagtgtgagcagcacgcaaagtgtcacgtgggccttagccgtcacccaccagcttcctcaccaggcaaggaggccccggagccttagcagggacttgcccaacggcacagctgattggtgctcgactcccagcatgcatattttgttgtaaaaacccaggtttgtaattcacatccacaaccctaagccttttaaagcggaggcaaacgttaacaaaccccatcgtggtccatggagcctttcaaaatgggtgccctggaggggcctgacagtgggttccttccatggcggatactcccttgaaatttcacattccatcaaagtttaaagcatttacttcagaataagttatttatgtgtatatgttcaataaatatagtttttaatttatatctgtacatattagacacacgcgagccatcttgccagaattctgacagtgatgtcattttattcccctcccaaaacatgccccaggaacaagcaccccttgcctctgtggcagctgcgagtgtgtctgatttcataacgaagccaggctgagggcaagaggcccgacaggcaggccagggtccccggagaagccggatttcttcgcaatgtcactggtacttagcagatggtcgtgttcacaggggctagccacctgtactacggtgccgaccgcaatgcgaggaatgtggtggccacgcgatggagctggccggaggacaggtcaggtgagggggccgacccctgcggggctcagggctccttccattctaaccttgagccacagtgtcactcttcagggctctgctcctggctctattttgttaaggtgtcatcagccttcaacctccatttatatatttttataatgttaagccactgaccaactttttcatagaaacaactatcagattcgagggctccctttgtccccctgacctgggcacaggcatgggcgatggctccctcttcccagaatctgcggggaactggggcaaggcccatctgtctgcaaggctggtagctctctccctcggcttccagagtccacggcagttgcaaggtaaccagtgtggatctgctgagtcaccccaggcaccagacttaccccaggagcatgggccactgtccatggggccttccttgagaccttcccttggggctggcgggcggcggcttaccagctgggtcagtcccatctcgcccctctgtgcctatgccctggcgttgccaggcttaaccttcccctgtatcttactcatcccagaattattactggccatttctaaatagacaaaaactaccctaaaatgtggagatttactccttttgaaaagtctgtttcaaaaagtgtggcctcagctctggaggccacccccaggaaggagtttgaggttcattgtcattatggccacagtttggtgcttgtgcacgggactcaaagggcagcgtcgaagctggggttaggtgtagggttgtgagcaaagctcccctgtttgtggccacaccttccctttccaaaaaggctattaattctactcacccactatttggggggatgtaaattttgcccacagactttgccacccaggtgaggtgctgtgttcatgcacggaactgatgtcattagacaccatccaaggatgggcagcctgcagtgtggccggcgactgccatccagagaaaaggcaccttgtgccacagggcggggccgacaccctgagctcacaggtggcccctgcattcaggtggatgtccatccttgaaacagcctcttctgggaacacagcactggaggtctccaggcatcagggttggccggcagggtgccctgcagcttacataaaggtcgtggcaatgtttcaatgttaaactaaactattgccttcctcttacttttcctaaaatgattttctaatgggaacagtcacttcaagttcatgacatagtttgaaggaggataattcattttttcctggttgtcactgtcttcttatccccttggtgggctgggttcatactgtgaaataaactaaaatgaaaccaaaacgttcctgccgtaaatacgtggcacagcactgcagaaaaagcagtcacctctattcgtgagtccccaagccatagcagggcgtctgtaaaagaagggaaactgcacccaggaagtggtgggcgtcagacgcatcctttcgcccgtagttcatgaaatagttccggctttggtcttccagaaaatctcaacttcaccgtgcacaagtgttaccgggtctttttagtgtagccatggaagatactttcaaaaggacatcttcagatcataagtcttaggaccaaaggtgtttttaatgagataatctttttgattttctaacaagaaaggaaatattcactttacattttaacatcaacttttaagtgatattcagaattaattgaccatggtgatacgttgtaaaatgttttcatattaagaatgtaattatttccttattgtattttttaaaagctaaagtcatatttaaaattctctttgaaagaaacaggcaaagaaacagcaaagatttttttaaattaaatatgttagtagtgcccacttcaaatgactgtaaatatattttcactgtttctcaatgtatttaattcataaagtaaaaattttatgaaaagaaacttgcaaggaaaatcctagttttcagtccactcgccccactttgtagtagcttcactgaatttcctgctttcctggttgaattttctactgtttcacgtggtgtaaccctagactggcgcccttggcgtgcccctttgtgtatgaataaacttctctccccc

SEQ ID NO: 728 - DNA, 1289 bp, Homo sapiens
  source 1..1289: mol_type = unassigned DNA
ccgctgggctggcctgagagcgcagcgcgccggccgctaccagccgcgccggagcccctgcgccctgcggcccgctccccggggaccgggccggcgccatggaccgaggccaggtgctggagcagctgctcccagagctcaccgggctgctcagcctcctggaccacgagtacctcagcgataccaccctggaaaagaagatggccgtggcctccatcctgcagagcctgcagccccttccagcaaaggaggtctcctacctgtatgtgaacacagcagacctccactcggggcccagcttcgtggaatccctctttgaagaatttgactgtgacctgagtgaccttcgggacatgccagaggatgatggggagcccagcaaaggagccagccctgagctagccaagagcccacgcctgagaaacgcggccgacctgcctccaccgctccccaacaagcctccccctgaggactactatgaagaggcccttcctctgggacccggcaagtcgcctgagtacatcagctcccacaatggctgcagcccctcacactcgattgtggatggctactatgaggacgcagacagcagctaccctgcaaccagggtgaacggcgagcttaagagctcctataatgactctgacgcaatgagcagctcctatgagtcctacgatgaagaggaggaggaagggaagagcccgcagccccgacaccagtggccctcagaggaggcctccatgcacctggtgagggaatgcaggatatgtgccttcctgctgcggaaaaagcgtttcgggcagtgggccaagcagctgacggtcatcagggaggaccagctcctgtgttacaaaagctccaaggatcggcagccacatctgaggttggcactggatacctgcagcatcatctacgtgcccaaggacagccggcacaagaggcacgagctgcgtttcacccagggggctaccgaggtcttggtgctggcactgcagagccgagagcaggccgaggagtggctgaaggtcatccgagaagtgagcaagccagttgggggagctgagggagtggaggtccccagatccccagtcctcctgtgcaagttggacctggacaaggtatatctgtctccactaagtcttccccaggccaggcagtggccactcaacacgggctcaaccccaggggaactaactggctggggggaaagtcaggcaactgccaaactgtaggtgcccagcacagagctggcacaacagtaggtgcttaataaatgtctcctgaattca

SEQ ID NO: 729 - DNA, 4177 bp, Homo sapiens
  source 1..4177: mol_type = unassigned DNA
ccgctgggctggcctgagagcgcagcgcgccggccgctaccagccgcgccggagcccctgcgccctgcggcccgctccccggggaccgggccggcgccatggaccgaggccaggtgctggagcagctgctcccagagctcaccgggctgctcagcctcctggaccacgagtacctcagcgataccaccctggaaaagaagatggccgtggcctccatcctgcagagcctgcagccccttccagcaaaggaggtctcctacctgtatgtgaacacagcagacctccactcggggcccagcttcgtggaatccctctttgaagaatttgactgtgacctgagtgaccttcgggacatgccagaggatgatggggagcccagcaaaggagccagccctgagctagccaagagcccacgcctgagaaacgcggccgacctgcctccaccgctccccaacaagcctccccctgaggactactatgaagaggcccttcctctgggacccggcaagtcgcctgagtacatcagctcccacaatggctgcagcccctcacactcgattgtggatggctactatgaggacgcagacagcagctaccctgcaaccagggtgaacggcgagcttaagagctcctataatgactctgacgcaatgagcagctcctatgagtcctacgatgaagaggaggaggaagggaagagcccgcagccccgacaccagtggccctcagaggaggcctccatgcacctggtgagggaatgcaggatatgtgccttcctgctgcggaaaaagcgtttcgggcagtgggccaagcagctgacggtcatcagggaggaccagctcctgtgttacaaaagctccaaggatcggcagccacatctgaggttggcactggatacctgcagcatcatctacgtgcccaaggacagccggcacaagaggcacgagctgcgtttcacccagggggctaccgaggtcttggtgctggcactgcagagccgagagcaggccgaggagtggctgaaggtcatccgagaagtgagcaagccagttgggggagctgagggagtggaggtccccagatccccagtcctcctgtgcaagttggacctggacaagaggctgtcccaagagaagcagacctcagattctgacagcgtgggtgtgggtgacaactgttctacccttggccgccgggagacctgtgatcacggcaaagggaagaagagcagcctggcagaactgaagggctcaatgagcagggctgcgggccgcaagatcacccgtatcattggcttctccaagaagaagacactggccgatgacctgcagacgtcctccaccgaggaggaggttccctgctgtggctacctgaacgtgctggtgaaccagggctggaaggaacgctggtgccgcctgaagtgcaacactctgtatttccacaaggatcacatggacctgcgaacccatgtgaacgccatcgccctgcaaggctgtgaggtggccccgggctttgggccccgacacccatttgccttcaggatcctgcgcaaccggcaggaggtggccatcttggaggcaagctgttcagaggacatgggtcgctggctcgggctgctgctggtggagatgggctccagagtcactccggaggcgctgcactatgactacgtggatgtggagaccttaaccagcatcgtcagtgctgggcgcaactccttcctatatgcaagatcctgccagaatcagtggcctgagccccgagtctatgatgatgttccttatgaaaagatgcaggacgaggagcccgagcgccccacaggggcccaggtgaagcgtcacgcctcctcctgcagtgagaagtcccatcgtgtggacccgcaggtcaaagtcaaacgccacgcctccagtgccaatcaatacaagtatggcaagaaccgagccgaggaggatgcccggaggtacttggtagaaaaagagaagctggagaaagagaaagagacgattcggacagagctgatagcactgagacaggagaagagggaactgaaggaagccattcggagcagcccaggagcaaaattaaaggctctggaagaagccgtggccaccctggaagctcagtgtcgggcaaaggaggagcgccggattgacctggagctgaagctggtggctgtgaaggagcgcttgcagcagtccctggcaggagggccagccctggggctctccgtgagcagcaagcccaagagtggggaaactgcaaataaaccccagaacagcgttccagagcaacctctccctgtcaactgtgtttctgagctgaggaagaggagcccatccatcgtagcctccaaccaaggaagggtgctacagaaagccaaggaatgggaaatgaagaagacctaggaagaggatgaggatttcattccaaaggaaataccagcttgtccacctgaggaagaaatgcttttttcacaaggagacaccaagagaagactaggaagtagccctcgttctccagggcacccaaaataccagcctttattgtctgcatgattttaggggatatggggagggaacaagtagaagggaagagggaaatggagagcatccttatgactttacaaagggtggaaatgaggatggagggatacagaagtctgcacagctgtaaaggttttatagatgtctttgccttcccttctgaggaagggaagaagtaatgaaagcacatgtgaataaccccttccatcccattcacagcatcgcactcccagtccttaaggcaaagggaggcagtgctgaagcattggtggtgcagtgtaaagagacaagacctgatcatctgatcacacttgtgccaacttgattcatattgggcattactaacaacccctggtcaaggtaaataggttgaacaatcaataacattatccctgcctgcatacatgtgaacaaaagctatagaggacatgcaaattctacagtcattcctcatatgctttagacagagtgcagctactggaatcttccagatttcagtgttttaaaatcagagctctgaatacacaaaaggaaagagaaatggagcagctgacatattttaagctcacagtgatactcagtgacaggagcacagagctctaatgtccacaggatgttgtagggtagggtctctcagtaaatcaagtcccttacctatgttctgacactgaggctcttggagctatgggttagaaatccaggaggcaatatgtctttattctaatgaagtcctcatcttgcactcagaggcccactagtttgcccttctatatattaagtaaaaccaagagaaattaagaggatgatggcttctttctgtcacatgggtgctaaaccttttacaaacacttgatacttctatagagggaccaaggacctcaagtcctgggcagtctccttactgtgctactcactactgtctcaacactgtagtgagtctgtctttaacacatttccttccaataaagataaaaccacttaactcttaagtgccagtgcttagctcaagaggaaagaaggaaaatcccagaataaccgtggccactttgctataggggttacatattttaacccacctaaggttttacagactttagcctcactcaaactttatcaccctctgaggtagctggagaccacagcaggaaaaataacctgaccagtaatcacccactgattagtggcagagcgtaggacttaggggttataagcccagatccagatagggctaggtttgagccatgcctctaatgaccagctgggtgaccttgggaaagtcacttgattgctctgattcttgttttccttatctgtgaaatgggactaacaattgttacttttctcccaagattgttgggaagatttaataagataatatatagtaggcatcttgcatagtgtctgagaaataagaaatgctcagtcaatagtggctctcattagccaggcatggtggtactcgcctgtagtcccagctactcaggaggctgaggcaggaggaccgcttgagcccaggagtttgagactgtagtgcactatgatcacgcctgtgaattgccactgcactccagcctaagcaaatagcaagaccccatctattaaaaaaaaaaagtggctattattagctatatcag

SEQ ID NO: 730 - DNA, 871 bp, Homo sapiens
  source 1..871: mol_type = unassigned DNA
gcgcgccggccgctaccagccgcgccggagcccctgcgccctgcggcccgctccccggggaccgggccggcgccatggaccgaggccaggtgctggagcagctgctcccagagctcaccgggctgctcagcctcctggaccacgagtacctcagcgataccaccctggaaaagaagatggccgtggcctccatcctgcagagcctgcagccccttccagcaaaggaggtctcctacctgtatgtgaacacagcagacctccactcggggcccagcttcgtggaatccctctttgaagaatttgactgtgacctgagtgaccttcgggacatgccagaggatgatggggagcccagcaaaggagccagccctgagctagccaagagcccacgcctgagaaacgcggccgacctgcctccaccgctccccaacaagcctccccctgaggactactatgaagaggcccttcctctgggacccggcaagtcgcctgagtacatcagctcccacactgatggaccttgggctgattgcaccttttggctatggtgcttggatcagatggctgcagcccctcacactcgattgtggatggctactatgaggacgcagacagcagctaccctgcaaccagggtgaacggcgagcttaagagctcctataatgactctgacgcaatgagcagctcctatgagtcctacgatgaagaggaggaggaagggaagagcccgcagccccgacaccagtggccctcagaggaggcctccatgcacctggtgagggaatgcaggatatgtgccttcctgctgcggaaaaagcgtttcgggcagtgggccaagcagctgacggtcatcagggaggaccagctcctg

SEQ ID NO: 731 - DNA, 2319 bp, Homo sapiens
  source 1..2319: mol_type = unassigned DNA
ccggagcccctgcgccctgcggcccgctccccggggaccgggccggcgccatggaccgaggccaggtgctggagcagctgctcccagagctcaccgggctgctcagcctcctggaccacgagtacctcagcgataccaccctggaaaagaagatggccgtggcctccatcctgcagagcctgcagccccttccagcaaaggaggtctcctacctgtatgtgaacacagcagacctccactcggggcccagcttcgtggaatccctctttgaagaatttgactgtgacctgagtgaccttcgggacatgccagaggatgatggggagcccagcaaaggagccagccctgagctagccaagagcccacgcctgagaaacgcggccgacctgcctccaccgctccccaacaagcctccccctgaggactactatgaagaggcccttcctctgggacccggcaagtcgcctgagtacatcagctcccacaatggctgcagcccctcacactcgattgtggatggctactatgaggacgcagacagcagctaccctgcaaccagggtgaacggcgagcttaagagctcctataatgactctgacgcaatgagcagctcctatgagtcctacgatgaagaggaggaggaagggaagagcccgcagccccgacaccagtggccctcagaggaggcctccatgcacctggtgagggaatgcaggatatgtgccttcctgctgcggaaaaagcgtttcgggcagtgggccaagcagctgacggtcatcagggaggaccagctcctgtgttacaaaagctccaaggatcggcagccacatctgaggttggcactggatacctgcagcatcatctacgtgcccaaggacagccggcacaagaggcacgagctgcgtttcacccagggggctaccgaggtcttggtgctggcactgcagagccgagagcaggccgaggagtggctgaaggtcatccgagaagtgagcaagccagttgggggagctgagggagtggaggtccccagatccccagtcctcctgtgcaagttggacctggacaagaggctgtcccaagagaagcagacctcagattctgacagcgtgggtgtgggtgacaactgttctacccttggccgccgggagacctgtgatcacggcaaagggaagaagagcagcctggcagaactgaagggctcaatgagcagggctgcgggccgcaagatcacccgtatcattggcttctccaagaagaagacactggccgatgacctgcagacgtcctccaccgaggaggaggttccctgctgtggctacctgaacgtgctggtgaaccagggctggaaggaacgctggtgccgcctgaagtgcaacactctgtatttccacaaggatcacatggacctgcgaacccatgtgaacgccatcgccctgcaaggctgtgaggtggccccgggctttgggccccgacacccatttgccttcaggatcctgcgcaaccggcaggaggtggccatcttggaggcaagctgttcagaggacatgggtcgctggctcgggctgctgctggtggagatgggctccagagtcactccggaggcgctgcactatgactacgtggatgtggagaccttaaccagcatcgtcagtgctgggcgcaactccttcctatatgcaagatcctgccagaatcagtggcctgagccccgagtctatgatgatgttccttatgaaaagatgcaggacgaggagcccgagcgccccacaggggcccaggtgaagcgtcacgcctcctcctgcagtgagaagtcccatcgtgtggacccgcaggtcaaagtcaaacgccacgcctccagtgccaatcaatacaagtatggcaagaaccgagccgaggaggatgcccggaggtacttggtagaaaaagagaagctggagaaagagaaagagacgattcggacagagctgatagcactgagacaggagaagagggaactgaaggaagccattcggagcagcccaggagcaaaattaaaggctctggaagaagccgtggccaccctggaagctcagtgtcgggcaaaggaggagcgccggattgacctggagctgaagctggtggctgtgaaggagcgcttgcagcagtccctggcaggagggccagccctggggctctccgtgagcagcaagcccaagagtggggaatgggaaatgaagaagacctaggaagaggatgaggatttcattccaaaggaaataccagcttgtccacctgaggaagaaatgcttttttcacaaggagacaccaagagaagac

SEQ ID NO: 732 - DNA, 291 bp, Homo sapiens
  source 1..291: mol_type = unassigned DNA
agccagccctgagctagccaagagcccacgcctgagaaacgcggccgacctgcctccaccgctccccaacaagcctccccctgaggactactatgaagaggcccttcctctgggacccggcaagtcgcctgagtacatcagctcccacagtaagttctggtcctcttggtggggctggggacttcctgtccctgagaagccaaatttaagttcctctgtgtcctgtgggagctggaactgcaagcctgtcaccctcccaaccatgtcaccattggcttaggagaagctacc

SEQ ID NO: 733 - DNA, 3240 bp, Homo sapiens
  source 1..3240: mol_type = unassigned DNA
ctaagtcatggttgtcttttcaatacctggtatggtatgaggcacaggatagttgctgacaaacatttgttagctaattatcatgtgctgggggagttggagggagattgaaccaataaagggaaatttgggtacttctgaatgtgccctctgatgagggactgcctgtgtccctcctcagaggctgtcccaagagaagcagacctcagattctgacagcgtgggtgtgggtgacaactgttctacccttggccgccgggagacctgtgatcacggcaaagggaagaagagcagcctggcagaactgaagggctcaatgagcagggctgcgggccgcaagatcacccgtatcattggcttctccaagaagaagacactggccgatgacctgcagacgtcctccaccgaggaggaggttccctgctgtggctacctgaacgtgctggtgaaccagggctggaaggaacgctggtgccgcctgaagtgcaacactctgtatttccacaaggatcacatggacctgcgaacccatgtgaacgccatcgccctgcaaggctgtgaggtggccccgggctttgggccccgacacccatttgccttcaggatcctgcgcaaccggcaggaggtggccatcttggaggcaagctgttcagaggacatgggtcgctggctcgggctgctgctggtggagatgggctccagagtcactccggaggcgctgcactatgactacgtggatgtggagaccttaaccagcatcgtcagtgctgggcgcaactccttcctatatgcaagatcctgccagaatcagtggcctgagccccgagtctatgatgatgttccttatgaaaagatgcaggacgaggagcccgagcgccccacaggggcccaggtgaagcgtcacgcctcctcctgcagtgagaagtcccatcgtgtggacccgcaggtcaaagtcaaacgccacgcctccagtgccaatcaatacaagtatggcaagaaccgagccgaggaggatgcccggaggtacttggtagaaaaagagaagctggagaaagagaaagagacgattcggacagagctgatagcactgagacaggagaagagggaactgaaggaagccattcggagcagcccaggagcaaaattaaaggctctggaagaagccgtggccaccctggaagctcagtgtcgggcaaaggaggagcgccggattgacctggagctgaagctggtggctgtgaaggagcgcttgcagcagtccctggcaggagggccagccctggggctctccgtgagcagcaagcccaagagtggggaaactgcaaataaaccccagaacagcgttccagagcaacctctccctgtcaactgtgtttctgagctgaggaagaggagcccatccatcgtagcctccaaccaaggaagggtgctacagaaagccaaggaatgggaaatgaagaagacctaggaagaggatgaggatttcattccaaaggaaataccagcttgtccacctgaggaagaaatgcttttttcacaaggagacaccaagagaagactaggaagtagccctcgttctccagggcacccaaaataccagcctttattgtctgcatgattttaggggatatggggagggaacaagtagaagggaagagggaaatggagagcatccttatgactttacaaagggtggaaatgaggatggagggatacagaagtctgcacagctgtaaaggttttatagatgtctttgccttcccttctgaggaagggaagaagtaatgaaagcacatgtgaataaccccttccatcccattcacagcatcgcactcccagtccttaaggcaaagggaggcagtgctgaagcattggtggtgcagtgtaaagagacaagacctgatcatctgatcacacttgtgccaacttgattcatattgggcattactaacaacccctggtcaaggtaaataggttgaacaatcaataacattatccctgcctgcatacatgtgaacaaaagctatagaggacatgcaaattctacagtcattcctcatatgctttagacagagtgcagctactggaatcttccagatttcagtgttttaaaatcagagctctgaatacacaaaaggaaagagaaatggagcagctgacatattttaagctcacagtgatactcagtgacaggagcacagagctctaatgtccacaggatgttgtagggtagggtctctcagtaaatcaagtcccttacctatgttctgacactgaggctcttggagctatgggttagaaatccaggaggcaatatgtctttattctaatgaagtcctcatcttgcactcagaggcccactagtttgcccttctatatattaagtaaaaccaagagaaattaagaggatgatggcttctttctgtcacatgggtgctaaaccttttacaaacacttgatacttctatagagggaccaaggacctcaagtcctgggcagtctccttactgtgctactcactactgtctcaacactgtagtgagtctgtctttaacacatttccttccaataaagataaaaccacttaactcttaagtgccagtgcttagctcaagaggaaagaaggaaaatcccagaataaccgtggccactttgctataggggttacatattttaacccacctaaggttttacagactttagcctcactcaaactttatcaccctctgaggtagctggagaccacagcaggaaaaataacctgaccagtaatcacccactgattagtggcagagcgtaggacttaggggttataagcccagatccagatagggctaggtttgagccatgcctctaatgaccagctgggtgaccttgggaaagtcacttgattgctctgattcttgttttccttatctgtgaaatgggactaacaattgttacttttctcccaagattgttgggaagatttaataagataatatatagtaggcatcttgcatagtgtctgagaaataagaaatgctcagtcaatagtggctctcattagccaggcatggtggtactcgcctgtagtcccagctactcaggaggctgaggcaggaggaccgcttgagcccaggagtttgagactgtagtgcactatgatcacgcctgtgaattgccactgcactccagcctaagcaaatagcaagaccccatctattaaaaaaaaaaagtggctattattagctatatcag

SEQ ID NO: 734 - DNA, 3705 bp, Homo sapiens
  source 1..3705: mol_type = unassigned DNA
gagccgcgaggagcgcactccgtggccccgatggagcggtacaaagccctggaacagctgctgacagagttggatgacttcctcaagattcttgaccaggagaacctgagcagcacagcactggtgaagaagagctgcctggcggagctcctccggctttacaccaaaagcagcagctctgatgaggagtacatttatatgaacaaagtgaccatcaacaagcaacagaatgcagagtctcaaggcaaagcgcctgaggagcagggcctgctacccaatggggagcccagccagcactcctcggcccctcagaagagccttccagacctcccgccacccaagatgattccagaacggaaacagcttgccatcccaaagacggagtctccagagggctactatgaagaggctgagccatatgacacatccctcaatgaggacggagaggctgtgagcagctcctacgagtcctacgatgaagaggacggcagcaagggcaagtcggccccttaccagtggccctcgccggaggccggcatcgagctgatgcgtgacgcccgcatctgcgccttcctgtggcgcaagaagtggctgggacagtgggccaagcagctctgtgtcatcaaggacaacaggcttctgtgctacaaatcctccaaggaccacagccctcagctggacgtgaacctactgggcagcagcgtcattcacaaggagaagcaagtgcggaagaaggagcacaagctgaagatcacgccgatgaatgccgatgtgattgtgctgggcctgcagagcaaggaccaggctgagcagtggctcagggtcatccaggaagtgagcggcctgccttccgaaggagcatctgaaggaaaccagtacaccccggatgcccagcgctttaactgccagaaaccagatatagctgagaagtacctgtcggcttcagagtatgggagctccgtggatggccaccctgaggtcccagaaaccaaagacgtcaagaagaaatgttctgctggcctcaaactgagcaacctaatgaatctgggcaggaagaaatccacctcactggagcctgtggagaggtccctcgagacatccagttacctgaacgtgctggtgaacagccagtggaagtctcgctggtgctctgtcagggacaatcacctgcacttctaccaggaccggaaccggagcaaggtggcccagcaacccctcagcctggtgggctgcgaggtggtcccagaccccagccccgaccacctctactccttccgcatcctccacaagggcgaggagctggccaagcttgaggccaagtcttccgaggaaatgggccactggctgggtctcctgctctctgagtcaggctccaagacagacccagaagagttcacctacgactatgtggatgccgatagggtctcctgtattgtgagtgcggccaaaaactctctcttactgatgcagagaaagttctcagagcccaacacttacatcgatggcctgcctagccaggaccgccaggaggagctgtatgacgacgtggacctgtcagagctcacagctgcggtggagcctaccgaggaagccacccctgttgcagatgacccaaatgagagagaatctgaccgagtgtacctggacctcacacctgtcaagtcctttctgcatggccccagcagtgcacaggcccaggcctcctccccgacgttgtcctgcctggacaatgcaactgaggccctcccggcagactcaggcccaggtcccaccccagatgagccctgcataaagtgtccagagaacctgggagaacagcagctggagagtttggagccagaggatccttccctgagaatcaccaccgtcaaaatccagacggaacagcagagaatctccttcccaccgagctgcccggatgccgtggtggccaccccacctggtgccagcccacctgtgaaggacaggttgcgcgtgaccagtgcagagatcaagcttggcaagaatcggacagaagctgaggtgaagcggtacacagaggagaaggagaggcttgaaaagaagaaggaagaaatccgggggcacctggctcagctccggaaagagaaacgggagctaaaggaaaccctactgaaatgcacagacaaggaagtcctggcgagcctggagcagaagctgaaggaaattgacgaggagtgccggggcgaggagagcaggcgcgtggacctggagctcagcatcatggaggtgaaggacaacctgaagaaggctgaggcagggcctgtgacgttaggcaccaccgtggacaccacccacctggagaatgtgagcccccgccccaaagctgtcacacctgcctctgccccagactgtaccccagtcaactctgcaaccacactcaagaacaggcctctctcggtcgtggtcacaggcaaaggcactgtactccagaaagccaaggaatgggagaagaaaggagcaagttagaaaacaagcttcatctaaagactctcatgtcaatgtggaccttggtgacaatcctgctttgttaaagcaaaaactatgcgaaagggtgagtctgtttagaagaaaaagcaaagactgaggtactgtgaatggagagcttcagctaagaggaggctctgtcccttttcagagccaaaggaaataatacaacaaaaaggaggcttctttggagacctaagtctattggatgtaaacaagacgttgtatttagggatgttctgtgtttctttcttttttgaagttgtcatcaattgctttactaagatttttaaatagtgaaaacctcctgtttagactttggtggaagatgaatcaaggaagcagggccctgtcttatgggtcacgtgtctttggtgagtgagaagacctaaactcctggccatcatctcttatccaatacttagcagttggggattaaaccatccttgccttcagttctctccaatattaccaggcccaactcagtcttcagtgattttaaacagcattgacatcatctgtaaaaccatcatctgtaaaaccatctatgacatgagttttgagaaacaataatggggaaaatatttgggaccaagctgaagcactaatcccactaagttaaagacttctttccagtccaaggcaggcctgaatcaactgtctttaaataaaattttaagtgatgctgtattatatataggaaaaaatgcttaaaatcctgtcatttagaacagtgaaaagtatcttttgagattaaagtgactctttactgtaggaaaaatattactctgtgtttacagattcattgctgtggtcaggccatttttaagggaagagttatttaatataaatagtctctgattttaagttctgtttaatgttcattctccttccaagaacaaagtggtgatttttggttagggtgatcgccctcttaaaattggcagtgctgttccttgtgctgcccctgtcttttcctctgatggcatttttttttttttttttttaacacaggttgaaacatttcatctattatctctgcctcatttctggagggttgtgtatcagttctctaacacttgttcctgagaactaaatgtcttttttattcttatttcctctctcataaacatttggtgaccttttaccaagtggtgagttagttaggttttttaaaataaaatgttcattgtatttgaa

SEQ ID NO: 735 - DNA, 3964 bp, Homo sapiens
  source 1..3964: mol_type = unassigned DNA
gtgccaaggcggccgggggcggcgagcggggccgcgggcgcgcaccgactcaagagccgactgtcagcctcggcgggccggagttctccggcgctgggacaggggcgctgggacaggggcgctgggggcgagccctggcgggggccaggtccgaggaccctgggcgcggcggccccgccaggaggtccggccgcgagcgtgacctcacggggaggggccagcgcggcggcctgggcgctgagccgagcgccgggagagcagcgcagaagccgagccgcgaggagcgcactccgtggccccgatggagcggtacaaagccctggaacagctgctgacagagttggatgacttcctcaagattcttgaccaggagaacctgagcagcacagcactggtgaagaagagctgcctggcggagctcctccggctttacaccaaaagcagcagctctgatgaggagtacatttatatgaacaaagtgaccatcaacaagcaacagaatgcagagtctcaaggcaaagcgcctgaggagcagggcctgctacccaatggggagcccagccagcactcctcggcccctcagaagagccttccagacctcccgccacccaagatgattccagaacggaaacagcttgccatcccaaagacggagtctccagagggctactatgaagaggctgagccatatgacacatccctcaatgaggacggagaggctgtgagcagctcctacgagtcctacgatgaagaggacggcagcaagggcaagtcggccccttaccagtggccctcgccggaggccggcatcgagctgatgcgtgacgcccgcatctgcgccttcctgtggcgcaagaagtggctgggacagtgggccaagcagctctgtgtcatcaaggacaacaggcttctgtgctacaaatcctccaaggaccacagccctcagctggacgtgaacctactgggcagcagcgtcattcacaaggagaagcaagtgcggaagaaggagcacaagctgaagatcacgccgatgaatgccgatgtgattgtgctgggcctgcagagcaaggaccaggctgagcagtggctcagggtcatccaggaagtgagcggcctgccttccgaaggagcatctgaaggaaaccagtacaccccggatgcccagcgctttaactgccagaaaccagatatagctgagaagtacctgtcggcttcagagtatgggagctccgtggatggccaccctgaggtcccagaaaccaaagacgtcaagaagaaatgttctgctggcctcaaactgagcaacctaatgaatctgggcaggaagaaatccacctcactggagcctgtggagaggtccctcgagacatccagttacctgaacgtgctggtgaacagccagtggaagtctcgctggtgctctgtcagggacaatcacctgcacttctaccaggaccggaaccggagcaaggtggcccagcaacccctcagcctggtgggctgcgaggtggtcccagaccccagccccgaccacctctactccttccgcatcctccacaagggcgaggagctggccaagcttgaggccaagtcttccgaggaaatgggccactggctgggtctcctgctctctgagtcaggctccaagacagacccagaagagttcacctacgactatgtggatgccgatagggtctcctgtattgtgagtgcggccaaaaactctctcttactgatgcagagaaagttctcagagcccaacacttacatcgatggcctgcctagccaggaccgccaggaggagctgtatgacgacgtggacctgtcagagctcacagctgcggtggagcctaccgaggaagccacccctgttgcagatgacccaaatgagagagaatctgaccgagtgtacctggacctcacacctgtcaagtcctttctgcatggccccagcagtgcacaggcccaggcctcctccccgacgttgtcctgcctggacaatgcaactgaggccctcccggcagactcaggcccaggtcccaccccagatgagccctgcataaagtgtccagagaacctgggagaacagcagctggagagtttggagccagaggatccttccctgagaatcaccaccgtcaaaatccagacggaacagcagagaatctccttcccaccgagctgcccggatgccgtggtggccaccccacctggtgccagcccacctgtgaaggacaggttgcgcgtgaccagtgcagagatcaagcttggcaagaatcggacagaagctgaggtgaagcggtacacagaggagaaggagaggcttgaaaagaagaaggaagaaatccgggggcacctggctcagctccggaaagagaaacgggagctaaaggaaaccctactgaaatgcacagacaaggaagtcctggcgagcctggagcagaagctgaaggaaattgacgaggagtgccggggcgaggagagcaggcgcgtggacctggagctcagcatcatggaggtgaaggacaacctgaagaaggctgaggcagggcctgtgacgttaggcaccaccgtggacaccacccacctggagaatcccaaagctgtcacacctgcctctgccccagactgtaccccagtcaactctgcaaccacactcaagaacaggcctctctcggtcgtggtcacaggcaaaggcactgtactccagaaagccaaggaatgggagaagaaaggagcaagttagaaaacaagcttcatctaaagactctcatgtcaatgtggaccttggtgacaatcctgctttgttaaagcaaaaactatgcgaaagggtgagtctgtttagaagaaaaagcaaagactgaggtactgtgaatggagagcttcagctaagaggaggctctgtcccttttcagagccaaaggaaataatacaacaaaaaggaggcttctttggagacctaagtctattggatgtaaacaagacgttgtatttagggatgttctgtgtttctttcttttttgaagttgtcatcaattgctttactaagatttttaaatagtgaaaacctcctgtttagactttggtggaagatgaatcaaggaagcagggccctgtcttatgggtcacgtgtctttggtgagtgagaagacctaaactcctggccatcatctcttatccaatacttagcagttggggattaaaccatccttgccttcagttctctccaatattaccaggcccaactcagtcttcagtgattttaaacagcattgacatcatctgtaaaaccatcatctgtaaaaccatctatgacatgagttttgagaaacaataatggggaaaatatttgggaccaagctgaagcactaatcccactaagttaaagacttctttccagtccaaggcaggcctgaatcaactgtctttaaataaaattttaagtgatgctgtattatatataggaaaaaatgcttaaaatcctgtcatttagaacagtgaaaagtatcttttgagattaaagtgactctttactgtaggaaaaatattactctgtgtttacagattcattgctgtggtcaggccatttttaagggaagagttatttaatataaatagtctctgattttaagttctgtttaatgttcattctccttccaagaacaaagtggtgatttttggttagggtgatcgccctcttaaaattggcagtgctgttccttgtgctgcccctgtcttttcctctgatggcatttttttttttttttttttaacacaggttgaaacatttcatctattatctctgcctcatttctggagggttgtgtatcagttctctaacacttgttcctgagaactaaatgtcttttttattcttatttcctctctcataaacatttggtgaccttttaccaagtggtgagttagttaggttttttaaaataaaatgttcattgtatttgaa

SEQ ID NO: 736 - DNA, 3704 bp, Homo sapiens
  source 1..3704: mol_type = unassigned DNA
ctgggtctccagcacaccctggagaaaagcaggtcagggggtggtgcttctgtttccagatgagcaaactagggctgagggagagggcgttctctggtcagggtggtagagccagtctcgtggaagccggctgagccactgaaacagaatcagttttctcatggaccaaacggggatagtgtctggcctgcgccaccccaagtgtattgtgaagatgaaatgagaaggggttttttgttgtggttgctggaaggagatcctagaagggaggaatgggggagaagatggcaaagggatcctaggacgaggcgtatgggcaagggaagcttgtctttctgggaggaaaatctcgaaccaagaatttcaggaagaaggcactgggaaaagagggaggaggtgccctcagatccatggaggtgagtgtcagcccccagatctcttgtgtggccaccactttcacggcaaccactcctcactgggaatccttggagtctggtgctttcaccaccctgccccggctgcttcatgtgtgccacctcgccctgtttccagactgatgcagagaaagttctcagagcccaacacttacatcgatggcctgcctagccaggaccgccaggaggagctgtatgacgacgtggacctgtcagagctcacagctgcggtggagcctaccgaggaagccacccctgttgcagatgacccaaatgagagagaatctgaccgagtgtacctggacctcacacctgtcaagtcctttctgcatggccccagcagtgcacaggcccaggcctcctccccgacgttgtcctgcctggacaatgcaactgaggccctcccggcagactcaggcccaggtcccaccccagatgagccctgcataaagtgtccagagaacctgggagaacagcagctggagagtttggagccagaggatccttccctgagaatcaccaccgtcaaaatccagacggaacagcagagaatctccttcccaccgagctgcccggatgccgtggtggccaccccacctggtgccagcccacctgtgaaggacaggttgcgcgtgaccagtgcagagatcaagcttggcaagaatcggacagaagctgaggtgaagcggtacacagaggagaaggagaggcttgaaaagaagaaggaagaaatccgggggcacctggctcagctccggaaagagaaacgggagctaaaggaaaccctactgaaatgcacagacaaggaagtcctggcgagcctggagcagaagctgaaggaaattgacgaggagtgccggggcgaggagagcaggcgcgtggacctggagctcagcatcatggaggtgaaggacaacctgaagaaggctgaggcagggcctgtgacgttaggcaccaccgtggacaccacccacctggagaatgtgagcccccgccccaaagctgtcacacctgcctctgccccagactgtaccccagtcaactctgcaaccacactcaagaacaggcctctctcggtcgtggtcacaggcaaaggcactgtactccagaaagccaaggtaagcagtcactcccagcctcccttggggccagcagaaatgtcactaaggtaggggcccatcttctgacccaggtggtgctttgtggcttttggcaccagctctgagcaagggctcggcactcaccaaggagtggccatggctttgccatgccttcagctcagtctctggcactgaccaaccagaaaggtgtctgcacttggttcgagcatccttccctgtgagcttggggatgcttcagttcttgccctccacacagctatgggtagattccaggaggccagctgcagctcagggacagattatgactgagttttcaaaccaaaaagtcagtcagtgactccacaggacttctaccattaaaactaaagaaacagactcacataggtggtttgaattgcccaaagttgcccacccaactactggcaaaattctcagcaagttgtgaatgaggaatccatgctatgatgcggtttctccctgatggctagtcaaaaaagtatcattaatcatttactcatttactcatttgtacactaaagaacatgcctagggctgcctttgcttttggcaaattctgctccttattcctatcctccttacctgctggagatatttggaggtcccacaacaatggctaaccaataaatccatgcaagcatctgaacctccactcccttgttgctgtgagagacatcacttataggcactcgctgttgtgccacagtctcaaaatctctgaataggcactctaagcagtgatgaacacacagggtttgaaacatttatcacctctgtgcctaaaatagtttttctcacattttttctatgtatatcaaggttgctacagtggataactaactatctttttggtggggggtgggtgctggtatttgaatggtaccctaggaatgggagaagaaaggagcaagttagaaaacaagcttcatctaaagactctcatgtcaatgtggaccttggtgacaatcctgctttgttaaagcaaaaactatgcgaaagggtgagtctgtttagaagaaaaagcaaagactgaggtactgtgaatggagagcttcagctaagaggaggctctgtcccttttcagagccaaaggaaataatacaacaaaaaggaggcttctttggagacctaagtctattggatgtaaacaagacgttgtatttagggatgttctgtgtttctttcttttttgaagttgtcatcaattgctttactaagatttttaaatagtgaaaacctcctgtttagactttggtggaagatgaatcaaggaagcagggccctgtcttatgggtcacgtgtctttggtgagtgagaagacctaaactcctggccatcatctcttatccaatacttagcagttggggattaaaccatccttgccttcagttctctccaatattaccaggcccaactcagtcttcagtgattttaaacagcattgacatcatctgtaaaaccatcatctgtaaaaccatctatgacatgagttttgagaaacaataatggggaaaatatttgggaccaagctgaagcactaatcccactaagttaaagacttctttccagtccaaggcaggcctgaatcaactgtctttaaataaaattttaagtgatgctgtattatatataggaaaaaatgcttaaaatcctgtcatttagaacagtgaaaagtatcttttgagattaaagtgactctttactgtaggaaaaatattactctgtgtttacagattcattgctgtggtcaggccatttttaagggaagagttatttaatataaatagtctctgattttaagttctgtttaatgttcattctccttccaagaacaaagtggtgatttttggttagggtgatcgccctcttaaaattggcagtgctgttccttgtgctgcccctgtcttttcctctgatggcatttttttttttttttttttaacacaggttgaaacatttcatctattatctctgcctcatttctggagggttgtgtatcagttctctaacacttgttcctgagaactaaatgtcttttttattcttatttcctctctcataaacatttggtgaccttttaccaagtggtgagttagttaggttttttaaaataaaatgttcattgtatttg

SEQ ID NO: 737 - DNA, 848 bp, Homo sapiens
  source 1..848: mol_type = unassigned DNA
tgcgtcccctcctgcagcccggtcccctcctgcatctgcgtcccctcctggagcccagtcccctcttgcatccgcatccgcttcccctcccgcagccccgccccctcctgcatctgtgtgccctcccgaagccccgccccctcctgcatctgcgtcccctcctgcagccctgtcccctcctgcatctgcacttcctcctgcaggttacctgaacgtgctggtgaacagccagtggaagtctcgctggtgctctgtcagggacaatcacctgcacttctaccaggaccggaaccggagcaaggtggcccagcaacccctcagcctggtgggctgcgaggtggtcccagaccccagccccgaccacctctactccttccgcatcctccacaagggcgaggagctggccaagcttgaggccaagtcttccgaggaaatgggccactggctgggtctcctgctctctgagtcaggctccaagacagacccagaagagttcacctacgactatgtggatgccgatagggtctcctgtattgtgagtgcggccaaaaactctctcttactgatgcagagaaagttctcagagcccaacacttacatcgatggcctgcctagccaggaccgccaggaggagctgtatgacgacgtggacctgtcagagctcacagctgcggtggagcctaccgaggaagccacccctgttgcagatgacccaaatgagagagaatctgaccgagtgtacctggacctcacacctgtcaagtcctttctgcatggccccagcagtgcacaggcccaggcctcctccccgacgttgtcctgcctggacaatgcaactgaggccctcc

SEQ ID NO: 738 - DNA, 961 bp, Homo sapiens
  source 1..961: mol_type = unassigned DNA
gcgaggagcgcactccgtggccccgatggagcggtacaaagcacaggggtgttgctgtctggtggtacagagaaggatccggcaggtttctgcgtccctggaacagctgctgacagagttggatgacttcctcaagattcttgaccaggagaacctgagcagcacagcactggtgaagaagagctgcctggcggagctcctccggctttacaccaaaagcagcagctctgatgaggagtacatttatatgaacaaagtgaccatcaacaagcaacagaatgcagagtctcaaggcaaagcgcctgaggagcagggcctgctacccaatggggagcccagccagcactcctcggcccctcagaagagccttccagacctcccgccacccaagatgattccagaacggaaacagcttgccatcccaaagacggagtctccagagggctactatgaagaggctgagccatatgacacatccctcaatgaggacggagaggctgtgagcagctcctacgagtcctacgatgaagaggacggcagcaagggcaagtcggccccttaccagtggccctcgccggaggccggcatcgagctgatgcgtgacgcccgcatctgcgccttcctgtggcgcaagaagtggctgggacagtgggccaagcagctctgtgtcatcaaggacaacaggcttctgtgctacaaatcctccaaggaccacagccctcagctggacgtgaacctactgggcagcagcgtcattcacaaggagaagcaagtgcggaagaaggagcacaagctgaagatcacgccgatgaatgccgatgtgattgtgctgggcctgcagagcaaggaccaggctgagcagtggctcagggtcatccaggaagtgagcggcctgccttccgaaggagcatctgaaggaaaccagtacaccccggatgcccagcgctttaactgccagaaa

SEQ ID NO: 739 - DNA, 528 bp, Homo sapiens
  source 1..528: mol_type = unassigned DNA
gccgagccgcgaggagcgcactccgtggccccgatggagcggtacaaagcctccaggtctctactcacgatgaaagaggcttcggggattctacttcatgaatgaagcccttagcatgtggatttttgcttttctgacccggagccctggaacagctgctgacagagttggatgacttcctcaagattcttgaccaggagaacctgagcagcacagcactggtgaagaagagctgcctggcggagctcctccggctttacaccaaaagcagcagctctgatgaggagtacatttatatgaacaaagtgaccatcaacaagcaacagaatgcagagtctcaaggcaaagcgcctgaggagcagggcctgctacccaatggggagcccagccagcactcctcggcccctcagaagagccttccagacctcccgccacccaagatgattccagaacggaaacagcttgccatcccaaagacggagtctccagagggctactatgaagaggctgagccatatgacacatccc

SEQ ID NO: 740 - DNA, 13746 bp, Homo sapiens
  source 1..13746: mol_type = unassigned DNA
cgccgcctgtgcagccgctgccgccgccgccgccgccgccgccgccgccgccgccgccgccgccgctgccgccccggctgccgcgccgcgccgctgcctctgccccggccgcccccgccgccgctgccgccgccggcccgcagccagccaggcgggcggcccagcccgcctgagcccgcagcggctgccgccgcagcgtcgggtcgctgggtgcgcgggctaccgcggaccgagcggacccgagtgggcgaccaggcgcttgcccgcccagtgccactgccgccgcttcctcgccggagcacaggaccagacacctccagcgcccgctgctgctgccgatgcggcccggacacttttagctgggcgggagggctggagagccgggggccgccgagaaccgccagcgagctgtgccgagagccgcgccgacccgctgcgatcagggacaggcgcccgcccgccgccgccgcctggccgctatggatctattcgactttttcagagactgggacttggagcagcagtgtcactatgaacaagaccgtagtgcacttaaaaaaagggaatgggagcggaggaatcaagaagtccagcaagaagacgatctcttttcttcaggctttgatctttttggggagccatacaaggtagctgaatatacaaacaaaggtgatgcacttgccaaccgagtccagaacacgcttggaaactatgatgaaatgaagaatttgctaactaaccattctaatcagaatcacctagtgggaattccaaagaattctgtgccccagaatcccaacaacaaaaatgaaccaagcttttttccagaacaaaagaacagaataattccacctcaccaggataatacccatccttcagcaccaatgcctccaccttctgttgtgatactgaattcaactctaatacacagcaacagaaaatcaaaacctgagtggtcacgtgatagtcataaccctagcactgtactggcaagccaggccagtggtcagccaaacaagatgcagactttgacacaggaccagtctcaagccaaactggaagacttctttgtctacccagctgaacagccccagattggagaagttgaagagtcaaacccatctgcaaaggaagacagtaaccctaattctagtggagaagatgctttcaaagaaatctttcaatccaattcaccggaagaatctgaattcgccgtgcaagcgcctgggtctcccctagtggcttcctctttattagctcctagcagtggcctttcagttcaaaacttcccaccagggctttactgcaaaacaagcatggggcagcaaaagccaactgcatacgtcagacccatggatggccaggaccaggcaccggacatctcaccaacactgaaaccttcaattgaatttgagaacagctttgggaatctgtcatttggaacactcttggatggaaaacccagtgcagccagttcaaagactaaactgccaaagttcaccatcctccaaacaagtgaagtaagccttcccagtgatccaagctgtgttgaagaaatcttgcgggagatgacccattcctggcctactcctctcacttccatgcatactgctggacactctgagcagagcaccttttccatcccaggacaggaatcgcagcatctgaccccaggattcaccttacaaaagtggaatgacccaaccaccagagcttctacaaagtcagtgtctttcaaatcgatgcttgaggatgacctgaagctgagcagtgatgaagatgaccttgagcctgtgaagaccttgaccactcagtgcactgccactgagctctaccaggctgttgaaaaggcaaaacctaggaataatcctgtgaacccacccttggccactccccagcccccacctgcagtgcaagccagcgggggttctggcagctccagcgaatcggagagcagctctgagtcggattcagacactgaaagtagcaccactgacagcgaatctaatgaggcacctcgtgtggcaactccagagcctgagccaccctcaaccaacaagtggcaactggataaatggcttaacaaagtgacatcccagaacaagtcttttatttgtggccaaaatgaaacacccatggagactatttctctgcctcctccaatcatccaaccaatggaagtccagatgaaagtgaagacgaatgccagtcaggtcccagctgaacccaaagaaaggcctctcctcagtctcattagggagaaagcccgtccacggcccactcagaaaattccagaaacaaaggctttgaagcataagttgtcaacaactagtgagacagtgtctcaaaggacaattgggaaaaaacagcccaaaaaagttgagaagaacaccagcactgacgagtttacctggcccaaaccaaatattaccagcagcactcccaaagaaaaagaaagtgtggagcttcatgacccaccaagaggccgcaacaaagccactgcccacaaaccagcccctaggaaagaaccaagacctaacatccctttggctcccgagaagaagaagtacagagggcctggcaagattgtgccaaagtctcgggaattcattgaaacagattcatctacatctgactccaacacagatcaggaagagaccctgcaaatcaaagtcctgcctccgtgcattatttctggaggtaatactgccaaatccaaggaaatctgtggtgccagcctgaccctcagcaccttaatgagtagcagtggcagcaacaacaacttatccatcagtaatgaagagccaacattttcacctattcctgtcatgcaaactgaaatcctgtcccctctgcgagatcatgagaacctgaaaaacctctgggtgaagattgaccttgacttactctctagagtacctggccacagctcactccatgcagcacctgccaagccagaccacaaggagactgccacaaaacccaagcgtcagacagctgtcacagctgtggagaaaccagcccctaagggcaaacgtaagcacaagccaatagaagttgcagagaagatccctgagaagaagcagcgcctggaggaggccacaactatctgcttgctccctccttgcatctcaccagccccaccccacaagcctcccaacactagagaaaataattcatccaggagagcaaatagaagaaaggaagaaaaactatttcctcctccactttccccactgccagaggaccctccacgccgcagaaatgtcagtggcaataatggtccctttggtcaagacaaaaacatcgccatgactggacaaatcacatctaccaaacctaagagaactgaaggcaaattctgtgctactttcaaagggatatcggtaaatgagggagacactccaaaaaaggcatcctctgccaccatcactgtcaccaatactgctattgccactgctactgtcactgctactgccattgtcaccaccactgtcacagctactgccaccgccacggccaccaccacaactactaccactaccatttccaccatcacctctaccatcactactggcctcatggatagcagtcacctggagatgacgtcctgggcggctctgccccttctatccagcagcagcactaatgtccggagacccaagctcacttttgatgactcggttcacaatgctgattattacatgcaagaagctaagaagctgaagcacaaagctgatgcactgttcgagaaatttggcaaagctgtgaattatgctgatgccgccctctccttcactgaatgtggcaatgccatggaacgcgaccctctggaagcaaagtccccatacaccatgtactctgagactgtggagctcctcaggtatgcaatgaggctgaagaactttgcaagtcccttggcttcggatggggacaaaaagctagcagtactatgctaccgatgtttatcactcctctatttgagaatgtttaagctgaagaaggaccatgctatgaagtactccagatcactgatggaatattttaagcaaaatgcttcaaaagtcgcacagataccctctccatgggtaagcaatggaaagaacactccatccccagtgtctctcaacaacgtctcccccatcaacgcaatggggaactgtaacaatggcccagtcaccattccccagcgcattcaccacatggctgccagccacgtcaacatcactagcaatgtgttacggggctatgaacactgggatatggccgacaaactgacaagagaaaacaaagaattctttggtgatctggacacgctgatggggcctctgacccagcacagcagcatgaccaatcttgtccgctacgttcgccaaggactgtgttggctgcgcatcgatgcccacttgttgtagtgggtgttctcagatctctagcatcacgacccatcactctacctctaccagcgcactgatggtcactggtggaactccactcactggggaacgttctctttggttatgtttgtttttatgcttcttttgttatctgtaaaaaacagaagtcattgtaagttgacactacaacttaagggcagtgtacgttttattacttagtcattttttttcttttagcatttgatatgcatttctcagattccaccatctttttgtgctttatggaatgacagtccctacaatattgttttaagcccacactacccaaaacaaagaatgggaagcacttgtgataaagacaggctcctgagaaatgcaacaagtggtcttacatatacatgagaacttagacacaagggaccatcccccaaactctactcttatacccagaaaagaacatatttcagaatctgtcaaacttttgtgtatcccacagattcaatcttcaggtgagaattttcattgtcaaaacccactggttagatgttgtagcaacatcataaaatcaagagtatcaagaaaataaatgagcatagcaatgctactcttaaaaagatgctatgccacacaaccagaggactttcttgttagcatccctttcctgattccctattttgttaattttaatgataagaagaaagggtgacatttattttgacaagttttaggcatcagctggcatcagtgtttttcaactccattatttgaagtgtaaatcctcacctggggttctctgtgtgcaaagctgtccttttgaagaacagtttggttgatgcatgccttagtagccaaaatgctacactctagacttacaagtgggagttaagagaggtctggaaagtgtccaacaaggaattcacacctctgcctcctttgcaacaacaacatttacacagttggtaagtgggtccataactggcaggatttttaaattgtattttgctcaaatctatgggaacaaaagtcaaggtatcactacctagaagtaatgatatacagttttcttcctagtggcttgaaaatctggacttcctcaattattattcacattttctctcttataggttttctgttttctactttcttttttctcttatctgtgtttccctttcctttgtttggctcattaacttttgactgaattacaattactccttttattaaagtccatattattgtgaatcatttccatgaaaatttctaagaaaactccaaactctctaaatagtagctaacttttatttttttaaaatgagtcgtggggtagtgcttcaccttgagatgctttgaaagagccctaaacattgggaaccattcacctaatttggagacatttctcactggttgtgactacccccttatgatccttcacattcattttatgtccctaaacatcacaatgtaaatatcatttttgatgttccagctcaccagaagattcttacacttggggtaaacactatccatgcattacttactggtaattacctgctggtatataattccatgtagcctttaatatgctgggttatcaaattctgttcactgagttatgaccagataaataatagatatgcacatgaaagatgcaaacttgtgtgattattaaagccagccatgcaggtccatgatagaaacagcaggtgatgactctgcactctcattgtcaaggttagatatatccccagttgcaaaacagccagacttgagctgtgctctggtcatctttgagtttaaggccttttgttgtataaggctgtggaagttgtactccaatggctgaagccatgttgttaatatggctgatgggagcatccctgcagctgaacccagcactttttatgctcccactgtggttgagctttatgtttacagtctcagcaacaacacttatgcatccaaacactcacaaatgaaacctgaaagaatcttttctgagcctcttaaaagaggaaaatgatgataacattaaagactctgaacacccaaggttggtgtcacatataaaaattaagctgatgactttgcagtgactcaagttgtctctttatcatggtttaccaggtagagtgcctggctattactatataatgaagcccactggcttgacttgtaagttcaacctaaaccacaatcctagaccatcatggatttaggagtagattcttcttgaaatcccacatccagaaactagacattagaatgttgaggcagtttcccagagaaacaagcatattgcctcatggatgaaagacttgtagttctagtttcagtgacttgttatatctacttacatacaacagggaggcaagaggattctctgtcatctctggtgactgagtgtaaaatatgtgccaagtctgcagcacagtgaccaaatctgacaatcgagctctggatcaccacttgattatgtagtagactcatttataaagcagcttaggaactaattaaacatggaggatgaattaccttcctatcccttgagataagacatctttcagtttcatgattaaggattgttgctgttttatagttactctgttcatcacagtgtaaatggtgatgcgtgtcgtaggtgtgcagctatttgagggactaagggatggagatattctgtcaaatgaatctcttcagtataccagtttgtgggagggatatgagacatgtggatggcagtgagagatcgtgcctctagatcttgatggaggcttggtgagacacacttaaataagcacgtggaggttagaatagagggcagagtaaaaggaagctccatctgagcaagtacaccaaatgatctcagccctgcaacttgacccaggtagggccaccactacgccttcacttgtcacccaagctccaaccacagagagtttgacaagtttgtgttatgatgttggcttggctttgtatttttaattaactttggatttttagtggttttgtcatataactgtctgagtttggtaggtaggattactttgaaaagggtttactagtgtggtcctccgggtagaatttagctgtaagcatgttgttagccagcctgtagactgttaattacttaataatctcattgggaaaatactagtagttttatatttggatgacataattggaaaagcagattagctgctactacttttaaaagacttaaggtcgggatgcctttttttccatgtaaggaaatgaaaagaccaaaatcttcaggcaaaaagcaagttgcaaaattagaaaccattggctaaaaatgtgttttgttgagtttccaaatggatgaattttcatttggacattacatcactaaattcattagattttgtctgcattggaaagatactcttctagcatatctttcccaaagatatctaatttggattctgtttcatgcaaatttgcatcccggaggttgaagttggagtttgaggttggaaaatatctttgaaggcagaatcagttgagttgtgagggtgaagcctcacatacttctcaacagacatgataaaattcacctgcatgagttggcaggtgggagaaccaaactggatcactgggtaagactactcagtaaagcaatgaactgcttgcttagagaagcatcactatccccattgagaaaaatgtgtggcaagatgatacagctacacagtatcaaatgaatgggtcaattcagcacccccaaatttaattctgtggggaaaaattattgagccagttgtcagtgttctgttacatgactggcagactaaattcttcatcgttgttgttattgttgttgttgtttctcattttcactcgcacggccttattctcataattaaaatctaattcattttctctttagtgttagtagactccaacaacagaagtggcatctgtgtattcataatcagcatttaccctggcaggagactaatcagataggccggtctcagacattaatcctaccatctgatatttttggtgaaggaaaaagtattaattctctttccatcctcctcctcagaaatatagaagccctctttaccaaaatcatcacattttactctgtaatctaccagctaaaagaaaattgcattgtggggagggcagaaagggggtgggggtgggggcgggggggtggggggtggggaagccccacaaagccagattgcagttcttgcccctttttgcgtctgacatgagatgttaaagaattattcatagtgctcacattgggttaggggacactgaactgctttttagatccatgatcagtcatcattcttctaagagattggagctttgctgtttcattaactgtgcagtgtagactaatggtgtttaataaaaatcattcaaaatttcaaactcttttgccagtgacctcaattttgttggctctgtgatttgtatcagactttgaggagggaagggggaagtgaaggaagcctacgtccaggcccctgacaggatgctgcagtagcaagctcaagctcgcctgcctgccagcagttgctggtgagcagcagcatgcagaccagctgtgggaagcctcctgaagaatgccccagctgatgctttcagctgggaatagtttgttcctattggggaactcattgttctccagtctctgcagcaggaagccagctgtcatattcggagggaatttcagatgctttacctttttggttttgtcctgcatcactcatgtggctacgaaagtgtctctgagaatagagcccaatgtggtgacaatgggtagtcaaatgcaccccagatgctcaagccctgttgtggttctgcagtgtttatgaaattgggaggaaggagaccctggacagtaagcaaaattggagacactccaacgaggctaagttaatgccgtgttgcccagaacaagatctagcttctcatttggtcagcctagcatgcaaccagtggtgtgctggtaaaatgtttaacaaccagctcgctgagaatagaaagcacctggtttgcaccatttgccaatttccatggcataaatactaccactttagatgattttaagctaccaactgtgatgtcactgaacacatggttggaaagagatgcacgcagttggctcttgcaagcctgggcaaaaatgcttcaacacgccactggatgcagccagtcagagggttcatatttaatatatgtgttcatgtggacacacacagacacacacacacaaactcacccttacacacacacttcgatgactaaaacaattacatagttttaagatatgaatcaatgtgtgaatgtagaaagcttatgataaggccctagaggtatgggttgccctggaagcctaggttttaagcaggagaatagctgagaagaatgaagccctcctgagctgaaaggagagatggatcaatggagatggttccatcatctccttccatatctcacaggtaaaatgggcactcagaaaaccctcacgattgattttttaaaaagataagtgagtgttttttattttattattattgtcatcattattttgatttacaaatgctatttgtaacttttacatgtaactaggataaagtatttacgggaactctatggagaatagcacaatccagaatttactgtgtttttcttttatgtgacgtggaaactcagtaattctcccaccttcacattgttgttcataagaattttactttagttattagggaatctaagttttttgttaacatttgtttttagttaaaagtatctacttactgttttagctctgaactcaaaccagaatatctctgtatcaattgcatgactattcagaaacaataatccaaaccaaaataattctttttccacccagtacgaagaaaactaagctcagtaacaagaaggcataaactaaagtatataatgaggctttcattaaatacacacacacacacactcacacacacacacatacactttttaaatttttaaattaggcctccacacataaatcattttgaaagtagaatagaaaatctcaaagaattcattctcctggtcctgtgcatcttctgcagttaataagaggtttgtatctggaaagatggaagaacttgttctaaaatcttatttttcaaaaaaaaatttccattttctctctgggcctgtatccatggttgaatgttagccctggaggagatccatgtcttactcgctctttctggcccttctgtcttttgcctctgcaattctttttgtagctggcacgatagcagggactgggggtctatcctttcatggtattgctacaatatttgtccttactggaaaatggtaacatccgggtctgatttaattggcattacacttacacagggactctgagcacccccgtcaccacaccagacagtggaccagttttcacagctacaaagagctagaaatgtgtttaacatcatccagtgcatcccctaattcaaaaccatcctcactaatcaatcatattcacccataaatattacaaatgagattgattccatctcaagacaatttgtcaaatacttaattttcttcctggatgattctacttactggatattttagaaagagaaatgtctgagataaaatccctcacatttactcaatataacaaattactgtttctactcctattctgagtagtgcttctgaagattgtttgctgtagtgttgtctttgataaaatgaatgtcagtagtgagccttttagagataccatgctcagaaatcctctttgggatcagaagatacctaaaattctccccttttgcccacttggttagatgagtgatatattctttggatcctgcaaagaagagattggtttattttcttttctggtggtggtagtggttgtatctgtggctgtgatggttgttgttacttgtctctctctctctctggctctggcttttgctttcctgctagtgttctttctctttccaaacaaatagttaaattaaatgtgagcttctgaattgtacttgttcatactttcaaaacataacagattaataaaaatagatgtgtcctgatttaaaacatgccccctggaaaggcatgctgtattatgaaatcgtgataatataactgcattattacatggcagtataaatattagtctgttgaattcatttgtccaattgtataactttgtggagcagtgttttgacctttgatacataattctggagcaagtggagtggttgcaggcagatgagacagtgttatatcaggatttttcaatcaactttagttggaggcctggcaattacaaacatcttcagatgtttctgtaaccattataaatatgaaaaaaacctcttcaaaaaatttcccatagtacttcagtcaagactttttaggtttatcttttttttttcatttctccttttccttttccattatttttcgatgggggggttgttatcattgactgaagaaatattttgattgcaatggtctctctctctctccccctctctctctctctcctctattctttcctccttccctctgtccatcacccctcattaaaatattgaaatctggagtctttgataaatctgcattagaccaggctatatgctaggaatgaaatctgggcaaatatcgatgggttttcaaagaatgctccatgttcattgggccctttcacaccccacagtgataaatgaaaaggatagaggtagttttttcaaaagagcactttaataatatcctctgagacctaatgcagtttaacaaatgactccacctatttttccagtaggtaaattgactgagacttgcaaaatacccctgagagttgtcaggggtgtcttctgcctggtctatagcgtgtgtgtttgctttgtatctaacaggcacattcacgtctcgtgtactcatatgaagtatttcctaacattcccattagcctgtatataagaatcagaaagataatcccaacatgttgtaaatgaagatgtgactctataacctttctcttcttcctggaaaaaaaaggacattttcatgcatattttaaacagaaattttgtatatttaagtgtcatagaaaatatttattgagtaactgggacacaaatgggaatttaattgtcatcatatgctttgtgtgtggggatgcttaccaacaccatgtcgctggaccattgtggcaagccataactgcacaaagagtacacatcgtcagtgtgtgtgtgtgtgtgtgtgtgcgcgcacacacgtgcgtgtgtgtgtccctgcatgtgcaacatgtctagcttgctgtccttcatgggattttagctttcccttcttgaaaaacattattttacagttccaggaggccctggttacattactatatgaaggcagtgatttgaaatgaaaattcctttcctcttggaagctttggtcataatatcatggttcaattaaacggattccaccggactttgtgatgaaaaaggctctgttaaaatccaattgagtttccaagaggaaattgtagtaggtcaagatgcatgagagggaagatggaggccacctcaactggagaacatgagctgagttgagccctcagtgttgaagttgacttgctccaagctgcagtctaaaaccctggggcccgtgcctggcctatgctccctcccaagtaagtagaggagcagaaccatcaggaacagcctgcctggctcctatgaagaaaacttcctgacgtcctgtccccaaaggaagaccctttccccaagggcaccccaggtggccattaaattgtgatgatcattcagaaagtgcccccttggctttatgagaatccaattagtcttctgaaccaccttttcttgggtgcagatttccaacattcatgctcattgcagatccaccaactgtcactgttcttaacaagcatgctcgtcttgtcagaatttcagtaagttccaatttcctgtacagaccagggtaaactgttctaaaatcaatcaattaatgaaatgttatctggtttttaaaagctggtttcatgtgctttatgtgtataaaactatatctgcctgtgtggctttgcatttcaaatgtgtggcgcacaagcgttttgttggtgctttgttctcagtacagtaactctgtgtacaaacattttaatgtggttttgttgttttccaacaagatgtctctgtaaaaatgatattggctgagctggtgcgttggtttctctcatagaggcattaactatactgccaatgcattgaattatttaaaaatgcaaaataaaatttttatgaaaatctca

SEQ ID NO: 741 - DNA, 7313 bp, Homo sapiens
  source 1..7313: mol_type = unassigned DNA
gccgctgcctctgccccggccgcccccgccgccgctgccgccgccggcccgcagccagccaggcgggcggcccagcccgcctgagcccgcagcggctgccgccgcagcgtcgggtcgctgggtgcgcgggctaccgcggaccgagcggacccgagtgggcgaccaggcgcttgcccgcccagtgccactgccgccgcttcctcgccggagcacaggaccagacacctccagcgcccgctgctgctgccgatgcggcccggacacttttagctgggcgggagggctggagagccgggggccgccgagaaccgccagcgagctgtgccgagagccgcgccgacccgctgcgatcagggacaggcgcccgcccgccgccgccgcctggccgctatggatctattcgactttttcagagactgggacttggagcagcagtgtcactatgaacaagaccgtagtgcacttaaaaaaagggaatgggagcggaggaatcaagaagtccagcaagaagacgatctcttttcttcaggctttgatctttttggggagccatacaagacaaacaaaggtgatgcacttgccaaccgagtccagaacacgcttggaaactatgatgaaatgaagaatttgctaactaaccattctaatcagaatcacctagtgggaattccaaagaattctgtgccccagaatcccaacaacaaaaatgaaccaagcttttttccagaacaaaagaacagaataattccacctcaccaggataatacccatccttcagcaccaatgcctccaccttctgttgtgatactgaattcaactctaatacacagcaacagaaaatcaaaacctgagtggtcacgtgatagtcataaccctagcactgtactggcaagccaggccagtggtcagccaaacaagatgcagactttgacacaggaccagtctcaagccaaactggaagacttctttgtctacccagctgaacagccccagattggagaagttgaagagtcaaacccatctgcaaaggaagacagtaaccctaattctagtggagaagatgctttcaaagaaatctttcaatccaattcaccggaagaatctgaattcgccgtgcaagcgcctgggtctcccctagtggcttcctctttattagctcctagcagtggcctttcagttcaaaacttcccaccagggctttactgcaaaacaagcatggggcagcaaaagccaactgcatacgtcagacccatggatggccaggaccaggcaccggacatctcaccaacactgaaaccttcaattgaatttgagaacagctttgggaatctgtcatttggaacactcttggatggaaaacccagtgcagccagttcaaagactaaactgccaaagttcaccatcctccaaacaagtgaagtaagccttcccagtgatccaagctgtgttgaagaaatcttgcgggaatcgcagcatctgaccccaggattcaccttacaaaagtggaatgacccaaccaccagagcttctacaaagtcagtgtctttcaaatcgatgcttgaggatgacctgaagctgagcagtgatgaagatgaccttgagcctgtgaagaccttgaccactcagtgcactgccactgagctctaccaggctgttgaaaaggcaaaacctaggaataatcctgtgaacccacccttggccactccccagcccccacctgcagtgcaagccagcgggggttctggcagctccagcgaatcggagagcagctctgagtcggattcagacactgaaagtagcaccactgacagcgaatctaatgaggcacctcgtgtggcaactccagagcctgagccaccctcaaccaacaagtggcaactggataaatggcttaacaaagtgacatcccagaacaagtcttttatttgtggccaaaatgaaacacccatggagactatttctctgcctcctccaatcatccaaccaatggaagtccagatgaaagtgaagacgaatgccagtcaggtcccagctgaacccaaagaaaggcctctcctcagtctcattagggagaaagcccgtccacggcccactcagaaaattccagaaacaaaggctttgaagcataagttgtcaacaactagtgagacagtgtctcaaaggacaattgggaaaaaacagcccaaaaaagttgagaagaacaccagcactgacgagtttacctggcccaaaccaaatattaccagcagcactcccaaagaaaaagaaagtgtggagcttcatgacccaccaagaggccgcaacaaagccactgcccacaaaccagcccctaggaaagaaccaagacctaacatccctttggctcccgagaagaagaagtacagagggcctggcaagattgtgccaaagtctcgggaattcattgaaacagattcatctacatctgactccaacacagatcaggaagagaccctgcaaatcaaagtcctgcctccgtgcattatttctggaggtaatactgccaaatccaaggaaatctgtggtgccagcctgaccctcagcaccttaatgagtagcagtggcagcaacaacaacttatccatcagtaatgaagagccaacattttcacctattcctgtcatgcaaactgaaatcctgtcccctctgcgagatcatgagaacctgaaaaacctctgggtgaagattgaccttgacttactctctagagtacctggccacagctcactccatgcagcacctgccaagccagaccacaaggagactgccacaaaacccaagcgtcagacagctgtcacagctgtggagaaaccagcccctaagggcaaacgtaagcacaagccaatagaagttgcagagaagatccctgagaagaagcagcgcctggaggaggccacaactatctgcttgctccctccttgcatctcaccagccccaccccacaagcctcccaacactagagaaaataattcatccaggagagcaaatagaagaaaggaagaaaaactatttcctcctccactttccccactgccagaggaccctccacgccgcagaaatgtcagtggcaataatggtccctttggtcaagacaaaaacatcgccatgactggacaaatcacatctaccaaacctaagagaactgaaggcaaattctgtgctactttcaaagggatatcggagggagacactccaaaaaaggcatcctctgccaccatcactgtcaccaatactgctattgccactgctactgtcactgctactgccattgtcaccaccactgtcacagctactgccaccgccacggccaccaccacaactactaccactaccatttccaccatcacctctaccatcactactggcctcatggatagcagtcacctggagatgacgtcctgggcggctctgccccttctatccagcagcagcactaatgtccggagacccaagctcacttttgatgactcggttcacaatgctgattattacatgcaagaagctaagaagctgaagcacaaagctgatgcactgttcgagaaatttggcaaagctgtgaattatgctgatgccgccctctccttcactgaatgtggcaatgccatggaacgcgaccctctggaagcaaagtccccatacaccatgtactctgagactgtggagctcctcaggtatgcaatgaggctgaagaactttgcaagtcccttggcttcggatggggacaaaaagctagcagtactatgctaccgatgtttatcactcctctatttgagaatgtttaagctgaagaaggaccatgctatgaagtactccagatcactgatggaatattttaagcaaaatgcttcaaaagtcgcacagataccctctccatgggtaagcaatggaaagaacactccatccccagtgtctctcaacaacgtctcccccatcaacgcaatggggaactgtaacaatggcccagtcaccattccccagcgcattcaccacatggctgccagccacgtcaacatcactagcaatgtgttacggggctatgaacactgggatatggccgacaaactgacaagagaaaacaaagaattctttggtgatctggacacgctgatggggcctctgacccagcacagcagcatgaccaatcttgtccgctacgttcgccaaggactgtgttggctgcgcatcgatgcccacttgttgtagtgggtgttctcagatctctagcatcacgacccatcactctacctctaccagcgcactgatggtcactggtggaactccactcactggggaacgttctctttggttatgtttgtttttatgcttcttttgttatctgtaaaaaacagaagtcattgtaagttgacactacaacttaagggcagtgtacgttttattacttagtcattttttttcttttagcatttgatatgcatttctcagattccaccatctttttgtgctttatggaatgacagtccctacaatattgttttaagcccacactacccaaaacaaagaatgggaagcacttgtgataaagacaggctcctgagaaatgcaacaagtggtcttacatatacatgagaacttagacacaagggaccatcccccaaactctactcttatacccagaaaagaacatatttcagaatctgtcaaacttttgtgtatcccacagattcaatcttcaggtgagaattttcattgtcaaaacccactggttagatgttgtagcaacatcataaaatcaagagtatcaagaaaataaatgagcatagcaatgctactcttaaaaagatgctatgccacacaaccagaggactttcttgttagcatccctttcctgattccctattttgttaattttaatgataagaagaaagggtgacatttattttgacaagttttaggcatcagctggcatcagtgtttttcaactccattatttgaagtgtaaatcctcacctggggttctctgtgtgcaaagctgtccttttgaagaacagtttggttgatgcatgccttagtagccaaaatgctacactctagacttacaagtgggagttaagagaggtctggaaagtgtccaacaaggaattcacacctctgcctcctttgcaacaacaacatttacacagttggtaagtgggtccataactggcaggatttttaaattgtattttgctcaaatctatgggaacaaaagtcaaggtatcactacctagaagtaatgatatacagttttcttcctagtggcttgaaaatctggacttcctcaattattattcacattttctctcttataggttttctgttttctactttcttttttctcttatctgtgtttccctttcctttgtttggctcattaacttttgactgaattacaattactccttttattaaagtccatattattgtgaatcatttccatgaaaatttctaagaaaactccaaactctctaaatagtagctaacttttatttttttaaaatgagtcgtggggtagtgcttcaccttgagatgctttgaaagagccctaaacattgggaaccattcacctaatttggagacatttctcactggttgtgactacccccttatgatccttcacattcattttatgtccctaaacatcacaatgtaaatatcatttttgatgttccagctcaccagaagattcttacacttggggtaaacactatccatgcattacttactggtaattacctgctggtatataattccatgtagcctttaatatgctgggttatcaaattctgttcactgagttatgaccagataaataatagatatgcacatgaaagatgcaaacttgtgtgattattaaagccagccatgcaggtccatgatagaaacagcaggtgatgactctgcactctcattgtcaaggttagatatatccccagttgcaaaacagccagacttgagctgtgctctggtcatctttgagtttaaggccttttgttgtataaggctgtggaagttgtactccaatggctgaagccatgttgttaatatggctgatgggagcatccctgcagctgaacccagcactttttatgctcccactgtggttgagctttatgtttacagtctcagcaacaacacttatgcatccaaacactcacaaatgaaacctgaaagaatcttttctgagcctcttaaaagaggaaaatgatgataacattaaagactctgaacacccaaggttggtgtcacatataaaaattaagctgatgactttgcagtgactcaagttgtctctttatcatggtttaccaggtagagtgcctggctattactatataatgaagcccactggcttgacttgtaagttcaacctaaaccacaatcctagaccatcatggatttaggagtagattcttcttgaaatcccacatccagaaactagacattagaatgttgaggcagtttcccagagaaacaagcatattgcctcatggatgaaagacttgtagttctagtttcagtgacttgttatatctacttacatacaacagggaggcaagaggattctctgtcatctctggtgactgagtgtaaaatatgtgccaagtctgcagcacagtgaccaaatctgacaatcgagctctggatcaccacttgattatgtagtagactcatttataaagcagcttaggaactaattaaacatggaggatgaattaccttcctatcccttgagataagacatctttcagtttcatgattaaggattgttgctgttttatagttactctgttcatcacagtgtaaatggtgatgcgtgtcgtaggtgtgcagctatttgagggactaagggatggagatattctgtcaaatgaatctcttcagtataccagtttgtgggagggatatgagacatgtggatggcagtgagagatcgtgcctctagatcttgatggaggcttggtgagacacacttaaataagcacgtggaggttagaatagagggcagagtaaaaggaagctccatctgagcaagtacaccaaatgatctcagccctgcaacttgacccaggtagggccaccactacgccttcacttgtcacccaagctccaaccacagagagtttgacaagtttgtgttatgatgttggcttggctttgtatttttaattaactttggatttttagtggttttgtcatataactgtctgagtttggtaggtaggattactttgaaaagggtttactagtgtggtcctccgggtagaatttagctgtaagcatgttgttagccagcc

SEQ ID NO: 742 - DNA, 1488 bp, Homo sapiens
  source 1..1488: mol_type = unassigned DNA
ccgagaaccgccagcgagctgtgccgagagccgcgccgacccgctgcgatcagggacaggcgcccgcccgccgccgccgcctggccgctatggatctattcgactttttcagagactgggacttggagcagcagtgtcactatgaacaagaccgtagtgcacttaaaaaaagggaatgggagcggaggaatcaagaagtccagcaagaagacgatctcttttcttcaggctttgatctttttggggagccatacaagacaaacaaaggtgatgcacttgccaaccgagtccagaacacgcttggaaactatgatgaaatgaagaatttgctaactaaccattctaatcagaatcacctagtgggaattccaaagaattctgtgccccagaatcccaacaacaaaaatgaaccaagcttttttccagaacaaaagaacagaataattccacctcaccaggataatacccatccttcagcaccaatgcctccaccttctgttgtgatactgaattcaactctaatacacagcaacagaaaatcaaaacctgagtggtcacgtgatagtcataaccctagcactgtactggcaagccaggccagtggtcagccaaacaagatgcagactttgacacaggaccagtctcaagccaaactggaagacttctttgtctacccagctgaacagccccagattggagaagttgaagagtcaaacccatctgcaaaggaagacagtaaccctaattctagtggagaagatgctttcaaagaaatctttcaatccaattcaccggaagaatctgaattcgccgtgcaagcgcctgggtctcccctagtggcttcctctttattagctcctagcagtggcctttcagttcaaaacttcccaccagggctttactgcaaaacaagcatggggcagcaaaagccaactgcatacgtcagacccatggatggccaggaccaggcaccggacatctcaccaacactgaaaccttcaattgaatttgagaacagctttgggaatctgtcatttggaacactcttggatggaaaacccagtgcagccagttcaaagactaaactgccaaagttcaccatcctccaaacaagtgaagtaagccttcccagtgatccaagctgtgttgaagaaatcttgcgggaatcgcagcatctgaccccaggattcaccttacaaaagtggaatgacccaaccaccagagcttctacaaagatgcttgaggatgacctgaagctgagcagtgatgaagatgaccttgagcctgtgaagaccttgaccactcagtgcactgccactgagctctaccaggctgttgaaaaggcaaaacctaggaataatcctgtgaagtaagttattatttttattagttgcaaatgttaattttaacggactcgatgcatgtgaaaaaataaggtcataaaagagaccttggattttgagttaatctctattcatgacaatttaa

SEQ ID NO: 743 - DNA, 3952 bp, Homo sapiens
  source 1..3952: mol_type = unassigned DNA
acccgctgcgatcagggacaggcgcccgcccgccgccgccgcctggccgctatggatctattcgactttttcagagactgggacttggagcagcagtgtcactatgaacaagaccgtagtgcacttaaaaaaagggaatgggagcggaggaatcaagaagtccagcaagaagacgatctcttttcttcaggctttgatctttttggggagccatacaaggtagctgaatatacaaacaaaggtgatgcacttgccaaccgagtccagaacacgcttggaaactatgatgaaatgaagaatttgctaactaaccattctaatcagaatcacctagtgggaattccaaagaattctgtgccccagaatcccaacaacaaaaatgaaccaagcttttttccagaacaaaagaacagaataattccacctcaccaggataatacccatccttcagcaccaatgcctccaccttctgttgtgatactgaattcaactctaatacacagcaacagaaaatcaaaacctgagtggtcacgtgatagtcataaccctagcactgtactggcaagccaggccagtggtcagccaaacaagatgcagactttgacacaggaccagtctcaagccaaactggaagacttctttgtctacccagctgaacagccccagattggagaagttgaagagtcaaacccatctgcaaaggaagacagtaaccctaattctagtggagaagatgctttcaaagaaatctttcaatccaattcaccggaagaatctgaattcgccgtgcaagcgcctgggtctcccctagtggcttcctctttattagctcctagcagtggcctttcagttcaaaacttcccaccagggctttactgcaaaacaagcatggggcagcaaaagccaactgcatacgtcagacccatggatggccaggaccaggcaccggacatctcaccaacactgaaaccttcaattgaatttgagaacagctttgggaatctgtcatttggaacactcttggatggaaaacccagtgcagccagttcaaagactaaactgccaaagttcaccatcctccaaacaagtgaagtaagccttcccagtgatccaagctgtgttgaagaaatcttgcgggaatcgcagcatctgaccccaggattcaccttacaaaagtggaatgacccaaccaccagagcttctacaaagatgcttgaggatgacctgaagctgagcagtgatgaagatgaccttgagcctgtgaagaccttgaccactcagtgcactgccactgagctctaccaggctgttgaaaaggcaaaacctaggaataatcctgtgaacccacccttggccactccccagcccccacctgcagtgcaagccagcgggggttctggcagctccagcgaatcggagagcagctctgagtcggattcagacactgaaagtagcaccactgacagcgaatctaatgaggcacctcgtgtggcaactccagagcctgagccaccctcaaccaacaagtggcaactggataaatggcttaacaaagtgacatcccagaacaagtcttttatttgtggccaaaatgaaacacccatggagactatttctctgcctcctccaatcatccaaccaatggaagtccagatgaaagtgaagacgaatgccagtcaggtcccagctgaacccaaagaaaggcctctcctcagtctcattagggagaaagcccgtccacggcccactcagaaaattccagaaacaaaggctttgaagcataagttgtcaacaactagtgagacagtgtctcaaaggacaattgggaaaaaacagcccaaaaaagttgagaagaacaccagcactgacgagtttacctggcccaaaccaaatattaccagcagcactcccaaagaaaaagaaagtgtggagcttcatgacccaccaagaggccgcaacaaagccactgcccacaaaccagcccctaggaaagaaccaagacctaacatccctttggctcccgagaagaagaagtacagagggcctggcaagattgtgccaaagtctcgggaattcattgaaacagattcatctacatctgactccaacacagatcaggaagagaccctgcaaatcaaagtcctgcctccgtgcattatttctggaggtaatactgccaaatccaaggaaatctgtggtgccagcctgaccctcagcaccttaatgagtagcagtggcagcaacaacaacttatccatcagtaatgaagagccaacattttcacctattcctgtcatgcaaactgaaatcctgtcccctctgcgagatcatgagaacctgaaaaacctctgggtgaagattgaccttgacttactctctagagtacctggccacagctcactccatgcagcacctgccaagccagaccacaaggagactgccacaaaacccaagcgtcagacagctgtcacagctgtggagaaaccagcccctaagggcaaacgtaagcacaagccaatagaagttgcagagaagatccctgagaagaagcagcgcctggaggaggccacaactatctgcttgctccctccttgcatctcaccagccccaccccacaagcctcccaacactagagaaaataattcatccaggagagcaaatagaagaaaggaagaaaaactatttcctcctccactttccccactgccagaggaccctccacgccgcagaaatgtcagtggcaataatggtccctttggtcaagacaaaaacatcgccatgactggacaaatcacatctaccaaacctaagagaactgaaggcaaattctgtgctactttcaaagggatatcggtaaatgagggagacactccaaaaaaggcatcctctgccaccatcactgtcaccaatactgctattgccactgctactgtcactgctactgccattgtcaccaccactgtcacagctactgccaccgccacggccaccaccacaactactaccactaccatttccaccatcacctctaccatcactactggcctcatggatagcagtcacctggagatgacgtcctgggcggctctgccccttctatccagcagcagcactaatgtccggagacccaagctcacttttgatgactcggttcacaatgctgattattacatgcaagaagctaagaagctgaagcacaaagctgatgcactgttcgagaaatttggcaaagctgtgaattatgctgatgccgccctctccttcactgaatgtggcaatgccatggaacgcgaccctctggaagcaaagtccccatacaccatgtactctgagactgtggagctcctcaggtatgcaatgaggctgaagaactttgcaagtcccttggcttcggatggggacaaaaagctagcagtactatgctaccgatgtttatcactcctctatttgagaatgtttaagctgaagaaggaccatgctatgaagtactccagatcactgatggaatattttaagcaaaatgcttcaaaagtcgcacagataccctctccatgggtaagcaatggaaagaacactccatccccagtgtctctcaacaacgtctcccccatcaacgcaatggggaactgtaacaatggcccagtcaccattccccagcgcattcaccacatggctgccagccacgtcaacatcactagcaatgtgttacggggctatgaacactgggatatggccgacaaactgacaagagaaaacaaagaattctttggtgatctggacacgctgatggggcctctgacccagcacagcagcatgaccaatcttgtccgctacgttcgccaaggactgtgttggctgcgcatcgatgcccacttgttgtagtgggtgttctcagatctctagcatcacgacccatcactctacctctaccagcgcactgatggtcactggt

SEQ ID NO: 744 - DNA, 12280 bp, Homo sapiens
  source 1..12280: mol_type = unassigned DNA
agttttggttgtggcaacccagaggaaggttgcagtggcccatctatctatcccagatgtaagatatgcttcacccctctttcttgatccatgaagttcaaaaggaggcaccaagcatttccgtccttcttcaagatgaaggtaagccttcccagtgatccaagctgtgttgaagaaatcttgcgggaatcgcagcatctgaccccaggattcaccttacaaaagtggaatgacccaaccaccagagcttctacaaagtcagtgtctttcaaatcgatgcttgaggatgacctgaagctgagcagtgatgaagatgaccttgagcctgtgaagaccttgaccactcagtgcactgccactgagctctaccaggctgttgaaaaggcaaaacctaggaataatcctgtgaacccacccttggccactccccagcccccacctgcagtgcaagccagcgggggttctggcagctccagcgaatcggagagcagctctgagtcggattcagacactgaaagtagcaccactgacagcgaatctaatgaggcacctcgtgtggcaactccagagcctgagccaccctcaaccaacaagtggcaactggataaatggcttaacaaagtgacatcccagaacaagtcttttatttgtggccaaaatgaaacacccatggagactatttctctgcctcctccaatcatccaaccaatggaagtccagatgaaagtgaagacgaatgccagtcaggtcccagctgaacccaaagaaaggcctctcctcagtctcattagggagaaagcccgtccacggcccactcagaaaattccagaaacaaaggctttgaagcataagttgtcaacaactagtgagacagtgtctcaaaggacaattgggaaaaaacagcccaaaaaagttgagaagaacaccagcactgacgagtttacctggcccaaaccaaatattaccagcagcactcccaaagaaaaagaaagtgtggagcttcatgacccaccaagaggccgcaacaaagccactgcccacaaaccagcccctaggaaagaaccaagacctaacatccctttggctcccgagaagaagaagtacagagggcctggcaagattgtgccaaagtctcgggaattcattgaaacagattcatctacatctgactccaacacagatcaggaagagaccctgcaaatcaaagtcctgcctccgtgcattatttctggaggtaatactgccaaatccaaggaaatctgtggtgccagcctgaccctcagcaccttaatgagtagcagtggcagcaacaacaacttatccatcagtaatgaagagccaacattttcacctattcctgtcatgcaaactgaaatcctgtcccctctgcgagatcatgagaacctgaaaaacctctgggtgaagattgaccttgacttactctctagagtacctggccacagctcactccatgcagcacctgccaagccagaccacaaggagactgccacaaaacccaagcgtcagacagctgtcacagctgtggagaaaccagcccctaagggcaaacgtaagcacaagccaatagaagttgcagagaagatccctgagaagaagcagcgcctggaggaggccacaactatctgcttgctccctccttgcatctcaccagccccaccccacaagcctcccaacactagagaaaataattcatccaggagagcaaatagaagaaaggaagaaaaactatttcctcctccactttccccactgccagaggaccctccacgccgcagaaatgtcagtggcaataatggtccctttggtcaagacaaaaacatcgccatgactggacaaatcacatctaccaaacctaagagaactgaaggcaaattctgtgctactttcaaagggatatcggtaaatgagggagacactccaaaaaaggcatcctctgccaccatcactgtcaccaatactgctattgccactgctactgtcactgctactgccattgtcaccaccactgtcacagctactgccaccgccacggccaccaccacaactactaccactaccatttccaccatcacctctaccatcactactggcctcatggatagcagtcacctggagatgacgtcctgggcggctctgccccttctatccagcagcagcactaatgtccggagacccaagctcacttttgatgactcggttcacaatgctgattattacatgcaagaagctaagaagctgaagcacaaagctgatgcactgttcgagaaatttggcaaagctgtgaattatgctgatgccgccctctccttcactgaatgtggcaatgccatggaacgcgaccctctggaagcaaagtccccatacaccatgtactctgagactgtggagctcctcaggtatgcaatgaggctgaagaactttgcaagtcccttggcttcggatggggacaaaaagctagcagtactatgctaccgatgtttatcactcctctatttgagaatgtttaagctgaagaaggaccatgctatgaagtactccagatcactgatggaatattttaagcaaaatgcttcaaaagtcgcacagataccctctccatgggtaagcaatggaaagaacactccatccccagtgtctctcaacaacgtctcccccatcaacgcaatggggaactgtaacaatggcccagtcaccattccccagcgcattcaccacatggctgccagccacgtcaacatcactagcaatgtgttacggggctatgaacactgggatatggccgacaaactgacaagagaaaacaaagaattctttggtgatctggacacgctgatggggcctctgacccagcacagcagcatgaccaatcttgtccgctacgttcgccaaggactgtgttggctgcgcatcgatgcccacttgttgtagtgggtgttctcagatctctagcatcacgacccatcactctacctctaccagcgcactgatggtcactggtggaactccactcactggggaacgttctctttggttatgtttgtttttatgcttcttttgttatctgtaaaaaacagaagtcattgtaagttgacactacaacttaagggcagtgtacgttttattacttagtcattttttttcttttagcatttgatatgcatttctcagattccaccatctttttgtgctttatggaatgacagtccctacaatattgttttaagcccacactacccaaaacaaagaatgggaagcacttgtgataaagacaggctcctgagaaatgcaacaagtggtcttacatatacatgagaacttagacacaagggaccatcccccaaactctactcttatacccagaaaagaacatatttcagaatctgtcaaacttttgtgtatcccacagattcaatcttcaggtgagaattttcattgtcaaaacccactggttagatgttgtagcaacatcataaaatcaagagtatcaagaaaataaatgagcatagcaatgctactcttaaaaagatgctatgccacacaaccagaggactttcttgttagcatccctttcctgattccctattttgttaattttaatgataagaagaaagggtgacatttattttgacaagttttaggcatcagctggcatcagtgtttttcaactccattatttgaagtgtaaatcctcacctggggttctctgtgtgcaaagctgtccttttgaagaacagtttggttgatgcatgccttagtagccaaaatgctacactctagacttacaagtgggagttaagagaggtctggaaagtgtccaacaaggaattcacacctctgcctcctttgcaacaacaacatttacacagttggtaagtgggtccataactggcaggatttttaaattgtattttgctcaaatctatgggaacaaaagtcaaggtatcactacctagaagtaatgatatacagttttcttcctagtggcttgaaaatctggacttcctcaattattattcacattttctctcttataggttttctgttttctactttcttttttctcttatctgtgtttccctttcctttgtttggctcattaacttttgactgaattacaattactccttttattaaagtccatattattgtgaatcatttccatgaaaatttctaagaaaactccaaactctctaaatagtagctaacttttatttttttaaaatgagtcgtggggtagtgcttcaccttgagatgctttgaaagagccctaaacattgggaaccattcacctaatttggagacatttctcactggttgtgactacccccttatgatccttcacattcattttatgtccctaaacatcacaatgtaaatatcatttttgatgttccagctcaccagaagattcttacacttggggtaaacactatccatgcattacttactggtaattacctgctggtatataattccatgtagcctttaatatgctgggttatcaaattctgttcactgagttatgaccagataaataatagatatgcacatgaaagatgcaaacttgtgtgattattaaagccagccatgcaggtccatgatagaaacagcaggtgatgactctgcactctcattgtcaaggttagatatatccccagttgcaaaacagccagacttgagctgtgctctggtcatctttgagtttaaggccttttgttgtataaggctgtggaagttgtactccaatggctgaagccatgttgttaatatggctgatgggagcatccctgcagctgaacccagcactttttatgctcccactgtggttgagctttatgtttacagtctcagcaacaacacttatgcatccaaacactcacaaatgaaacctgaaagaatcttttctgagcctcttaaaagaggaaaatgatgataacattaaagactctgaacacccaaggttggtgtcacatataaaaattaagctgatgactttgcagtgactcaagttgtctctttatcatggtttaccaggtagagtgcctggctattactatataatgaagcccactggcttgacttgtaagttcaacctaaaccacaatcctagaccatcatggatttaggagtagattcttcttgaaatcccacatccagaaactagacattagaatgttgaggcagtttcccagagaaacaagcatattgcctcatggatgaaagacttgtagttctagtttcagtgacttgttatatctacttacatacaacagggaggcaagaggattctctgtcatctctggtgactgagtgtaaaatatgtgccaagtctgcagcacagtgaccaaatctgacaatcgagctctggatcaccacttgattatgtagtagactcatttataaagcagcttaggaactaattaaacatggaggatgaattaccttcctatcccttgagataagacatctttcagtttcatgattaaggattgttgctgttttatagttactctgttcatcacagtgtaaatggtgatgcgtgtcgtaggtgtgcagctatttgagggactaagggatggagatattctgtcaaatgaatctcttcagtataccagtttgtgggagggatatgagacatgtggatggcagtgagagatcgtgcctctagatcttgatggaggcttggtgagacacacttaaataagcacgtggaggttagaatagagggcagagtaaaaggaagctccatctgagcaagtacaccaaatgatctcagccctgcaacttgacccaggtagggccaccactacgccttcacttgtcacccaagctccaaccacagagagtttgacaagtttgtgttatgatgttggcttggctttgtatttttaattaactttggatttttagtggttttgtcatataactgtctgagtttggtaggtaggattactttgaaaagggtttactagtgtggtcctccgggtagaatttagctgtaagcatgttgttagccagcctgtagactgttaattacttaataatctcattgggaaaatactagtagttttatatttggatgacataattggaaaagcagattagctgctactacttttaaaagacttaaggtcgggatgcctttttttccatgtaaggaaatgaaaagaccaaaatcttcaggcaaaaagcaagttgcaaaattagaaaccattggctaaaaatgtgttttgttgagtttccaaatggatgaattttcatttggacattacatcactaaattcattagattttgtctgcattggaaagatactcttctagcatatctttcccaaagatatctaatttggattctgtttcatgcaaatttgcatcccggaggttgaagttggagtttgaggttggaaaatatctttgaaggcagaatcagttgagttgtgagggtgaagcctcacatacttctcaacagacatgataaaattcacctgcatgagttggcaggtgggagaaccaaactggatcactgggtaagactactcagtaaagcaatgaactgcttgcttagagaagcatcactatccccattgagaaaaatgtgtggcaagatgatacagctacacagtatcaaatgaatgggtcaattcagcacccccaaatttaattctgtggggaaaaattattgagccagttgtcagtgttctgttacatgactggcagactaaattcttcatcgttgttgttattgttgttgttgtttctcattttcactcgcacggccttattctcataattaaaatctaattcattttctctttagtgttagtagactccaacaacagaagtggcatctgtgtattcataatcagcatttaccctggcaggagactaatcagataggccggtctcagacattaatcctaccatctgatatttttggtgaaggaaaaagtattaattctctttccatcctcctcctcagaaatatagaagccctctttaccaaaatcatcacattttactctgtaatctaccagctaaaagaaaattgcattgtggggagggcagaaagggggtgggggtgggggcgggggggtggggggtggggaagccccacaaagccagattgcagttcttgcccctttttgcgtctgacatgagatgttaaagaattattcatagtgctcacattgggttaggggacactgaactgctttttagatccatgatcagtcatcattcttctaagagattggagctttgctgtttcattaactgtgcagtgtagactaatggtgtttaataaaaatcattcaaaatttcaaactcttttgccagtgacctcaattttgttggctctgtgatttgtatcagactttgaggagggaagggggaagtgaaggaagcctacgtccaggcccctgacaggatgctgcagtagcaagctcaagctcgcctgcctgccagcagttgctggtgagcagcagcatgcagaccagctgtgggaagcctcctgaagaatgccccagctgatgctttcagctgggaatagtttgttcctattggggaactcattgttctccagtctctgcagcaggaagccagctgtcatattcggagggaatttcagatgctttacctttttggttttgtcctgcatcactcatgtggctacgaaagtgtctctgagaatagagcccaatgtggtgacaatgggtagtcaaatgcaccccagatgctcaagccctgttgtggttctgcagtgtttatgaaattgggaggaaggagaccctggacagtaagcaaaattggagacactccaacgaggctaagttaatgccgtgttgcccagaacaagatctagcttctcatttggtcagcctagcatgcaaccagtggtgtgctggtaaaatgtttaacaaccagctcgctgagaatagaaagcacctggtttgcaccatttgccaatttccatggcataaatactaccactttagatgattttaagctaccaactgtgatgtcactgaacacatggttggaaagagatgcacgcagttggctcttgcaagcctgggcaaaaatgcttcaacacgccactggatgcagccagtcagagggttcatatttaatatatgtgttcatgtggacacacacagacacacacacacaaactcacccttacacacacacttcgatgactaaaacaattacatagttttaagatatgaatcaatgtgtgaatgtagaaagcttatgataaggccctagaggtatgggttgccctggaagcctaggttttaagcaggagaatagctgagaagaatgaagccctcctgagctgaaaggagagatggatcaatggagatggttccatcatctccttccatatctcacaggtaaaatgggcactcagaaaaccctcacgattgattttttaaaaagataagtgagtgttttttattttattattattgtcatcattattttgatttacaaatgctatttgtaacttttacatgtaactaggataaagtatttacgggaactctatggagaatagcacaatccagaatttactgtgtttttcttttatgtgacgtggaaactcagtaattctcccaccttcacattgttgttcataagaattttactttagttattagggaatctaagttttttgttaacatttgtttttagttaaaagtatctacttactgttttagctctgaactcaaaccagaatatctctgtatcaattgcatgactattcagaaacaataatccaaaccaaaataattctttttccacccagtacgaagaaaactaagctcagtaacaagaaggcataaactaaagtatataatgaggctttcattaaatacacacacacacacactcacacacacacacatacactttttaaatttttaaattaggcctccacacataaatcattttgaaagtagaatagaaaatctcaaagaattcattctcctggtcctgtgcatcttctgcagttaataagaggtttgtatctggaaagatggaagaacttgttctaaaatcttatttttcaaaaaaaaatttccattttctctctgggcctgtatccatggttgaatgttagccctggaggagatccatgtcttactcgctctttctggcccttctgtcttttgcctctgcaattctttttgtagctggcacgatagcagggactgggggtctatcctttcatggtattgctacaatatttgtccttactggaaaatggtaacatccgggtctgatttaattggcattacacttacacagggactctgagcacccccgtcaccacaccagacagtggaccagttttcacagctacaaagagctagaaatgtgtttaacatcatccagtgcatcccctaattcaaaaccatcctcactaatcaatcatattcacccataaatattacaaatgagattgattccatctcaagacaatttgtcaaatacttaattttcttcctggatgattctacttactggatattttagaaagagaaatgtctgagataaaatccctcacatttactcaatataacaaattactgtttctactcctattctgagtagtgcttctgaagattgtttgctgtagtgttgtctttgataaaatgaatgtcagtagtgagccttttagagataccatgctcagaaatcctctttgggatcagaagatacctaaaattctccccttttgcccacttggttagatgagtgatatattctttggatcctgcaaagaagagattggtttattttcttttctggtggtggtagtggttgtatctgtggctgtgatggttgttgttacttgtctctctctctctctggctctggcttttgctttcctgctagtgttctttctctttccaaacaaatagttaaattaaatgtgagcttctgaattgtacttgttcatactttcaaaacataacagattaataaaaatagatgtgtcctgatttaaaacatgccccctggaaaggcatgctgtattatgaaatcgtgataatataactgcattattacatggcagtataaatattagtctgttgaattcatttgtccaattgtataactttgtggagcagtgttttgacctttgatacataattctggagcaagtggagtggttgcaggcagatgagacagtgttatatcaggatttttcaatcaactttagttggaggcctggcaattacaaacatcttcagatgtttctgtaaccattataaatatgaaaaaaacctcttcaaaaaatttcccatagtacttcagtcaagactttttaggtttatcttttttttttcatttctccttttccttttccattatttttcgatgggggggttgttatcattgactgaagaaatattttgattgcaatggtctctctctctctccccctctctctctctctcctctattctttcctccttccctctgtccatcacccctcattaaaatattgaaatctggagtctttgataaatctgcattagaccaggctatatgctaggaatgaaatctgggcaaatatcgatgggttttcaaagaatgctccatgttcattgggccctttcacaccccacagtgataaatgaaaaggatagaggtagttttttcaaaagagcactttaataatatcctctgagacctaatgcagtttaacaaatgactccacctatttttccagtaggtaaattgactgagacttgcaaaatacccctgagagttgtcaggggtgtcttctgcctggtctatagcgtgtgtgtttgctttgtatctaacaggcacattcacgtctcgtgtactcatatgaagtatttcctaacattcccattagcctgtatataagaatcagaaagataatcccaacatgttgtaaatgaagatgtgactctataacctttctcttcttcctggaaaaaaaaggacattttcatgcatattttaaacagaaattttgtatatttaagtgtcatagaaaatatttattgagtaactgggacacaaatgggaatttaattgtcatcatatgctttgtgtgtggggatgcttaccaacaccatgtcgctggaccattgtggcaagccataactgcacaaagagtacacatcgtcagtgtgtgtgtgtgtgtgtgtgtgcgcgcacacacgtgcgtgtgtgtgtccctgcatgtgcaacatgtctagcttgctgtccttcatgggattttagctttcccttcttgaaaaacattattttacagttccaggaggccctggttacattactatatgaaggcagtgatttgaaatgaaaattcctttcctcttggaagctttggtcataatatcatggttcaattaaacggattccaccggactttgtgatgaaaaaggctctgttaaaatccaattgagtttccaagaggaaattgtagtaggtcaagatgcatgagagggaagatggaggccacctcaactggagaacatgagctgagttgagccctcagtgttgaagttgacttgctccaagctgcagtctaaaaccctggggcccgtgcctggcctatgctccctcccaagtaagtagaggagcagaaccatcaggaacagcctgcctggctcctatgaagaaaacttcctgacgtcctgtccccaaaggaagaccctttccccaagggcaccccaggtggccattaaattgtgatgatcattcagaaagtgcccccttggctttatgagaatccaattagtcttctgaaccaccttttcttgggtgcagatttccaacattcatgctcattgcagatccaccaactgtcactgttcttaacaagcatgctcgtcttgtcagaatttcagtaagttccaatttcctgtacagaccagggtaaactgttctaaaatcaatcaattaatgaaatgttatctggtttttaaaagctggtttcatgtgctttatgtgtataaaactatatctgcctgtgtggctttgcatttcaaatgtgtggcgcacaagcgttttgttggtgctttgttctcagtacagtaactctgtgtacaaacattttaatgtggttttgttgttttccaacaagatgtctctgtaaaaatgatattggctgagctggtgcgttggtttctctcatagaggcattaactatactgccaatgcattgaattatttaaaaatgcaaaataaaatttttatgaaaatctca

SEQ ID NO: 745 - DNA, 197 bp, Homo sapiens
  source 1..197: mol_type = unassigned DNA
tttcttaagaattaagggacagactatgggctggaggactttgaggatgtctgtctcataacacttgggttgtatctgttctatggggcttgttttaagcttggcaacttgcaacagggttcactgactttctccccaggcccaagcttccatattggattcttaccaatgtactgcagagataagtttagctgacc

SEQ ID NO: 746 - DNA, 317 bp, Homo sapiens
  source 1..317: mol_type = unassigned DNA
gactatgggctggaggactttgaggatgtctgtctcataacacttgggttgtatctgttctatggggcttgttttaagcttggcaacttgcaacagggttcactgactttctccccaggcccaaggtattccttcataacaaatactttggctttcatatatttgagtaaagtcccccttgaggaagagtagaagaactgcactttgtaaatactatcctggaatccaaacggatagacaaggatggtgctacctctttctggagacttccatattggattcttaccaatgtactgcagagataagtttagctgacc

SEQ ID NO: 747 - DNA, 2484 bp, Homo sapiens
  source 1..2484: mol_type = unassigned DNA
actagttaacaggcattgcctgaaaagagtataaaagaatttcagcatgattttccatattgtgcttccaccactgccaataacaaaataactagcaaccatgaagtgggtggaatcaatttttttaattttcctactaaattttactgaatccagaacactgcatagaaatgaatatggaatagcttccatattggattcttaccaatgtactgcagagataagtttagctgacctggctaccatattttttgcccagtttgttcaagaagccacttacaaggaagtaagcaaaatggtgaaagatgcattgactgcaattgagaaacccactggagatgaacagtcttcagggtgtttagaaaaccagctacctgcctttctggaagaactttgccatgagaaagaaattttggagaagtacggacattcagactgctgcagccaaagtgaagagggaagacataactgttttcttgcacacaaaaagcccactccagcatcgatcccacttttccaagttccagaacctgtcacaagctgtgaagcatatgaagaagacagggagacattcatgaacaaattcatttatgagatagcaagaaggcatcccttcctgtatgcacctacaattcttctttgggctgctcgctatgacaaaataattccatcttgctgcaaagctgaaaatgcagttgaatgcttccaaacaaaggcagcaacagttacaaaagaattaagagaaagcagcttgttaaatcaacatgcatgtgcagtaatgaaaaattttgggacccgaactttccaagccataactgttactaaactgagtcagaagtttaccaaagttaattttactgaaatccagaaactagtcctggatgtggcccatgtacatgagcactgttgcagaggagatgtgctggattgtctgcaggatggggaaaaaatcatgtcctacatatgttctcaacaagacactctgtcaaacaaaataacagaatgctgcaaactgaccacgctggaacgtggtcaatgtataattcatgcagaaaatgatgaaaaacctgaaggtctatctccaaatctaaacaggtttttaggagatagagattttaaccaattttcttcaggggaaaaaaatatcttcttggcaagttttgttcatgaatattcaagaagacatcctcagcttgctgtctcagtaattctaagagttgctaaaggataccaggagttattggagaagtgtttccagactgaaaaccctcttgaatgccaagataaaggagaagaagaattacagaaatacatccaggagagccaagcattggcaaagcgaagctgcggcctcttccagaaactaggagaatattacttacaaaatgcgtttctcgttgcttacacaaagaaagccccccagctgacctcgtcggagctgatggccatcaccagaaaaatggcagccacagcagccacttgttgccaactcagtgaggacaaactattggcctgtggcgagggagcggctgacattattatcggacacttatgtatcagacatgaaatgactccagtaaaccctggtgttggccagtgctgcacttcttcatatgccaacaggaggccatgcttcagcagcttggtggtggatgaaacatatgtccctcctgcattctctgatgacaagttcattttccataaggatctgtgccaagctcagggtgtagcgctgcaaacaatgaagcaagagtttctcattaaccttgtgaagcaaaagccacaaataacagaggaacaacttgaggctgtcattgcagatttctcaggcctgttggagaaatgctgccaaggccaggaacaggaagtctgctttgctgaagagggacaaaaactgatttcaaaaactcgtgctgctttgggagtttaaattacttcaggggaagagaagacaaaacgagtctttcattcggtgtgaacttttctctttaattttaactgatttaacactttttgtgaattaatgaaatgataaagacttttatgtgagatttccttatcacagaaataaaatatctccaaatgtttccttttccaagtttgcttatttatgaaaagttatcgataatttctttagttttgtataccattgtctgaagcagattctgttaaaatagcattaagtgttggttattataggagattaaagctatccaaggatggatttacagcactagatcacttggtgaactgaaaaatgttcccaagttaaacactatttgatgctaccagggcattttgtttattaaatgaccatcactgaagtattctaacagataatctggagatgagaaaagaaattattattcttctatgggatctaagaaaatttaacatctactttttttctcaatcttgttcagttctctattcacagacattttaaaacataagaatattacagttttgattgaatataattaa

SEQ ID NO: 748 - DNA, 1914 bp, Homo sapiens
  source 1..1914: mol_type = unassigned DNA
aaaataactagcaaccatgaagtgggtggaatcaatttttttaattttcctactaaattttactgaatccagaacactgcatagaaatgaatatggaatagcttccatattggattcttaccaatgtactgcagagataagtttagctgacctggctaccatattttttgcccagtttgttcaagaagccacttacaaggaagtaagcaaaatggtgaaagatgcattgactgcaattgagaaacccactggagatgaacagtcttcagggtgtttagaaaaccagctacctgcctttctggaagaactttgccatgagaaagaaattttggagaagtacggacattcagactgctgcagccaaagtgaagagggaagacataactgttttcttgcacacaaaaagcccactccagcatcgatcccacttttccaagttccagaacctgtcacaagctgtgaagcatatgaagaagacagggagacattcatgaacaaattcatttatgagatagcaagaaggcatcccttcctgtatgcacctacaattcttctttgggctgctcgctatgacaaaataattccatcttgctgcaaagctgaaaatgcagttgaatgcttccaaacaaaggcagcaacagttacaaaagaattaagagaaagcagcttgttaaatcaacatgcatgtgcagtaatgaaaaattttgggacccgaactttccaagccataactgttactaaactgagtcagaagtttaccaaagttaattttactgaaatccagaaactagtcctggatgtggcccatgtacatgagcactgttgcagaggagatgtgctggattgtctgcaggatggggaaaaaatcatgtcctacatatgttctcaacaagacactctgtcaaacaaaataacagaatgctgcaaactgaccacgctggaacgtggtcaatgtataattcatgcagaaaatgatgaaaaacctgaaggtctatctccaaatctaaacaggtttttaggagatagagattttaaccaattttcttcaggggaaaaaaatatcttcttggcaagttttgttcatgaatattcaagaagacatcctcagcttgctgtctcagtaattctaagagttgctaaaggataccaggagttattggagaagtgtttccagactgaaaaccctcttgaatgccaagataaaggagaagaagaattacagaaatacatccaggagagccaagcattggcaaagcgaagctgcggcctcttccagaaactaggagaatattacttacaaaatgcgtttctcgttgcttacacaaagaaagccccccagctgacctcgtcggagctgatggccatcaccagaaaaatggcagccacagcagccacttgttgccaactcagtgaggacaaactattggcctgtggcgagggagcggctgacattattatcggacacttatgtatcagacatgaaatgactccagtaaaccctggtgttggccagtgctgcacttcttcatatgccaacaggaggccatgcttcagcagcttggtggtggatgaaacatatgtccctcctgcattctctgatgacaagttcattttccataaggatctgtgccaagctcagggtgtagcgctgcaaacaatgaagcaagagtttctcattaaccttgtgaagcaaaagccacaaataacagaggaacaacttgaggctgtcattgcagatttctcaggcctgttggagaaatgctgccaaggccaggaacaggaagtctgctttgctgaagaggggaagagaagacaaaacgagtctttcattcggtgtgaacttttctctttaattttaactgatttaacactttttgtgaattaatgaaatgataaagacttttatgtgagatt

SEQ ID NO: 749 - DNA, 728 bp, Homo sapiens
  source 1..728: mol_type = unassigned DNA
agaagcaaggcggctaaaaactcatgaatgactcagcaggacttagttaaaaaatgcttctttcaggtttctcgttgcttacacaaagaaagccccccagctgacctcgtcggagctgatggccatcaccagaaaaatggcagccacagcagccacttgttgccaactcagtgaggacaaactattggcctgtggcgagggagcggctgacattattatcggacacttatgtatcagacatgaaatgactccagtaaaccctggtgttggccagtgctgcacttcttcatatgccaacaggaggccatgcttcagcagcttggtggtggatgaaacatatgtccctcctgcattctctgatgacaagttcattttccataaggatctgtgccaagctcagggtgtagcgctgcaaacaatgaagcaagagtttctcattaaccttgtgaagcaaaagccacaaataacagaggaacaacttgaggctgtcattgcagatttctcaggcctgttggagaaatgctgccaaggccaggaacaggaagtctgctttgctgaagagggacaaaaactgatttcaaaaactcgtgctgctttgggagtttaaattacttcaggggaagagaagacaaaacgagtctttcattcggtgtgaacttttctctttaattttaactgatttaacactttttgtgaattaatgaaatgataaagacttttatgtgaga

SEQ ID NO: 750 - DNA, 693 bp, Homo sapiens
  source 1..693: mol_type = unassigned DNA
ggctgacattattatcggacacttatgtatcagacatgaaatgactccagtaaaccctggtgttggccagtgctgcacttcttcatatgccaacaggaggccatgcttcagcagcttggtggtggatgaaacatatgtccctcctgcattctctgatgacaagttcattttccataaggatctgtgccaagctcagggtgtagcgctgcaaacaatgaagcaagagtttctcattaaccttgtgaagcaaaagccacaaataacagaggaacaacttgaggctgtcattgcagatttctcaggcctgttggagaaatgctgccaaggccaggaacaggaagtctgctttgctgaagagggacaaaaactgatttcaaaaactcgtgctgctttgggagtttaaattacttcaggtaacaaaacattcagacaagcctgaatacaatgttgtttctccagaaatatcaatccataatgagatagatcatgaggagtgccattaattctcttaaaaatacatggaattcaaaaaaaagtttattttaaaaacacttgaacaaaattacgcacacaatgttaaattagtggctcaactatgcaaaatcctttttggttatttaaaagacttcaacaaatgctatcagaagactttcctacgtatccaatatttctctgatataaaataatagaacc

SEQ ID NO: 751 - DNA, 476 bp, Homo sapiens
  source 1..476: mol_type = unassigned DNA
atgaggggagattgccttccactacacataagtatggtcaagtatgaaatagtgttttatccacaacctgcacaactccaggctggtggaacacttggcatgctttcagcctcaatctttctactgaaagtactagacaaggtttctcattaaccttgtgaagcaaaagccacaaataacagaggaacaacttgaggctgtcattgcagatttctcaggcctgttggagaaatgctgccaaggccaggaacaggaagtctgctttgctgaagagggacaaaaactgatttcaaaaactcgtgctgctttgggagtttaaattacttcaggggaagagaagacaaaacgagtctttcattcggtgtgaacttttctctttaattttaactgatttaacactttttgtgaattaatgaaatgataaagacttttatgtgagatttccttatcacagaaataaaatatctccaaatgtt

SEQ ID NO: 752 - DNA, 2165 bp, Homo sapiens
  source 1..2165: mol_type = unassigned DNA
ggcgctcggagcgggctccgcggcttgcaaggcgcctgcgactcggtcccaggtcggcgggcggcgcacggcgggctcgcgcgggggccccggcgcgccgggcggcgcagtacgcagcgcgcggacccacgccacggccaggagcccagagcagcgcggccacactgcccaggggtcggccctcggccccggcgctcggagcgcggcggctgcctgggctttaatggctgctccgcggagcagcgcctagggctggaaggcggctgcggctcaggaagtcacccgagcaagcctccttcggggccggccgcacccgccgcggcgcgctccatgggggcgcgctccccccgggcggcccgctgacccgggacgccggggcccgctcgctcgccggccgcgcgtcccggccatgaactgagcccgcgggccagccccgcgcctgctccgcccgcgcctttcttctcgcgcctcctccgcccgccgccggcgggcccggctccccgggggctgcggcgccccgggctcggcggcccgcgggccccggggcgcggggcggcggcggcggggggcgcgcggctccgggcgcggcgcctgcaccatgaactaccagcagcagctggccaactcggctgccatccgggccgagatccagcgcttcgagtcggtccaccccaacatctactccatctacgagctgctggagcgcgtggaggagccggtgctgcagaaccagatccgggagcacgtcatcgccatcgaagatgccttcgtgaacagccaggaatggacgctgagtcgatctgtcccggagctcaaagtgggaattgtgggtaacttggccagcggcaagtctgccctggtgcaccggtacctgacgggcacatatgtccaggaggagtctccggaaggtggcaggttcaagaaagagattgtcgttgatggacagagctatctgctgctgatcagagatgaagggggccccccggaggcgcagtttgccatgtgggtggacgctgttatatttgtcttcagcttggaggatgaaataagtttccagaccgtttaccactactacagtcgaatggccaactatcggaacacgagcgagattcctctggttctggtgggaacccaggatgccataagttctgctaacccgagggtcatcgatgacgccagggcgaggaagctctccaacgacctgaaacggtgcacgtactacgagacgtgtgctacatacgggctgaatgtggagagggtcttccaggacgttgcccagaagattgttgccacaaggaagaagcagcagctgtccataggaccctgcaagtcgctacctaattctcccagccattcctccgtctgttccgcgcaggtgtctgccgtgcacatcagccagacaagtaatggaggtgggagtttaagcgactattcctcctccgttccatcgactcccagcaccagccagaaggaacttcggatcgatgttcctcccactgccaacacgcccacgcccgttcgcaagcagtctaagcgccggtccaacctgttcacctctcggaaagggagcgacccagacaaagagaagaaaggcctggagagtcgtgcggacagcattgggagcggccgagccatcccaattaaacagggcctgcccttctttgtccttgcactgacagccagcacttatctcaggcctgctggagcccgtgcccgtcagtcctccccctggccagggccgaggggtggtcagaccagcccgcattgtgctgaaggcccacaatcagcccagctgtccggggccatgatgaattagcggtgggagttaacatagaggtgaactccagatcggccgatagcttgcaggccgctgctgtttgtcctgacttcagcgcatctctgatagacctttgacaccttccaacaaagaggttacaggagggagagctggagaaatggagcgctcctccagaaagttcggcaactcacaaaagaccccttaatttctatagcgggcaattcagtccacaaaggaaggaaatcaatgagcgtttacgctctttctttgaggaacctttttttaaagaaaaaaacatttactggcgctttgcatgttttgggtacaagcagtggtagaaacataaaacattaaaatccaagattga

SEQ ID NO: 753 - DNA, 5427 bp, Homo sapiens
  source 1..5427: mol_type = unassigned DNA
cgcggcttgcaaggcgcctgcgactcggtcccaggtcggcgggcggcgcacggcgggctcgcgcgggggccccggcgcgccgggcggcgcagtacgcagcgcgcggacccacgccacggccaggagcccagagcagcgcggccacactgcccaggggtcggccctcggccccggcgctcggagcgcggcggctgcctgggctttaatggctgctccgcggagcagcgcctagggctggaaggcggctgcggctcaggaagtcacccgagcaagcctccttcggggccggccgcacccgccgcggcgcgctccatgggggcgcgctccccccgggcggcccgctgacccgggacgccggggcccgctcgctcgccggccgcgcgtcccggccatgaactgagcccgcgggccagccccgcgcctgctccgcccgcgcctttcttctcgcgcctcctccgcccgccgccggcgggcccggctccccgggggctgcggcgccccgggctcggcggcccgcgggccccggggcgcggggcggcggcggcggggggcgcgcggctccgggcgcggcgcctgcaccatgaactaccagcagcagctggccaactcggctgccatccgggccgagatccagcgcttcgagtcggtccaccccaacatctactccatctacgagctgctggagcgcgtggaggagccggtgctgcagaaccagatccgggagcacgtcatcgccatcgaagatgccttcgtgaacagccaggaatggacgctgagtcgatctgtcccggagctcaaagtgggaattgtgggtaacttggccagcggcaagtctgccctggtgcaccggtacctgacgggcacatatgtccaggaggagtctccggaaggtggcaggttcaagaaagagattgtcgttgatggacagagctatctgctgctgatcagagatgaagggggccccccggaggcgcagtttgccatgtgggtggacgctgttatatttgtcttcagcttggaggatgaaataagtttccagaccgtttaccactactacagtcgaatggccaactatcggaacacgagcgagattcctctggttctggtgggaacccaggatgccataagttctgctaacccgagggtcatcgatgacgccagggcgaggaagctctccaacgacctgaaacggtgcacgtactacgagacgtgtgctacatacgggctgaatgtggagagggtcttccaggacgttgcccagaagattgttgccacaaggaagaagcagcagctgtccataggaccctgcaagtcgctacctaattctcccagccattcctccgtctgttccgcgcaggtgtctgccgtgcacatcagccagacaagtaatggaggtgggagtttaagcgactattcctcctccgttccatcgactcccagcaccagccagaaggaacttcggatcgatgttcctcccactgccaacacgcccacgcccgttcgcaagcagtctaagcgccggtccaacctgttcacctctcggaaagggagcgacccagacaaagagaagaaaggcctggagagtcgtgcggacagcattgggagcggccgagccatcccaattaaacagggcatgctgttgaagcgaagtggcaaatcgttgaataaagagtggaaaaagaaatatgtcaccctgtgtgacaatggcgtgctgacctatcatcccagtttacatgattacatgcagaatgttcatggtaaggagattgaccttctgagaaccactgtgaaagtcccagggaagaggccaccccgagccacgtcagcctgcgcacccatctccagccctaaaaccaatggcctatccaaggacatgagcagtttacacatctcacccaattcagacacagggctgggtgactccgtatgctccagccccagtatctccagcaccaccagccccaagctcgacccgcccccctcccctcacgccaacagaaagaagcaccgaaggaagaaaagcactagcaacttcaaagccgacggcctgtccggcactgctgaagaacaagaagaaaattttgagtttatcattgtgtccctcactggccaaacatggcactttgaagccacgacgtatgaggagcgggacgcctgggtccaagccatcgagagccagatcctggccagcctgcagtcgtgcgagagcagcaagaacaagtcccggctgacgagccagagcgaggccatggccctgcagtcgatccggaacatgcgcgggaactcccactgtgtggactgcgagacccagaatcccaactgggccagtttgaacttgggagccctcatgtgcatcgaatgctcagggatccaccggaatcttggcacccacctttcccgagtccgatctctggacctggatgactggccagtcgagctcatcaaggtgatgtcatccatcgggaacgagctagccaacagcgtctgggaagagagcagccaggggcggacgaaaccatcggtagactccacaagggaagagaaggaacggtggatccgtgccaagtacgagcagaagctcttcctggccccgctgccctgcacggagctgtccctgggccagcacctgctgcgggccaccgccgacgaggacctgcggacggccatcctgctgctggcacacggctcccgggacgaggtgaacgagacctgcggggagggagacggccgcacggcgctgcatctggcctgccgcaaggggaatgtggtcctggcgcagctcctgatctggtacggagtggacgtcacggcccgagatgcccacgggaacacagctctggcctacgcccggcaggcctccagccaggagtgcatcgacgtgctgctgcagtacggctgccccgacgagcgcttcgtgctcatggccacccctaacctgtccaggagaaacaataaccggaacaacagcagtgggagggtgcccaccatcatctgaggaacagccgtgcccgcctgctcgccgcacctgggacgcggcagcctcgccgcattctcgctcagaagtcgcagcacgtgagtcccgtcgcatcccctccctcttcctggtggccacctccctcccgcccacccactctcaccccaaacaaaatcacaaaacctggacatccctcaaggggcgaagaggcggccgggagactgcagaagtggctccttttcataaactcccctaaaccacacacaggagagagcgacgggcctcggccctttgatgatagcacatggcgcaggacccttgtcctggtggcacaagggatggggacgcgagggggaggggaggcgaggaacaaggagaaggggcaactttccttaactggcagttgagcacatagtacatttcccctctaccaaacggaacacttggattccatctcttctctgaggagctcgacggcataaatcagaagcaagcacagagtttgtcaggtttgaagcccctatgatggtgtgtgtcaaatcagttgtagctaatctgtccagggagaatactggcttcattacacttgtacagccgagttcttcccgcattactgctgtttaatagaacgtgattagtcatcgccgagaagaaagcatattagccgaggaggtagtcacgcggcacgcgccggtgattgccacgatgtgattgcaatactcttagaagcaccatattatcccagacatgttctttcaagcccttggagccctctctaaattcactgtcatcatttagtatctgtttaatttttcagtccaaagagaggaaatcagtcgctgagtattatttgactccggtctccttggtgcaaaaacaaaatgggaaaaataaataagaataactcagaaactcaaaaggaaaccacaaattcagctaataatagcatttcgagtatatttcgtaaactaaggaaatacacaaaaggctgttttttccgactgtaagagatatttgatgtccttttgccgaggtggatgtgttagtctcaggccctcctggaccacgttgcccaagtcacacaggcttctgtgttatgtatttagataagatgtgtgaaaatatatttgaataaaagaagttcataaatatgcattgatttttgtacagacaaatggcacctctcttaatttataaattgaactggatgtgaactaataatgtgcaactagttgagataagagggttacagatcattgtacatggaaaatattcccagcagtaaacacttccattaatgtgatctacggcttttgaaaaggagcatctcagaataagatggtggtacaatttgcttattaaaattgagaaagaaaaaaaaagacacactggagtatattagaaaggaaaaagaaggaatgtggtctctcatgattgaaagcatgatttagatcggatacggcttttgctaaccaaggaccaagggactctggcaagatggggtggttttccgaatgccagaccgaggtgccttacgaaggcagctgccaatggttctgtggcacagactggctcctgagaacccagacgaccttgacctggcagcccggccctccacgctagtacctcgcctgattttccatcgttgcggtatccagccgcttcagacgtccgccgccttcagtggtggtagtcaaatgtagtcaaccaaaccacagcatcccttaggttaaaagcaaacggggcagctttgcctagagctcattgacagtgtgatggggggagaagggttgtcacaatggaagatgaggacactagactcatgtagcacagaaacatgaagccacacgcaccggcagcctccggggtgttcctcgctctctcgtatgttaaaccttatattttataagagtttttcctcttatttcactttttaaaaaaaattaaagtaggtggggaaaaaaataaagctttacacagaatttatatgtgggtaagtgtttcatggaaatttctaatcttaacgaagctaagtggagctcactcgtatccaaaagtataacaggtgcagaagccacaagtctgagaaccttgacgacagttccatcgtcctgccatttgatttttcagtctgcgtttcatcactgtgtagctattgtaaatgtgaatagaaaaaaacaggtcattgcctatttttgaagaacgcgttggtgttcgagtccactagacacactcgctccacacagccttcaccgtagactctgtagtggacacagatatagcataaatgaaattgttaaattatttcattgtagttaattcccactataggaatgctttatcatagtgaagtttcttttgagaagaaacggaactccttgaggcttctctttgggatgtatatgagcgtgtacatattattctatgtgtttataatataatattttcccaaa

SEQ ID NO: 754 - DNA, 10832 bp, Homo sapiens
  source 1..10832: mol_type = unassigned DNA
cgcggcttgcaaggcgcctgcgactcggtcccaggtcggcgggcggcgcacggcgggctcgcgcgggggccccggcgcgccgggcggcgcagtacgcagcgcgcggacccacgccacggccaggagcccagagcagcgcggccacactgcccaggggtcggccctcggccccggcgctcggagcgcggcggctgcctgggctttaatggctgctccgcggagcagcgcctagggctggaaggcggctgcggctcaggaagtcacccgagcaagcctccttcggggccggccgcacccgccgcggcgcgctccatgggggcgcgctccccccgggcggcccgctgacccgggacgccggggcccgctcgctcgccggccgcgcgtcccggccatgaactgagcccgcgggccagccccgcgcctgctccgcccgcgcctttcttctcgcgcctcctccgcccgccgccggcgggcccggctccccgggggctgcggcgccccgggctcggcggcccgcgggccccggggcgcggggcggcggcggcggggggcgcgcggctccgggcgcggcgcctgcaccatgaactaccagcagcagctggccaactcggctgccatccgggccgagatccagcgcttcgagtcggtccaccccaacatctactccatctacgagctgctggagcgcgtggaggagccggtgctgcagaaccagatccgggagcacgtcatcgccatcgaagatgccttcgtgaacagccaggaatggacgctgagtcgatctgtcccggagctcaaagtgggaattgtgggtaacttggccagcggcaagtctgccctggtgcaccggtacctgacgggcacatatgtccaggaggagtctccggaaggtggcaggttcaagaaagagattgtcgttgatggacagagctatctgctgctgatcagagatgaagggggccccccggaggcgcagtttgccatgtgggtggacgctgttatatttgtcttcagcttggaggatgaaataagtttccagaccgtttaccactactacagtcgaatggccaactatcggaacacgagcgagattcctctggttctggtgggaacccaggatgccataagttctgctaacccgagggtcatcgatgacgccagggcgaggaagctctccaacgacctgaaacggtgcacgtactacgagacgtgtgctacatacgggctgaatgtggagagggtcttccaggacgttgcccagaagattgttgccacaaggaagaagcagcagctgtccataggaccctgcaagtcgctacctaattctcccagccattcctccgtctgttccgcgcaggtgtctgccgtgcacatcagccagacaagtaatggaggtgggagtttaagcgactattcctcctccgttccatcgactcccagcaccagccagaaggaacttcggatcgatgttcctcccactgccaacacgcccacgcccgttcgcaagcagtctaagcgccggtccaacctgttcacctctcggaaagggagcgacccagacaaagagaagaaaggcctggagagtcgtgcggacagcattgggagcggccgagccatcccaattaaacagggcatgctgttgaagcgaagtggcaaatcgttgaataaagagtggaaaaagaaatatgtcaccctgtgtgacaatggcgtgctgacctatcatcccagtttacatgattacatgcagaatgttcatggtaaggagattgaccttctgagaaccactgtgaaagtcccagggaagaggccaccccgagccacgtcagcctgcgcacccatctccagccctaaaaccaatggcctatccaaggacatgagcagtttacacatctcacccaattcagggaatgtcactagtgcatctgggtctcagatggcaagcggcatcagcctggtctccttcaacagccgacccgacggcatgcaccagcgctcctactcagtctccagtgccgaccagtggagtgaggctacggtcattgcaaactcggccatcagcagtgacacagggctgggtgactccgtatgctccagccccagtatctccagcaccaccagccccaagctcgacccgcccccctcccctcacgccaacagaaagaagcaccgaaggaagaaaagcactagcaacttcaaagccgacggcctgtccggcactgctgaagaacaagaagaaaattttgagtttatcattgtgtccctcactggccaaacatggcactttgaagccacgacgtatgaggagcgggacgcctgggtccaagccatcgagagccagatcctggccagcctgcagtcgtgcgagagcagcaagaacaagtcccggctgacgagccagagcgaggccatggccctgcagtcgatccggaacatgcgcgggaactcccactgtgtggactgcgagacccagaatcccaactgggccagtttgaacttgggagccctcatgtgcatcgaatgctcagggatccaccggaatcttggcacccacctttcccgagtccgatctctggacctggatgactggccagtcgagctcatcaaggtgatgtcatccatcgggaacgagctagccaacagcgtctgggaagagagcagccaggggcggacgaaaccatcggtagactccacaagggaagagaaggaacggtggatccgtgccaagtacgagcagaagctcttcctggccccgctgccctgcacggagctgtccctgggccagcacctgctgcgggccaccgccgacgaggacctgcggacggccatcctgctgctggcacacggctcccgggacgaggtgaacgagacctgcggggagggagacggccgcacggcgctgcatctggcctgccgcaaggggaatgtggtcctggcgcagctcctgatctggtacggagtggacgtcacggcccgagatgcccacgggaacacagctctggcctacgcccggcaggcctccagccaggagtgcatcgacgtgctgctgcagtacggctgccccgacgagcgcttcgtgctcatggccacccctaacctgtccaggagaaacaataaccggaacaacagcagtgggagggtgcccaccatcatctgaggaacagccgtgcccgcctgctcgccgcacctgggacgcggcagcctcgccgcattctcgctcagaagtcgcagcacgtgagtcccgtcgcatcccctccctcttcctggtggccacctccctcccgcccacccactctcaccccaaacaaaatcacaaaacctggacatccctcaaggggcgaagaggcggccgggagactgcagaagtggctccttttcataaactcccctaaaccacacacaggagagagcgacgggcctcggccctttgatgatagcacatggcgcaggacccttgtcctggtggcacaagggatggggacgcgagggggaggggaggcgaggaacaaggagaaggggcaactttccttaactggcagttgagcacatagtacatttcccctctaccaaacggaacacttggattccatctcttctctgaggagctcgacggcataaatcagaagcaagcacagagtttgtcaggtttgaagcccctatgatggtgtgtgtcaaatcagttgtagctaatctgtccagggagaatactggcttcattacacttgtacagccgagttcttcccgcattactgctgtttaatagaacgtgattagtcatcgccgagaagaaagcatattagccgaggaggtagtcacgcggcacgcgccggtgattgccacgatgtgattgcaatactcttagaagcaccatattatcccagacatgttctttcaagcccttggagccctctctaaattcactgtcatcatttagtatctgtttaatttttcagtccaaagagaggaaatcagtcgctgagtattatttgactccggtctccttggtgcaaaaacaaaatgggaaaaataaataagaataactcagaaactcaaaaggaaaccacaaattcagctaataatagcatttcgagtatatttcgtaaactaaggaaatacacaaaaggctgttttttccgactgtaagagatatttgatgtccttttgccgaggtggatgtgttagtctcaggccctcctggaccacgttgcccaagtcacacaggcttctgtgttatgtatttagataagatgtgtgaaaatatatttgaataaaagaagttcataaatatgcattgatttttgtacagacaaatggcacctctcttaatttataaattgaactggatgtgaactaataatgtgcaactagttgagataagagggttacagatcattgtacatggaaaatattcccagcagtaaacacttccattaatgtgatctacggcttttgaaaaggagcatctcagaataagatggtggtacaatttgcttattaaaattgagaaagaaaaaaaaagacacactggagtatattagaaaggaaaaagaaggaatgtggtctctcatgattgaaagcatgatttagatcggatacggcttttgctaaccaaggaccaagggactctggcaagatggggtggttttccgaatgccagaccgaggtgccttacgaaggcagctgccaatggttctgtggcacagactggctcctgagaacccagacgaccttgacctggcagcccggccctccacgctagtacctcgcctgattttccatcgttgcggtatccagccgcttcagacgtccgccgccttcagtggtggtagtcaaatgtagtcaaccaaaccacagcatcccttaggttaaaagcaaacggggcagctttgcctagagctcattgacagtgtgatggggggagaagggttgtcacaatggaagatgaggacactagactcatgtagcacagaaacatgaagccacacgcaccggcagcctccggggtgttcctcgctctctcgtatgttaaaccttatattttataagagtttttcctcttatttcactttttaaaaaaaattaaagtaggtggggaaaaaaataaagctttacacagaatttatatgtgggtaagtgtttcatggaaatttctaatcttaacgaagctaagtggagctcactcgtatccaaaagtataacaggtgcagaagccacaagtctgagaaccttgacgacagttccatcgtcctgccatttgatttttcagtctgcgtttcatcactgtgtagctattgtaaatgtgaatagaaaaaaacaggtcattgcctatttttgaagaacgcgttggtgttcgagtccactagacacactcgctccacacagccttcaccgtagactctgtagtggacacagatatagcataaatgaaattgttaaattatttcattgtagttaattcccactataggaatgctttatcatagtgaagtttcttttgagaagaaacggaactccttgaggcttctctttgggatgtatatgagcgtgtacatattattctatgtgtttataatataatattttcccaaatgacttcttgtttcactttgccttccacaacctgaatgccagattggttttttcccttcctggcccccagcacaagctgccatgactccccctcagaaaacacagcccctcctctaccattctcagtgatgtccatctgctccactccgcagccactttctagggcccaagttttggtagcagaaggaaaggcagtttttgagggtctttcgaaaaaaagaagacggggcagctttgcccagagctcgttggcagtctgtttgtatttcagtgtctaaccagaagtcctttctttgcggaccgcactctcgttcccactttcaagctaattaccaccaaggctgggagaggcaaggactgggggcggagctaggaataactcgtttgagaagggggtggagttttcgttgttcatttccatgttcagttctgtgacgtgacgatgacagatcaccactgcaggatccccctcacctttcctgttcagaattaaaactctcccttgatgagaaacagccagctgagggaggcccacgagcggcctgtgtaaccccatgggtgatctggacacatctgcacccccgcgttcagcttcgcggagactgaacttggcggggagtggaggggtgtggtgcagacctggctgcagcagaaacaccccgcagggacagtactctgtgattctgacctcaggtgctgggacgggcagatggtttcccccgcccagcaccccagtcctggtccctggtccctctctctgtttcatcccaggaaatgagcagctcgagggtgagcaagtgacaagttcctgagtcactggccccaaaaccaggtgcagtgtcctgtctcccaagtgtgtgcacaatgtatatatgcactggaaaggagggagaaggcagcgggtcactcgccaatcgcagggttctcagacacaggagagagcgggatcttaatgaattgcatttcctgcagagcctctagtgcacaggccagttctcggcagtggcttttcagcacaagggccttgcattgaagctccctcttctgagatttcacccagcctgatgaggcctgcatggttccggcctcgtcatccagtgtagataccagtcttcctatttttgtgacatctgcacatttggggtcattccctatatctgcataggagctattgctaaccttgttagggagaaacatggtctaatgagaaagacagacccctaggctcagctggccctgccatccttccagaggattcctctgcaactctaggcaagcacccagcttcctgggctctttttcctcatctgtgaaacttgcagggtgcagtgaggtttcaaaccagtgtgataagtgttggcctcacacctggcccaggggatgctgggagaacaggagcacttgttaataacagaaacactgatgggaccgaagccagtgcacacaccaggaaacctgcccgtggctgacactgtcctccagcctgcattctggggaggctgtgatgggcacgtttgccaaccccccccccccagtagagcccaggaccctcctctctcagcttgccagtgccctgccctccacatggcggggaacagcatcaatgaggtccttgctccctgagagcctctctggaacctgcccacttttctcaacatgtatattctgctttgtagtctgaggttgattttctagaggcgaggaaggggctgagttctgccctcgtgctgttcgctggtgctgatcagggccaagacgacccttccctctcccccacagcctgttgaggtgccgttgacgtggacagcgcccctcccttaagatgcccccttgccgttgccatgagccgctgtgactcacgcgtgcactgggccttgcttggtgctcccctcctcctcctgtctgagatcggagcttgctggagagcaccccaggtcgccgtgcttggctgcaggcccgtccctctctccccatcctcgggttcccagcgtgttttgtgcttgaacttggtggactcatcttaccccacaagagtggcctgctcaacctgcagcctccaatgtgccgtaggcgctctaggtccccgtggcgcccaggacaccaactctccctccctgcacttaggatgttctggaaatgagaggaaatccacattcctgccccaggaggtgggaagcctggcaacgatgtagcttcccctgagatgcggtatgatcaggcctcagcaactactcaggaggcaaaggtgtttggaaagcaaaccccaaacctcccggcacggcatgtgctctgcttccgtccctcaccgcctgcacaaggtcgttgagacttttctagaactccccggggttgtatttatggccttcaagcaaacaaattgaaaagcagtcaaggaggagttcagatagaaaagtgctggagatacacatctttccttcaaaggaaatgtaatttatttccaaccgctgcctcagacgggggtttcacatgttgtgaagtcacatcttgaatgactgtcaccctcatccttccccaaaaagctaaataagggcctttggcatcaatgcgtgcattctccacctttccgcggcttgcgcttggatttctgagtggctttcttcagggagcccttgtggtcatgtgtctttaatgctgctccccatgcccccaggccaggccagcacgctcaggtgatagcgagtggggccaggagacccccctgccctgcccagtggacagatctgccccagccctgctgtggggacgggccctctatcatttaaccacatacattaggttgcttttcagcaaaatgtcagctttcctcccattatgcaggagagagaaggggcgcaggtgtatctccttagagtacaccttggagctggatcactaagaaacagtcctcagactggtccttccgacacaggcagagagtgaactggatcgctggcccctgggatgctgcgctgtctgtgattagagagaagtggccagtgtcccgtctgtgattagacagaaacccctgtggcagactcctcccctctccatgaagaaagaaatatttacttagatattactgtttcaaaacacaaactttattccccttagagaagaaatactgcccttaaatagactgttgaaatattaatggcccccccatttaatcagtgtgtctgcggctttcttcgcgtcacatgtccgcattggcaggtgattctggaaagggattctgggaaaccaacaagtcttttttaaatctttgagttgtatgagaaagtatttaagttcaccagtgtagtaaacacccaccccagagcagcggtaagcaaacctaaatctgaaaacccattcttactgtctttcaccatgagatgctggttttggtgtaaaatgacagcacttggtttggggttttgcacctgttgggtagaactgttcttgtctgaggtcctcaccctctacagatgggcctcagggcctggaggtgggcagatggggccagagtggccagcagagacttgcatgggctctgaaagccccagagctcaggcctaaggctgctaggtgagaccagcaggcagctgtggcatccgaccttgggacgcccaagctgggcagccgctccatgtgccccaaacaggatatcctcatgaatgtgaggagaggctggctcagggcttggttttcattttggcctggcacagggtacctgtagggagcactcccccaacctgaggatggtgaaaccatatgatagagactccttgtcgaagtccacatcggactgatctagaatgccccgtggggggattgcatggcctttgccttgagatgcaggtgaaagaaaggaaccaaacaaggcatgagtgtgttggggaatcttcccagtggagcaaacccccttaacacaccagctgttgggaacagctgcccctaaatccaattaaaccctcatctccctggtgctgaacagtctacactggcccaggaagctaacgtctgagccgcttggagagctttggtaaacagaagacactggaagcccactcggtcagcagctgggcatgaggatgtcaggggcctttggacttgaggaaggacagtccaggtgcatggaatcctaatgggcctcatgcagacactggaagcagcccagccccctgcccaataccacagccctggggtgtcccctgacattcctggaggtccctgggcaaatgcatttcctgcctgggttctcagggtaggagaacagagaaggctccaagggtgttgggagtgagccaggggctggtctggggagtgggtctcacgcactgctcaggttggcacgagggacctcccccatcccaacccagccccaagggtcccagcagggctctcagcatggctgttttgagggtacacaggtggctggagaggggtggggcagttgcatggtgggtggcaaagtgtgcatttagaagctgcttcgtggcgttaagaacggggggagagggaccagcactgtaacgttagaaataattccttcttgcagacttgaaaagcatcagtttccctcccacggctgggtttttgtgtctgaaatacatctaattctccagactgcagcccctctcagccccgagcacctgagcgctggggaggcccttattgagctcagcctggagaggggagggtcgcacgggtcccgggggcaggtctcctgcactggctcttcccttctgccagcttggaatttggttctcatcttgccacaggggtgcgtttcctaaagggcagccggagcagctcaaaggtgacaactgagatgcatttctaggcaggggcagggaaggccaacccaccttgcagccagttttctgtttctgtaaatagcagtgtatagagatggaagggcagcgtgggtgtatccacagatgggtttaggttttttttttggatgttttctattacctcattcagcaactttatgtttcacaatgactcaatgatgctttatttatattgtttgtactgtaattaaaaccattgacagacatttcactttgcttgttatttcatatgatcttgttttgattaaatatgccagtttgtattttcctgccttgggatttttttgtgtccgctgtacagtattctaagggaaaaagaaaaagaaagatgtgtaaagtaacagagagaggtggctatggtgtagagacctctttctaataaagaaatgaaaatatgtctacaccgct

SEQ ID NO: 755 - DNA, 2478 bp, Homo sapiens
  source 1..2478: mol_type = unassigned DNA
cagctggccaactcggctgccatccgggccgagatccagcgcttcgagtcggtccaccccaacatctactccatctacgagctgctggagcgcgtggaggagccggtgctgcagaaccagatccgggagcacgtcatcgccatcgaagatgccttcgtgaacagccaggaatggacgctgagtcgatctgtcccggagctcaaagtgggaattgtgggtaacttggccagcggcaagtctgccctggtgcaccggtacctgacgggcacatatgtccaggaggaatatggatgcaggtggcaggttcaagaaagagattgtcgttgatggacagagctatctgctgctgatcagagatgaagggggccccccggaggcgcagtttgccatgtgggtggacgctgttatatttgtcttcagcttggaggatgaaataagtttccagaccgtttaccactactacagtcgaatggccaactatcggaacacgagcgagattcctctggttctggtgggaacccaggatgccataagttctgctaacccgagggtcatcgatgacgccagggcgaggaagctctccaacgacctgaaacggtgcacgtactacgagacgtgtgctacatacgggctgaatgtggagagggtcttccaggacgttgcccagaagattgttgccacaaggaagaagcagcagctgtccataggaccctgcaagtcgctacctaattctcccagccattcctccgtctgttccgcgcaggtgtctgccgtgcacatcagccagacaagtaatggaggtgggagtttaagcgactattcctcctccgttccatcgactcccagcaccagccagaaggaacttcggatcgatgttcctcccactgccaacacgcccacgcccgttcgcaagcagtctaagcgccggtccaacctgttcacctctcggaaagggagcgacccagacaaagagaagaaaggcctggagagtcgtgcggacagcattgggagcggccgagccatcccaattaaacagggcatgctgttgaagcgaagtggcaaatcgttgaataaagagtggaaaaagaaatatgtcaccctgtgtgacaatggcgtgctgacctatcatcccagtttacatgattacatgcagaatgttcatggtaaggagattgaccttctgagaaccactgtgaaagtcccagggaagaggccaccccgagccacgtcagcctgcgcacccatctccagccctaaaaccaatggcctatccaaggacatgagcagtttacacatctcacccaattcagacacagggctgggtgactccgtatgctccagccccagtatctccagcaccaccagccccaagctcgacccgcccccctcccctcacgccaacagaaagaagcaccgaaggaagaaaagcactagcaacttcaaagccgacggcctgtccggcactgctgaagaacaagaagaaaattttgagtttatcattgtgtccctcactggccaaacatggcactttgaagccacgacgtatgaggagcgggacgcctgggtccaagccatcgagagccagatcctggccagcctgcagtcgtgcgagagcagcaagaacaagtcccggctgacgagccagagcgaggccatggccctgcagtcgatccggaacatgcgcgggaactcccactgtgtggactgcgagacccagaatcccaactgggccagtttgaacttgggagccctcatgtgcatcgaatgctcagggatccaccggaatcttggcacccacctttcccgagtccgatctctggacctggatgactggccagtcgagctcatcaaggtgatgtcatccatcgggaacgagctagccaacagcgtctgggaagagagcagccaggggcggacgaaaccatcggtagactccacaagggaagagaaggaacggtggatccgtgccaagtacgagcagaagctcttcctggccccgctgccctgcacggagctgtccctgggccagcacctgctgcgggccaccgccgacgaggacctgcggacggccatcctgctgctggcacacggctcccgggacgaggtgaacgagacctgcggggagggagacggccgcacggcgctgcatctggcctgccgcaaggggaatgtggtcctggcgcagctcctgatctggtacggagtggacgtcacggcccgagatgcccacgggaacacagctctggcctacgcccggcaggcctccagccaggagtgcatcgacgtgctgctgcagtacggctgccccgacgagcgcttcgtgctcatggccacccctaacctgtccaggagaaacaataaccggaacaacagcagtgggagggtgcccaccatcatctgaggaacagccgtgcccgcctgctcgccgcacctgggacgcggcagcctcgccgcattctcgctcagaagtcgcagcac

SEQ ID NO: 756 - DNA, 563 bp, Homo sapiens
  source 1..563: mol_type = unassigned DNA
atccggtttggcaggaacaggacagggtggttagcaggccacagtgtggtgggagtgaaagtgtactgtcctgtgtgatatttttgcacagcctgacagtgggggcaagtttagagcctttgagctgagaatctggagagagcagtggatgcgatgggcagttgcttgtccttgctgtgagaagacaggccacggggctgcacccagcccccatggatgccttcgtgaacagccaggaatggacgctgagtcgatctgtcccggagctcaaagtgggaattgtgggtaacttggccagcggcaagtctgccctggtgcaccggtacctgacgggcacatatgtccaggaggagtctccggaaggtggcaggttcaagaaagagattgtcgttgatggacagagctatctgctgctgatcagagatgaagggggccccccggaggcgcagtttgccatgtgggtggacgctgttatatttgtcttcagcttggaggatgaaataagtttccagaccgtttaccactactacagtcgaatggccaactatcggaacacgagcgag

SEQ ID NO: 757 - DNA, 6138 bp, Homo sapiens
  source 1..6138: mol_type = unassigned DNA
gcgcgtttccattttaaaccgccgcccgccgcccgccacccgccacccttcggccgcagccggtgcagctgtccgcgcgtcccggagcccagggagtggcggaggctgcggaaccgccgagctgtgcagccggagcgggaggatgcgcacgggccccgcgtcgtagacaatgaagccgcgggcgccgccgcctgccctgggccctgcgcaccgcggccgcacctgccggcgagagcgctctagcgcctgaccggccgcctcgcttggccccgccggcccatggctcggcgccccgggcccggaccccggcactcgggcggcgcggcgcacgggccggcgggtgccaggggcgccgtccccgcagcctgagtgcggccctcgcggtcagcggggggcgtgggccacactcccggcccgcctgccctccccgcttggcccggcgccctcccggcccgcgggctcgctggatgcggcggggccccagcgcgcgggcgacatgtacttgttggacggcagtggcgagcccgcgtcgccacccgcggacgcgatgccgcgcgggacgccccccagaaagactgtctaccgcatctccgtgaccatggtcaggaaggagcagctggccgcgccgggctccggcggcccggacccacgcccggttcggcggccccggcccgcgcgctccccggacgcgcccgggaggcttgaggaggaggccgaggaggcggagggcgccgaggaaccggagggtccccggccgcgcgcttgggatttccgcaccttccgcacccgcagcaccgggcagctggaactggggcggctccggccgtgcgcacgcggcctggaacccgcggacctggccggcagcgccccggccgaggaggagggacgcggctcgcccgcgtccggcagccccgacgtggagggggcccgggccgcgcccctgcggcggagcctgagcttcaggcactggagcgggcctgaggcgccgcaaggccggacactgggcggcggaaggcgccacagcagctccgggagcctggcctgggcgccgtgcgacgaggccgcggccgggaccaccctggagcccgcgaccgccacgcagcccgcctcggagaagcgcaacaccctggacgtgggcgaggtgctcagcaagaacgacgcgctctcggacctggagcgttgggaacgcagtaagagcaagaaccgcacgctggacaacagcgacctgcagcggctggagcgcgcgcgggcggcggccggggccggcgcggcctcggagcaccggctgctgcgcttcttcagcggcatcttcgcgcgcagggacgggggcccgggcggcgggccctcgccacggagcggagcctcgcggccacgcggctacttcagcctgcggcgggccccggccgaagcgcactcgtccagcgccgagagcatcgacggctccccgcgcagagatgccttcgtgaacagccaggaatggacgctgagtcgatctgtcccggagctcaaagtgggaattgtgggtaacttggccagcggcaagtctgccctggtgcaccggtacctgacgggcacatatgtccaggaggagtctccggaaggtggcaggttcaagaaagagattgtcgttgatggacagagctatctgctgctgatcagagatgaagggggccccccggaggcgcagtttgccatgtgggtggacgctgttatatttgtcttcagcttggaggatgaaataagtttccagaccgtttaccactactacagtcgaatggccaactatcggaacacgagcgagattcctctggttctggtgggaacccaggatgccataagttctgctaacccgagggtcatcgatgacgccagggcgaggaagctctccaacgacctgaaacggtgcacgtactacgagacgtgtgctacatacgggctgaatgtggagagggtcttccaggacgttgcccagaagattgttgccacaaggaagaagcagcagctgtccataggaccctgcaagtcgctacctaattctcccagccattcctccgtctgttccgcgcaggtgtctgccgtgcacatcagccagacaagtaatggaggtgggagtttaagcgactattcctcctccgttccatcgactcccagcaccagccagaaggaacttcggatcgatgttcctcccactgccaacacgcccacgcccgttcgcaagcagtctaagcgccggtccaacctgttcacctctcggaaagggagcgacccagacaaagagaagaaaggcctggagagtcgtgcggacagcattgggagcggccgagccatcccaattaaacagggcatgctgttgaagcgaagtggcaaatcgttgaataaagagtggaaaaagaaatatgtcaccctgtgtgacaatggcgtgctgacctatcatcccagtttacatgattacatgcagaatgttcatggtaaggagattgaccttctgagaaccactgtgaaagtcccagggaagaggccaccccgagccacgtcagcctgcgcacccatctccagccctaaaaccaatggcctatccaaggacatgagcagtttacacatctcacccaattcagacacagggctgggtgactccgtatgctccagccccagtatctccagcaccaccagccccaagctcgacccgcccccctcccctcacgccaacagaaagaagcaccgaaggaagaaaagcactagcaacttcaaagccgacggcctgtccggcactgctgaagaacaagaagaaaattttgagtttatcattgtgtccctcactggccaaacatggcactttgaagccacgacgtatgaggagcgggacgcctgggtccaagccatcgagagccagatcctggccagcctgcagtcgtgcgagagcagcaagaacaagtcccggctgacgagccagagcgaggccatggccctgcagtcgatccggaacatgcgcgggaactcccactgtgtggactgcgagacccagaatcccaactgggccagtttgaacttgggagccctcatgtgcatcgaatgctcagggatccaccggaatcttggcacccacctttcccgagtccgatctctggacctggatgactggccagtcgagctcatcaaggtgatgtcatccatcgggaacgagctagccaacagcgtctgggaagagagcagccaggggcggacgaaaccatcggtagactccacaagggaagagaaggaacggtggatccgtgccaagtacgagcagaagctcttcctggccccgctgccctgcacggagctgtccctgggccagcacctgctgcgggccaccgccgacgaggacctgcggacggccatcctgctgctggcacacggctcccgggacgaggtgaacgagacctgcggggagggagacggccgcacggcgctgcatctggcctgccgcaaggggaatgtggtcctggcgcagctcctgatctggtacggagtggacgtcacggcccgagatgcccacgggaacacagctctggcctacgcccggcaggcctccagccaggagtgcatcgacgtgctgctgcagtacggctgccccgacgagcgcttcgtgctcatggccacccctaacctgtccaggagaaacaataaccggaacaacagcagtgggagggtgcccaccatcatctgaggaacagccgtgcccgcctgctcgccgcacctgggacgcggcagcctcgccgcattctcgctcagaagtcgcagcacgtgagtcccgtcgcatcccctccctcttcctggtggccacctccctcccgcccacccactctcaccccaaacaaaatcacaaaacctggacatccctcaaggggcgaagaggcggccgggagactgcagaagtggctccttttcataaactcccctaaaccacacacaggagagagcgacgggcctcggccctttgatgatagcacatggcgcaggacccttgtcctggtggcacaagggatggggacgcgagggggaggggaggcgaggaacaaggagaaggggcaactttccttaactggcagttgagcacatagtacatttcccctctaccaaacggaacacttggattccatctcttctctgaggagctcgacggcataaatcagaagcaagcacagagtttgtcaggtttgaagcccctatgatggtgtgtgtcaaatcagttgtagctaatctgtccagggagaatactggcttcattacacttgtacagccgagttcttcccgcattactgctgtttaatagaacgtgattagtcatcgccgagaagaaagcatattagccgaggaggtagtcacgcggcacgcgccggtgattgccacgatgtgattgcaatactcttagaagcaccatattatcccagacatgttctttcaagcccttggagccctctctaaattcactgtcatcatttagtatctgtttaatttttcagtccaaagagaggaaatcagtcgctgagtattatttgactccggtctccttggtgcaaaaacaaaatgggaaaaataaataagaataactcagaaactcaaaaggaaaccacaaattcagctaataatagcatttcgagtatatttcgtaaactaaggaaatacacaaaaggctgttttttccgactgtaagagatatttgatgtccttttgccgaggtggatgtgttagtctcaggccctcctggaccacgttgcccaagtcacacaggcttctgtgttatgtatttagataagatgtgtgaaaatatatttgaataaaagaagttcataaatatgcattgatttttgtacagacaaatggcacctctcttaatttataaattgaactggatgtgaactaataatgtgcaactagttgagataagagggttacagatcattgtacatggaaaatattcccagcagtaaacacttccattaatgtgatctacggcttttgaaaaggagcatctcagaataagatggtggtacaatttgcttattaaaattgagaaagaaaaaaaaagacacactggagtatattagaaaggaaaaagaaggaatgtggtctctcatgattgaaagcatgatttagatcggatacggcttttgctaaccaaggaccaagggactctggcaagatggggtggttttccgaatgccagaccgaggtgccttacgaaggcagctgccaatggttctgtggcacagactggctcctgagaacccagacgaccttgacctggcagcccggccctccacgctagtacctcgcctgattttccatcgttgcggtatccagccgcttcagacgtccgccgccttcagtggtggtagtcaaatgtagtcaaccaaaccacagcatcccttaggttaaaagcaaacggggcagctttgcctagagctcattgacagtgtgatggggggagaagggttgtcacaatggaagatgaggacactagactcatgtagcacagaaacatgaagccacacgcaccggcagcctccggggtgttcctcgctctctcgtatgttaaaccttatattttataagagtttttcctcttatttcactttttaaaaaaaattaaagtaggtggggaaaaaaataaagctttacacagaatttatatgtgggtaagtgtttcatggaaatttctaatcttaacgaagctaagtggagctcactcgtatccaaaagtataacaggtgcagaagccacaagtctgagaaccttgacgacagttccatcgtcctgccatttgatttttcagtctgcgtttcatcactgtgtagctattgtaaatgtgaatagaaaaaaacaggtcattgcctatttttgaagaacgcgttggtgttcgagtccactagacacactcgctccacacagccttcaccgtagactctgtagtggacacagatatagcataaatgaaattgttaaattatttcattgtagttaattcccactataggaatgctttatcatagtgaagtttcttttgagaagaaacggaactccttgaggcttctctttgggatgtatatgagcgtgtacatattattctatgtgtttataatataatattttcccaaa

SEQ ID NO: 758 - DNA, 757 bp, Homo sapiens
  source 1..757: mol_type = unassigned DNA
gaaatatgtcaccctgtgtgacaatggcgtgctgacctatcatcccagtttacatgattacatgcagaatgttcatggtaaggagattgaccttctgagaaccactgtgaaagtcccagggaagaggccaccccgagccacgtcagcctgcgcacccatctccagccctaaaaccaatggcctatccaaggacatgagcagtttacacatctcacccaattcagggaatgtcactagtgcatctgggtctcagatggcaagcggcatcagcctggtctccttcaacagccgacccgacggcatgcaccagcgctcctactcagtctccagtgccgaccagtggagtgaggctacggtcattgcaaactcggccatcagcagtgacacagggctgggtgactccgtatgctccagccccagtatctccagcaccaccagccccaagctcgacccgcccccctcccctcacgccaacagaaagaagcaccgaaggaagaaaagcactagcaacttcaaagccgacggcctgtccggcactgctgaagccaaacgcaaagcatggaaactaaaccgtgttggtagcctgcgaaatatatacagcagcagcaccaacactgaagaacaagaagaaaattttgagtttatcattgtgtccctcactggccaaacatggcactttgaagccacgacgtatgaggagcgggacgcctgggtccaagccatcgagagccagatcctggccagcctgcagtcgtgc

SEQ ID NO: 759 - DNA, 826 bp, Homo sapiens
  source 1..826: mol_type = unassigned DNA
ctccagccctaaaaccaatggcctatccaaggacatgagcagtttacacatctcacccaattcagacacagggctgggtgactccgtatgctccagccccagtatctccagcaccaccagccccaagctcgacccgcccccctcccctcacgccaacagaaagaagcaccgaaggaagaaaagcactagcaacttcaaagccgacggcctgtccggcactgctgaagccaaacgcaaagcatggaaactaaaccgtgttggtagcctgcgaaatatatacagcagcagcaccaacactgaagaacaagaagaaaattttgagtttatcattgtgtccctcactggccaaacatggcactttgaagccacgacgtatgaggagcgggacgcctgggtccaagccatcgagagccagatcctggccagcctgcagtcgtgcgagagcagcaagaacaagtcccggctgacgagccagagcgaggccatggccctgcagtcgatccggaacatgcgcgggaactcccactgtgtggactgcgagacccagaatcccaactgggccagtttgaacttgggagccctcatgtgcatcgaatgctcagggatccaccggaatcttggcacccacctttcccgagtccgatctctggacctggatgactggccagtcgagctcatcaaggtgatgtcatccatcgggaacgagctagccaacagcgtctgggaagagagcagccaggggcggacgaaaccatcggtagactccacaagggaagagaaggaacggtggatccgtgccaagtacgagcagaagctcttcctggcc

SEQ ID NO: 760 - DNA, 541 bp, Homo sapiens
  source 1..541: mol_type = unassigned DNA
aaaacaagagtgattgtttagaaattaccctcgtcctacatttgctcccaatctgtttgatctttccctgatgttatcagtgatgtgcgtttctcccggggtgcttacgccttgtatttgtgtcttcctccgtgcccagtcccggctgacgagccagagcgaggccatggccctgcagtcgatccggaacatgcgcgggaactcccactgtgtggactgcgagacccagaatcccaactgggccagtttgaacttgggagccctcatgtgcatcgaatgctcagggatccaccggaatcttggcacccacctttcccgagtccgatctctggacctggatgactggccagtcgagctcatcaaggtgatgtcatccatcgggaacgagctagccaacagcgtctgggaagagagcagccaggggcggacgaaaccatcggtagactccacaagggaagagaaggaacggtggatccgtgccaagtacgagcagaagctcttcctggccccgctgccctgcacggagctgtccctgggccag

SEQ ID NO: 761 - DNA, 864 bp, Homo sapiens
  source 1..864: mol_type = unassigned DNA
tcccggctgacgagccagagcgaggccatggccctgcagtcgatccggaacatgcgcgggaactcccactgtgtggactgcgagacccagaatcccaactgggccagtttgaacttgggagccctcatgtgcatcgaatgctcagggatccaccggaatcttggcacccacctttcccgagtccgatctctggacctggatgactggccagtcgagctcatcaaggtgatgtcatccatcgggaacgagctagccaacagcgtctgggaagagagcagccaggggcggacgaaaccatcggtagactccacaaggtaggaactttggaagatgcctggctcccgacacgtttgccaacagttaggcaactggaagtgatcataatgacagccacggttgggaaggccctgataacctgtaggaattcgggaattccgattcatccggcataggaatgtctgtgtttaaagttggtcttgagcagacgtggataattcacactccttaattttttatgtttgtttttaggcctggggatttctctcccccctcttagaaatgtattaagcttctaaccttatgaatatattactttaattaatacatttctaataggcataagctgtgccgttaacactaattatgaatttttgatcctttaattttgttattcttatagcttggataagcatctgctctgtcgatcccccccccgcaccatcacacaaaagttatttttatggtaacaaaatctattttattttctaaaatatatctcaacacatttagtcaaccaagttcagcataatgtatgatgtaactcctcattaatgttaattgttatccagtgtaaaaaacgcattt

SEQ ID NO: 762 - DNA, 2138 bp, Homo sapiens
  source 1..2138: mol_type = unassigned DNA
ttcagagaattcggagtccggcacaggaatgtgtcccacgcatgaatgtcgtccttcagatctggacctgacagcctgggagctgctggggggagatcccaactgggccagtttgaacttgggagccctcatgtgcatcgaatgctcagggatccaccggaatcttggcacccacctttcccgagtccgatctctggacctggatgactggccagtcgagctcatcaaggtgatgtcatccatcgggaacgagctagccaacagcgtctgggaagagagcagccaggggcggacgaaaccatcggtagactccacaagggaagagaaggaacggtggatccgtgccaagtacgagcagaagctcttcctggccccgctgccctgcacggagctgtccctgggccagcacctgctgcgggccaccgccgacgaggacctgcggacggccatcctgctgctggcacacggctcccgggacgaggtgaacgagacctgcggggagggagacggccgcacggcgctgcatctggcctgccgcaaggggaatgtggtcctggcgcagctcctgatctggtacggagtggacgtcacggcccgagatgcccacgggaacacagctctggcctacgcccggcaggcctccagccaggagtgcatcgacgtgctgctgcagtacggctgccccgacgagcgcttcgtgctcatggccacccctaacctgtccaggagaaacaataaccggaacaacagcagtgggagggtgcccaccatcatctgaggaacagccgtgcccgcctgctcgccgcacctgggacgcggcagcctcgccgcattctcgctcagaagtcgcagcacgtgagtcccgtcgcatcccctccctcttcctggtggccacctccctcccgcccacccactctcaccccaaacaaaatcacaaaacctggacatccctcaaggggcgaagaggcggccgggagactgcagaagtggctccttttcataaactcccctaaaccacacacaggagagagcgacgggcctcggccctttgatgatagcacatggcgcaggacccttgtcctggtggcacaagggatggggacgcgagggggaggggaggcgaggaacaaggagaaggggcaactttccttaactggcagttgagcacatagtacatttcccctctaccaaacggaacacttggattccatctcttctctgaggagctcgacggcataaatcagaagcaagcacagagtttgtcaggtttgaagcccctatgatggtgtgtgtcaaatcagttgtagctaatctgtccagggagaatactggcttcattacacttgtacagccgagttcttcccgcattactgctgtttaatagaacgtgattagtcatcgccgagaagaaagcatattagccgaggaggtagtcacgcggcacgcgccggtgattgccacgatgtgattgcaatactcttagaagcaccatattatcccagacatgttctttcaagcccttggagccctctctaaattcactgtcatcatttagtatctgtttaatttttcagtccaaagagaggaaatcagtcgctgagtattatttgactccggtctccttggtgcaaaaacaaaatgggaaaaataaataagaataactcagaaactcaaaaggaaaccacaaattcagctaataatagcatttcgagtatatttcgtaaactaaggaaatacacaaaaggctgttttttccgactgtaagagatatttgatgtccttttgccgaggtggatgtgttagtctcaggccctcctggaccacgttgcccaagtcacacaggcttctgtgttatgtatttagataagatgtgtgaaaatatatttgaataaaagaagttcataaatatgcattgatttttgtacagacaaatggcacctctcttaatttataaattgaactggatgtgaactaataatgtgcaactagttgagataagagggttacagatcattgtacatggaaaatattcccagcagtaaacacttccattaatgtgatctacggcttttgaaaaggagcatctcagaataagatggtggtacaatttgcttattaaaattgagaaagaaaaaaaa

SEQ ID NO: 763 - DNA, 1057 bp, Homo sapiens
  source 1..1057: mol_type = unassigned DNA
agatgccttcgtgaacagccaggaatggacgctgagtcgatctgtcccggagctcaaagtgggaattgtgggtaacttggccagcggcaagtctgccctggtgcaccggtacctgacgggcacatatgtccaggaggagtctccggaaggtggcaggttcaagaaagagattgtcgttgatggacagagctatctgctgctgatcagagatgaagggggccccccggaggcgcagtttgccatgtgggtggacgctgttatatttgtcttcagcttggaggatgaaataagtttccagaccgtttaccactactacagtcgaatggccaactatcggaacacgagcgagattcctctggttctggtgggaacccaggatgccataagttctgctaacccgagggtcatcgatgacgccagggcgaggaagctctccaacgacctgaaacggtgcacgtactacgagacgtgtgctacatacgggctgaatgtggagagggtcttccaggacgttgcccagaagattgttgccacaaggaagaagcagcagctgtccataggaccctgcaagtcgctacctaattctcccagccattcctccgtctgttccgcgcaggtgtctgccgtgcacatcagccagacaagtaatggaggtgggagtttaagcgactattcctcctccgttccatcgactcccagcaccagccagaaggaacttcggatcgatgttcctcccactgccaacacgcccacgcccgttcgcaagcagtctaagcgccggtccaacctgttcacctctcggaaagggagcgacccagacaaagagaagaaaggcctggagagtcgtgcggacagcattgggagcggccgagccatcccaattaaacagggcctgcccttctttgtccttgcactgacagccagcacttatctcaggcctgctggagcccgtgcccgtcagtcctccccctggccagggccgaggggtggtcagaccagcccgcattgtgctgaaggcccacaatcagcccagctgtccggggccatgatgaattag

SEQ ID NO: 764 - DNA, 10090 bp, Homo sapiens
  source 1..10090: mol_type = unassigned DNA
gatgccttcgtgaacagccaggaatggacgctgagtcgatctgtcccggagctcaaagtgggaattgtgggtaacttggccagcggcaagtctgccctggtgcaccggtacctgacgggcacatatgtccaggaggagtctccggaaggtggcaggttcaagaaagagattgtcgttgatggacagagctatctgctgctgatcagagatgaagggggccccccggaggcgcagtttgccatgtgggtggacgctgttatatttgtcttcagcttggaggatgaaataagtttccagaccgtttaccactactacagtcgaatggccaactatcggaacacgagcgagattcctctggttctggtgggaacccaggatgccataagttctgctaacccgagggtcatcgatgacgccagggcgaggaagctctccaacgacctgaaacggtgcacgtactacgagacgtgtgctacatacgggctgaatgtggagagggtcttccaggacgttgcccagaagattgttgccacaaggaagaagcagcagctgtccataggaccctgcaagtcgctacctaattctcccagccattcctccgtctgttccgcgcaggtgtctgccgtgcacatcagccagacaagtaatggaggtgggagtttaagcgactattcctcctccgttccatcgactcccagcaccagccagaaggaacttcggatcgatgttcctcccactgccaacacgcccacgcccgttcgcaagcagtctaagcgccggtccaacctgttcacctctcggaaagggagcgacccagacaaagagaagaaaggcctggagagtcgtgcggacagcattgggagcggccgagccatcccaattaaacagggcatgctgttgaagcgaagtggcaaatcgttgaataaagagtggaaaaagaaatatgtcaccctgtgtgacaatggcgtgctgacctatcatcccagtttacatgattacatgcagaatgttcatggtaaggagattgaccttctgagaaccactgtgaaagtcccagggaagaggccaccccgagccacgtcagcctgcgcacccatctccagccctaaaaccaatggcctatccaaggacatgagcagtttacacatctcacccaattcagggaatgtcactagtgcatctgggtctcagatggcaagcggcatcagcctggtctccttcaacagccgacccgacggcatgcaccagcgctcctactcagtctccagtgccgaccagtggagtgaggctacggtcattgcaaactcggccatcagcagtgacacagggctgggtgactccgtatgctccagccccagtatctccagcaccaccagccccaagctcgacccgcccccctcccctcacgccaacagaaagaagcaccgaaggaagaaaagcactagcaacttcaaagccgacggcctgtccggcactgctgaagaacaagaagaaaattttgagtttatcattgtgtccctcactggccaaacatggcactttgaagccacgacgtatgaggagcgggacgcctgggtccaagccatcgagagccagatcctggccagcctgcagtcgtgcgagagcagcaagaacaagtcccggctgacgagccagagcgaggccatggccctgcagtcgatccggaacatgcgcgggaactcccactgtgtggactgcgagacccagaatcccaactgggccagtttgaacttgggagccctcatgtgcatcgaatgctcagggatccaccggaatcttggcacccacctttcccgagtccgatctctggacctggatgactggccagtcgagctcatcaaggtgatgtcatccatcgggaacgagctagccaacagcgtctgggaagagagcagccaggggcggacgaaaccatcggtagactccacaagggaagagaaggaacggtggatccgtgccaagtacgagcagaagctcttcctggccccgctgccctgcacggagctgtccctgggccagcacctgctgcgggccaccgccgacgaggacctgcggacggccatcctgctgctggcacacggctcccgggacgaggtgaacgagacctgcggggagggagacggccgcacggcgctgcatctggcctgccgcaaggggaatgtggtcctggcgcagctcctgatctggtacggagtggacgtcacggcccgagatgcccacgggaacacagctctggcctacgcccggcaggcctccagccaggagtgcatcgacgtgctgctgcagtacggctgccccgacgagcgcttcgtgctcatggccacccctaacctgtccaggagaaacaataaccggaacaacagcagtgggagggtgcccaccatcatctgaggaacagccgtgcccgcctgctcgccgcacctgggacgcggcagcctcgccgcattctcgctcagaagtcgcagcacgtgagtcccgtcgcatcccctccctcttcctggtggccacctccctcccgcccacccactctcaccccaaacaaaatcacaaaacctggacatccctcaaggggcgaagaggcggccgggagactgcagaagtggctccttttcataaactcccctaaaccacacacaggagagagcgacgggcctcggccctttgatgatagcacatggcgcaggacccttgtcctggtggcacaagggatggggacgcgagggggaggggaggcgaggaacaaggagaaggggcaactttccttaactggcagttgagcacatagtacatttcccctctaccaaacggaacacttggattccatctcttctctgaggagctcgacggcataaatcagaagcaagcacagagtttgtcaggtttgaagcccctatgatggtgtgtgtcaaatcagttgtagctaatctgtccagggagaatactggcttcattacacttgtacagccgagttcttcccgcattactgctgtttaatagaacgtgattagtcatcgccgagaagaaagcatattagccgaggaggtagtcacgcggcacgcgccggtgattgccacgatgtgattgcaatactcttagaagcaccatattatcccagacatgttctttcaagcccttggagccctctctaaattcactgtcatcatttagtatctgtttaatttttcagtccaaagagaggaaatcagtcgctgagtattatttgactccggtctccttggtgcaaaaacaaaatgggaaaaataaataagaataactcagaaactcaaaaggaaaccacaaattcagctaataatagcatttcgagtatatttcgtaaactaaggaaatacacaaaaggctgttttttccgactgtaagagatatttgatgtccttttgccgaggtggatgtgttagtctcaggccctcctggaccacgttgcccaagtcacacaggcttctgtgttatgtatttagataagatgtgtgaaaatatatttgaataaaagaagttcataaatatgcattgatttttgtacagacaaatggcacctctcttaatttataaattgaactggatgtgaactaataatgtgcaactagttgagataagagggttacagatcattgtacatggaaaatattcccagcagtaaacacttccattaatgtgatctacggcttttgaaaaggagcatctcagaataagatggtggtacaatttgcttattaaaattgagaaagaaaaaaaaagacacactggagtatattagaaaggaaaaagaaggaatgtggtctctcatgattgaaagcatgatttagatcggatacggcttttgctaaccaaggaccaagggactctggcaagatggggtggttttccgaatgccagaccgaggtgccttacgaaggcagctgccaatggttctgtggcacagactggctcctgagaacccagacgaccttgacctggcagcccggccctccacgctagtacctcgcctgattttccatcgttgcggtatccagccgcttcagacgtccgccgccttcagtggtggtagtcaaatgtagtcaaccaaaccacagcatcccttaggttaaaagcaaacggggcagctttgcctagagctcattgacagtgtgatggggggagaagggttgtcacaatggaagatgaggacactagactcatgtagcacagaaacatgaagccacacgcaccggcagcctccggggtgttcctcgctctctcgtatgttaaaccttatattttataagagtttttcctcttatttcactttttaaaaaaaattaaagtaggtggggaaaaaaataaagctttacacagaatttatatgtgggtaagtgtttcatggaaatttctaatcttaacgaagctaagtggagctcactcgtatccaaaagtataacaggtgcagaagccacaagtctgagaaccttgacgacagttccatcgtcctgccatttgatttttcagtctgcgtttcatcactgtgtagctattgtaaatgtgaatagaaaaaaacaggtcattgcctatttttgaagaacgcgttggtgttcgagtccactagacacactcgctccacacagccttcaccgtagactctgtagtggacacagatatagcataaatgaaattgttaaattatttcattgtagttaattcccactataggaatgctttatcatagtgaagtttcttttgagaagaaacggaactccttgaggcttctctttgggatgtatatgagcgtgtacatattattctatgtgtttataatataatattttcccaaatgacttcttgtttcactttgccttccacaacctgaatgccagattggttttttcccttcctggcccccagcacaagctgccatgactccccctcagaaaacacagcccctcctctaccattctcagtgatgtccatctgctccactccgcagccactttctagggcccaagttttggtagcagaaggaaaggcagtttttgagggtctttcgaaaaaaagaagacggggcagctttgcccagagctcgttggcagtctgtttgtatttcagtgtctaaccagaagtcctttctttgcggaccgcactctcgttcccactttcaagctaattaccaccaaggctgggagaggcaaggactgggggcggagctaggaataactcgtttgagaagggggtggagttttcgttgttcatttccatgttcagttctgtgacgtgacgatgacagatcaccactgcaggatccccctcacctttcctgttcagaattaaaactctcccttgatgagaaacagccagctgagggaggcccacgagcggcctgtgtaaccccatgggtgatctggacacatctgcacccccgcgttcagcttcgcggagactgaacttggcggggagtggaggggtgtggtgcagacctggctgcagcagaaacaccccgcagggacagtactctgtgattctgacctcaggtgctgggacgggcagatggtttcccccgcccagcaccccagtcctggtccctggtccctctctctgtttcatcccaggaaatgagcagctcgagggtgagcaagtgacaagttcctgagtcactggccccaaaaccaggtgcagtgtcctgtctcccaagtgtgtgcacaatgtatatatgcactggaaaggagggagaaggcagcgggtcactcgccaatcgcagggttctcagacacaggagagagcgggatcttaatgaattgcatttcctgcagagcctctagtgcacaggccagttctcggcagtggcttttcagcacaagggccttgcattgaagctccctcttctgagatttcacccagcctgatgaggcctgcatggttccggcctcgtcatccagtgtagataccagtcttcctatttttgtgacatctgcacatttggggtcattccctatatctgcataggagctattgctaaccttgttagggagaaacatggtctaatgagaaagacagacccctaggctcagctggccctgccatccttccagaggattcctctgcaactctaggcaagcacccagcttcctgggctctttttcctcatctgtgaaacttgcagggtgcagtgaggtttcaaaccagtgtgataagtgttggcctcacacctggcccaggggatgctgggagaacaggagcacttgttaataacagaaacactgatgggaccgaagccagtgcacacaccaggaaacctgcccgtggctgacactgtcctccagcctgcattctggggaggctgtgatgggcacgtttgccaaccccccccccccagtagagcccaggaccctcctctctcagcttgccagtgccctgccctccacatggcggggaacagcatcaatgaggtccttgctccctgagagcctctctggaacctgcccacttttctcaacatgtatattctgctttgtagtctgaggttgattttctagaggcgaggaaggggctgagttctgccctcgtgctgttcgctggtgctgatcagggccaagacgacccttccctctcccccacagcctgttgaggtgccgttgacgtggacagcgcccctcccttaagatgcccccttgccgttgccatgagccgctgtgactcacgcgtgcactgggccttgcttggtgctcccctcctcctcctgtctgagatcggagcttgctggagagcaccccaggtcgccgtgcttggctgcaggcccgtccctctctccccatcctcgggttcccagcgtgttttgtgcttgaacttggtggactcatcttaccccacaagagtggcctgctcaacctgcagcctccaatgtgccgtaggcgctctaggtccccgtggcgcccaggacaccaactctccctccctgcacttaggatgttctggaaatgagaggaaatccacattcctgccccaggaggtgggaagcctggcaacgatgtagcttcccctgagatgcggtatgatcaggcctcagcaactactcaggaggcaaaggtgtttggaaagcaaaccccaaacctcccggcacggcatgtgctctgcttccgtccctcaccgcctgcacaaggtcgttgagacttttctagaactccccggggttgtatttatggccttcaagcaaacaaattgaaaagcagtcaaggaggagttcagatagaaaagtgctggagatacacatctttccttcaaaggaaatgtaatttatttccaaccgctgcctcagacgggggtttcacatgttgtgaagtcacatcttgaatgactgtcaccctcatccttccccaaaaagctaaataagggcctttggcatcaatgcgtgcattctccacctttccgcggcttgcgcttggatttctgagtggctttcttcagggagcccttgtggtcatgtgtctttaatgctgctccccatgcccccaggccaggccagcacgctcaggtgatagcgagtggggccaggagacccccctgccctgcccagtggacagatctgccccagccctgctgtggggacgggccctctatcatttaaccacatacattaggttgcttttcagcaaaatgtcagctttcctcccattatgcaggagagagaaggggcgcaggtgtatctccttagagtacaccttggagctggatcactaagaaacagtcctcagactggtccttccgacacaggcagagagtgaactggatcgctggcccctgggatgctgcgctgtctgtgattagagagaagtggccagtgtcccgtctgtgattagacagaaacccctgtggcagactcctcccctctccatgaagaaagaaatatttacttagatattactgtttcaaaacacaaactttattccccttagagaagaaatactgcccttaaatagactgttgaaatattaatggcccccccatttaatcagtgtgtctgcggctttcttcgcgtcacatgtccgcattggcaggtgattctggaaagggattctgggaaaccaacaagtcttttttaaatctttgagttgtatgagaaagtatttaagttcaccagtgtagtaaacacccaccccagagcagcggtaagcaaacctaaatctgaaaacccattcttactgtctttcaccatgagatgctggttttggtgtaaaatgacagcacttggtttggggttttgcacctgttgggtagaactgttcttgtctgaggtcctcaccctctacagatgggcctcagggcctggaggtgggcagatggggccagagtggccagcagagacttgcatgggctctgaaagccccagagctcaggcctaaggctgctaggtgagaccagcaggcagctgtggcatccgaccttgggacgcccaagctgggcagccgctccatgtgccccaaacaggatatcctcatgaatgtgaggagaggctggctcagggcttggttttcattttggcctggcacagggtacctgtagggagcactcccccaacctgaggatggtgaaaccatatgatagagactccttgtcgaagtccacatcggactgatctagaatgccccgtggggggattgcatggcctttgccttgagatgcaggtgaaagaaaggaaccaaacaaggcatgagtgtgttggggaatcttcccagtggagcaaacccccttaacacaccagctgttgggaacagctgcccctaaatccaattaaaccctcatctccctggtgctgaacagtctacactggcccaggaagctaacgtctgagccgcttggagagctttggtaaacagaagacactggaagcccactcggtcagcagctgggcatgaggatgtcaggggcctttggacttgaggaaggacagtccaggtgcatggaatcctaatgggcctcatgcagacactggaagcagcccagccccctgcccaataccacagccctggggtgtcccctgacattcctggaggtccctgggcaaatgcatttcctgcctgggttctcagggtaggagaacagagaaggctccaagggtgttgggagtgagccaggggctggtctggggagtgggtctcacgcactgctcaggttggcacgagggacctcccccatcccaacccagccccaagggtcccagcagggctctcagcatggctgttttgagggtacacaggtggctggagaggggtggggcagttgcatggtgggtggcaaagtgtgcatttagaagctgcttcgtggcgttaagaacggggggagagggaccagcactgtaacgttagaaataattccttcttgcagacttgaaaagcatcagtttccctcccacggctgggtttttgtgtctgaaatacatctaattctccagactgcagcccctctcagccccgagcacctgagcgctggggaggcccttattgagctcagcctggagaggggagggtcgcacgggtcccgggggcaggtctcctgcactggctcttcccttctgccagcttggaatttggttctcatcttgccacaggggtgcgtttcctaaagggcagccggagcagctcaaaggtgacaactgagatgcatttctaggcaggggcagggaaggccaacccaccttgcagccagttttctgtttctgtaaatagcagtgtatagagatggaagggcagcgtgggtgtatccacagatgggtttaggttttttttttggatgttttctattacctcattcagcaactttatgtttcacaatgactcaatgatgctttatttatattgtttgtactgtaattaaaaccattgacagacatttcactttgcttgttatttcatatgatcttgttttgattaaatatgccagtttgtattttcctgccttgggatttttttgtgtccgctgtacagtattctaagggaaaaagaaaaagaaagatgtgtaaagtaacagagagaggtggctatggtgtagagacctctttctaataaagaaatgaaaatatgtctacaccgct

SEQ ID NO: 765 - DNA, 9932 bp, Homo sapiens
  source 1..9932: mol_type = unassigned DNA
agatgccttcgtgaacagccaggaatggacgctgagtcgatctgtcccggagctcaaagtgggaattgtgggtaacttggccagcggcaagtctgccctggtgcaccggtacctgacgggcacatatgtccaggaggagtctccggaaggtggcaggttcaagaaagagattgtcgttgatggacagagctatctgctgctgatcagagatgaagggggccccccggaggcgcagtttgccatgtgggtggacgctgttatatttgtcttcagcttggaggatgaaataagtttccagaccgtttaccactactacagtcgaatggccaactatcggaacacgagcgagattcctctggttctggtgggaacccaggatgccataagttctgctaacccgagggtcatcgatgacgccagggcgaggaagctctccaacgacctgaaacggtgcacgtactacgagacgtgtgctacatacgggctgaatgtggagagggtcttccaggacgttgcccagaagattgttgccacaaggaagaagcagcagctgtccataggaccctgcaagtcgctacctaattctcccagccattcctccgtctgttccgcgcaggtgtctgccgtgcacatcagccagacaagtaatggaggtgggagtttaagcgactattcctcctccgttccatcgactcccagcaccagccagaaggaacttcggatcgatgttcctcccactgccaacacgcccacgcccgttcgcaagcagtctaagcgccggtccaacctgttcacctctcggaaagggagcgacccagacaaagagaagaaaggcctggagagtcgtgcggacagcattgggagcggccgagccatcccaattaaacagggcatgctgttgaagcgaagtggcaaatcgttgaataaagagtggaaaaagaaatatgtcaccctgtgtgacaatggcgtgctgacctatcatcccagtttacatgattacatgcagaatgttcatggtaaggagattgaccttctgagaaccactgtgaaagtcccagggaagaggccaccccgagccacgtcagcctgcgcacccatctccagccctaaaaccaatggcctatccaaggacatgagcagtttacacatctcacccaattcagacacagggctgggtgactccgtatgctccagccccagtatctccagcaccaccagccccaagctcgacccgcccccctcccctcacgccaacagaaagaagcaccgaaggaagaaaagcactagcaacttcaaagccgacggcctgtccggcactgctgaagaacaagaagaaaattttgagtttatcattgtgtccctcactggccaaacatggcactttgaagccacgacgtatgaggagcgggacgcctgggtccaagccatcgagagccagatcctggccagcctgcagtcgtgcgagagcagcaagaacaagtcccggctgacgagccagagcgaggccatggccctgcagtcgatccggaacatgcgcgggaactcccactgtgtggactgcgagacccagaatcccaactgggccagtttgaacttgggagccctcatgtgcatcgaatgctcagggatccaccggaatcttggcacccacctttcccgagtccgatctctggacctggatgactggccagtcgagctcatcaaggtgatgtcatccatcgggaacgagctagccaacagcgtctgggaagagagcagccaggggcggacgaaaccatcggtagactccacaagggaagagaaggaacggtggatccgtgccaagtacgagcagaagctcttcctggccccgctgccctgcacggagctgtccctgggccagcacctgctgcgggccaccgccgacgaggacctgcggacggccatcctgctgctggcacacggctcccgggacgaggtgaacgagacctgcggggagggagacggccgcacggcgctgcatctggcctgccgcaaggggaatgtggtcctggcgcagctcctgatctggtacggagtggacgtcacggcccgagatgcccacgggaacacagctctggcctacgcccggcaggcctccagccaggagtgcatcgacgtgctgctgcagtacggctgccccgacgagcgcttcgtgctcatggccacccctaacctgtccaggagaaacaataaccggaacaacagcagtgggagggtgcccaccatcatctgaggaacagccgtgcccgcctgctcgccgcacctgggacgcggcagcctcgccgcattctcgctcagaagtcgcagcacgtgagtcccgtcgcatcccctccctcttcctggtggccacctccctcccgcccacccactctcaccccaaacaaaatcacaaaacctggacatccctcaaggggcgaagaggcggccgggagactgcagaagtggctccttttcataaactcccctaaaccacacacaggagagagcgacgggcctcggccctttgatgatagcacatggcgcaggacccttgtcctggtggcacaagggatggggacgcgagggggaggggaggcgaggaacaaggagaaggggcaactttccttaactggcagttgagcacatagtacatttcccctctaccaaacggaacacttggattccatctcttctctgaggagctcgacggcataaatcagaagcaagcacagagtttgtcaggtttgaagcccctatgatggtgtgtgtcaaatcagttgtagctaatctgtccagggagaatactggcttcattacacttgtacagccgagttcttcccgcattactgctgtttaatagaacgtgattagtcatcgccgagaagaaagcatattagccgaggaggtagtcacgcggcacgcgccggtgattgccacgatgtgattgcaatactcttagaagcaccatattatcccagacatgttctttcaagcccttggagccctctctaaattcactgtcatcatttagtatctgtttaatttttcagtccaaagagaggaaatcagtcgctgagtattatttgactccggtctccttggtgcaaaaacaaaatgggaaaaataaataagaataactcagaaactcaaaaggaaaccacaaattcagctaataatagcatttcgagtatatttcgtaaactaaggaaatacacaaaaggctgttttttccgactgtaagagatatttgatgtccttttgccgaggtggatgtgttagtctcaggccctcctggaccacgttgcccaagtcacacaggcttctgtgttatgtatttagataagatgtgtgaaaatatatttgaataaaagaagttcataaatatgcattgatttttgtacagacaaatggcacctctcttaatttataaattgaactggatgtgaactaataatgtgcaactagttgagataagagggttacagatcattgtacatggaaaatattcccagcagtaaacacttccattaatgtgatctacggcttttgaaaaggagcatctcagaataagatggtggtacaatttgcttattaaaattgagaaagaaaaaaaaagacacactggagtatattagaaaggaaaaagaaggaatgtggtctctcatgattgaaagcatgatttagatcggatacggcttttgctaaccaaggaccaagggactctggcaagatggggtggttttccgaatgccagaccgaggtgccttacgaaggcagctgccaatggttctgtggcacagactggctcctgagaacccagacgaccttgacctggcagcccggccctccacgctagtacctcgcctgattttccatcgttgcggtatccagccgcttcagacgtccgccgccttcagtggtggtagtcaaatgtagtcaaccaaaccacagcatcccttaggttaaaagcaaacggggcagctttgcctagagctcattgacagtgtgatggggggagaagggttgtcacaatggaagatgaggacactagactcatgtagcacagaaacatgaagccacacgcaccggcagcctccggggtgttcctcgctctctcgtatgttaaaccttatattttataagagtttttcctcttatttcactttttaaaaaaaattaaagtaggtggggaaaaaaataaagctttacacagaatttatatgtgggtaagtgtttcatggaaatttctaatcttaacgaagctaagtggagctcactcgtatccaaaagtataacaggtgcagaagccacaagtctgagaaccttgacgacagttccatcgtcctgccatttgatttttcagtctgcgtttcatcactgtgtagctattgtaaatgtgaatagaaaaaaacaggtcattgcctatttttgaagaacgcgttggtgttcgagtccactagacacactcgctccacacagccttcaccgtagactctgtagtggacacagatatagcataaatgaaattgttaaattatttcattgtagttaattcccactataggaatgctttatcatagtgaagtttcttttgagaagaaacggaactccttgaggcttctctttgggatgtatatgagcgtgtacatattattctatgtgtttataatataatattttcccaaatgacttcttgtttcactttgccttccacaacctgaatgccagattggttttttcccttcctggcccccagcacaagctgccatgactccccctcagaaaacacagcccctcctctaccattctcagtgatgtccatctgctccactccgcagccactttctagggcccaagttttggtagcagaaggaaaggcagtttttgagggtctttcgaaaaaaagaagacggggcagctttgcccagagctcgttggcagtctgtttgtatttcagtgtctaaccagaagtcctttctttgcggaccgcactctcgttcccactttcaagctaattaccaccaaggctgggagaggcaaggactgggggcggagctaggaataactcgtttgagaagggggtggagttttcgttgttcatttccatgttcagttctgtgacgtgacgatgacagatcaccactgcaggatccccctcacctttcctgttcagaattaaaactctcccttgatgagaaacagccagctgagggaggcccacgagcggcctgtgtaaccccatgggtgatctggacacatctgcacccccgcgttcagcttcgcggagactgaacttggcggggagtggaggggtgtggtgcagacctggctgcagcagaaacaccccgcagggacagtactctgtgattctgacctcaggtgctgggacgggcagatggtttcccccgcccagcaccccagtcctggtccctggtccctctctctgtttcatcccaggaaatgagcagctcgagggtgagcaagtgacaagttcctgagtcactggccccaaaaccaggtgcagtgtcctgtctcccaagtgtgtgcacaatgtatatatgcactggaaaggagggagaaggcagcgggtcactcgccaatcgcagggttctcagacacaggagagagcgggatcttaatgaattgcatttcctgcagagcctctagtgcacaggccagttctcggcagtggcttttcagcacaagggccttgcattgaagctccctcttctgagatttcacccagcctgatgaggcctgcatggttccggcctcgtcatccagtgtagataccagtcttcctatttttgtgacatctgcacatttggggtcattccctatatctgcataggagctattgctaaccttgttagggagaaacatggtctaatgagaaagacagacccctaggctcagctggccctgccatccttccagaggattcctctgcaactctaggcaagcacccagcttcctgggctctttttcctcatctgtgaaacttgcagggtgcagtgaggtttcaaaccagtgtgataagtgttggcctcacacctggcccaggggatgctgggagaacaggagcacttgttaataacagaaacactgatgggaccgaagccagtgcacacaccaggaaacctgcccgtggctgacactgtcctccagcctgcattctggggaggctgtgatgggcacgtttgccaaccccccccccccagtagagcccaggaccctcctctctcagcttgccagtgccctgccctccacatggcggggaacagcatcaatgaggtccttgctccctgagagcctctctggaacctgcccacttttctcaacatgtatattctgctttgtagtctgaggttgattttctagaggcgaggaaggggctgagttctgccctcgtgctgttcgctggtgctgatcagggccaagacgacccttccctctcccccacagcctgttgaggtgccgttgacgtggacagcgcccctcccttaagatgcccccttgccgttgccatgagccgctgtgactcacgcgtgcactgggccttgcttggtgctcccctcctcctcctgtctgagatcggagcttgctggagagcaccccaggtcgccgtgcttggctgcaggcccgtccctctctccccatcctcgggttcccagcgtgttttgtgcttgaacttggtggactcatcttaccccacaagagtggcctgctcaacctgcagcctccaatgtgccgtaggcgctctaggtccccgtggcgcccaggacaccaactctccctccctgcacttaggatgttctggaaatgagaggaaatccacattcctgccccaggaggtgggaagcctggcaacgatgtagcttcccctgagatgcggtatgatcaggcctcagcaactactcaggaggcaaaggtgtttggaaagcaaaccccaaacctcccggcacggcatgtgctctgcttccgtccctcaccgcctgcacaaggtcgttgagacttttctagaactccccggggttgtatttatggccttcaagcaaacaaattgaaaagcagtcaaggaggagttcagatagaaaagtgctggagatacacatctttccttcaaaggaaatgtaatttatttccaaccgctgcctcagacgggggtttcacatgttgtgaagtcacatcttgaatgactgtcaccctcatccttccccaaaaagctaaataagggcctttggcatcaatgcgtgcattctccacctttccgcggcttgcgcttggatttctgagtggctttcttcagggagcccttgtggtcatgtgtctttaatgctgctccccatgcccccaggccaggccagcacgctcaggtgatagcgagtggggccaggagacccccctgccctgcccagtggacagatctgccccagccctgctgtggggacgggccctctatcatttaaccacatacattaggttgcttttcagcaaaatgtcagctttcctcccattatgcaggagagagaaggggcgcaggtgtatctccttagagtacaccttggagctggatcactaagaaacagtcctcagactggtccttccgacacaggcagagagtgaactggatcgctggcccctgggatgctgcgctgtctgtgattagagagaagtggccagtgtcccgtctgtgattagacagaaacccctgtggcagactcctcccctctccatgaagaaagaaatatttacttagatattactgtttcaaaacacaaactttattccccttagagaagaaatactgcccttaaatagactgttgaaatattaatggcccccccatttaatcagtgtgtctgcggctttcttcgcgtcacatgtccgcattggcaggtgattctggaaagggattctgggaaaccaacaagtcttttttaaatctttgagttgtatgagaaagtatttaagttcaccagtgtagtaaacacccaccccagagcagcggtaagcaaacctaaatctgaaaacccattcttactgtctttcaccatgagatgctggttttggtgtaaaatgacagcacttggtttggggttttgcacctgttgggtagaactgttcttgtctgaggtcctcaccctctacagatgggcctcagggcctggaggtgggcagatggggccagagtggccagcagagacttgcatgggctctgaaagccccagagctcaggcctaaggctgctaggtgagaccagcaggcagctgtggcatccgaccttgggacgcccaagctgggcagccgctccatgtgccccaaacaggatatcctcatgaatgtgaggagaggctggctcagggcttggttttcattttggcctggcacagggtacctgtagggagcactcccccaacctgaggatggtgaaaccatatgatagagactccttgtcgaagtccacatcggactgatctagaatgccccgtggggggattgcatggcctttgccttgagatgcaggtgaaagaaaggaaccaaacaaggcatgagtgtgttggggaatcttcccagtggagcaaacccccttaacacaccagctgttgggaacagctgcccctaaatccaattaaaccctcatctccctggtgctgaacagtctacactggcccaggaagctaacgtctgagccgcttggagagctttggtaaacagaagacactggaagcccactcggtcagcagctgggcatgaggatgtcaggggcctttggacttgaggaaggacagtccaggtgcatggaatcctaatgggcctcatgcagacactggaagcagcccagccccctgcccaataccacagccctggggtgtcccctgacattcctggaggtccctgggcaaatgcatttcctgcctgggttctcagggtaggagaacagagaaggctccaagggtgttgggagtgagccaggggctggtctggggagtgggtctcacgcactgctcaggttggcacgagggacctcccccatcccaacccagccccaagggtcccagcagggctctcagcatggctgttttgagggtacacaggtggctggagaggggtggggcagttgcatggtgggtggcaaagtgtgcatttagaagctgcttcgtggcgttaagaacggggggagagggaccagcactgtaacgttagaaataattccttcttgcagacttgaaaagcatcagtttccctcccacggctgggtttttgtgtctgaaatacatctaattctccagactgcagcccctctcagccccgagcacctgagcgctggggaggcccttattgagctcagcctggagaggggagggtcgcacgggtcccgggggcaggtctcctgcactggctcttcccttctgccagcttggaatttggttctcatcttgccacaggggtgcgtttcctaaagggcagccggagcagctcaaaggtgacaactgagatgcatttctaggcaggggcagggaaggccaacccaccttgcagccagttttctgtttctgtaaatagcagtgtatagagatggaagggcagcgtgggtgtatccacagatgggtttaggttttttttttggatgttttctattacctcattcagcaactttatgtttcacaatgactcaatgatgctttatttatattgtttgtactgtaattaaaaccattgacagacatttcactttgcttgttatttcatatgatcttgttttgattaaatatgccagtttgtattttcctgccttgggatttttttgtgtccgctgtacagtattctaagggaaaaagaaaaagaaagatgtgtaaagtaacagagagaggtggctatggtgtagagacctctttctaataaagaaatgaaaatatgtctacaccgct

SEQ ID NO: 766 - DNA, 1798 bp, Homo sapiens
  source 1..1798: mol_type = unassigned DNA
ctcaagaggcagctgcaaagaaagctgtggtcttgagtgccagagttcaccctggagaaagtaatggctcctgggttatgaaaggctttttggacttcatccttagcaactccccagatgcccagctcctcagagatatttttgtcttcaaggtgcttcccatgttaaatccagatggtgtgattgtggggaattatcggtgttccttggccggaagggatttgaacaggcattataaaaccattctgaaggagtctttcccttgtatttggtacaccaggaacatgatcaaaagttctcttttcacagttgtaattttaaggtccaaaaatgcaaagaaggaacaggacgagttgttatgtggcggatgggaatcctaaacagctacaccatggagtctacctttggcgggtccaccctgggtaataaaagagacacccactttaccatcgaagatctgaagtccttaggttatcatgtctgtgacacccttctggacttttgtgatcctgaccaaatgaagttcactcagtgtctagcagagcttaaggagcttttacgacaggaaatccacaagaaattccatgaacttggacaagatgtagatttagaaggaagttggagtgacatctctttgtctgacattgaatccagcaccagtggctctgacagttctctctcagatggtcttcctgttcacctagcaaacatagcagatgagctgactcagaaaaagaagatgtttaagaagaaaaaaaagaagtcacttcagactaggaaacagcgaaatgagcagtatcagaaaaaaaatttgatgcagaagttaaagttaacagaagatacctcagaaaaggcaggatttgcttctactctgcaaaagcagccaacctttttcaaaaactcagagaattccagttttttaccaatgaaaaatgaaaacccaaggttaaatgagacaaatttaaatagaagagacaaagacacccccctggacccatcaatggccaccctgattctgcctaagaataaagggagaatgcagaataagaagccaggctttacagtatcatgctctccaaagagaaccataaactccagccaagagccagctccaggtatgaagccaaactggcctaggagcagatatcctgccacaaagagaggctgtgctgccatggcggcatacccatccttgcacatatacacatacccgtaggtgagcctgggctgtgccacacaagcacttcatcgggggttttgagattagacacattttataatgggggagatgtatgactgggaactgcatttacttgtggtatactgtgttgtgcactcatgcactgaccttacactttgtacttacactgtgggcatgtggtcaagatgcatacctcatgaattcaactattttttcataaaatgaaattttattatgatgtgtaaaaatgctttatcagaaactgaagtgtgttctcatggcacacttcatggcagcacagatatacctcattttaaccaatagatattctctctaaaattatgtgcaaatcaatttttaaaaatcaaaatctatgttaaacacattttggcagtgtgctataataaaaaaaagtgttgtgtcaaagctttctagtgacggtcagtcctactgctgtatgtcaggtttgctcacaatgaggtattcccacatagaaataacaatgcatgtattacccagaatttaatgttgcgtaccttatgttcaatgaggttttgtaatttttttaggctgatgattaaaattctttctctctaa

SEQ ID NO: 767 - DNA, 3577 bp, Homo sapiens
  source 1..3577: mol_type = unassigned DNA
gggccctcacagaaggcggtggcgggcgggtgcagcgagtttgtccccttgcccgcacactgcttggcctctgtacttaagtgcggtggccgcctgcctcgctggagcttctctgccgcagccatccgtgctgcttgggacgggccggggcgcgaaggcggtcgcatccatcgctctgccctcctgcttctcttgtgtaatcagctgcctatttggaaattgggcagggtttgcgactggatgctaatgtcactgactagttttcagcctaccatccagaagtaacatgttcccagctttggaaacgcacctaaagcagactattcctgatccttatgaagactttatgtaccgtcacctccaatattatggctactttaaagctcagagaggcagtttaccaaactctgctacgcatcagcatgttcggaagaataaccctcaatgcctgttgaatggctctcttggggaaaaagatgatttgataccagacaccctgcaaaaggagaagcttctatggcctatcagtttatcttcagctgtgcacagacagatagaagccatcaacagagactttcactcttgcctgggctggatgcagtggcgcggcctcagctcactgcaacctccacctcccagattcaaggattctcctgcctcagctttccgagtagctgggattacagattcacatatgctgagtttaccacatcttaggagcagacagcttctttatgatgagttggatgaagtaaacccacgtcttcgagaaccccaagagctcttttccattttgtctaccaagaggccactgcaggctccaagatggccaattgaatgtgaggtcatcaaggaaaacatccatcatattgagtgggctccacctcaaccagaatatttctatcagcctaaaggaaatgaaaaggtaccagagattgtaggagagaaaaaaggaacagttgtctatcaattagattcagtgcctatagaaggttcctattttaccagttccagagtgggaggcaaacgaggaattgtcaaggaacttgctgtcacgttgcaaggaccagaagataatactctactgtttgaatcaaggtttgagagtgggaatctgcaaaaagctgtcagagtagacacctatgagtatgaactcaccttgcgaactgacctctacactaacaaacacactcagtggttttattttcgtgttcagaacaccagaaaagatgctacctatcgcttcaccattgtcaacttgctaaaacccaagagtctttatactgtagggatgaagccactcttgtactcccaattggatgccaacacccgcaatattggctggaggagagaaggaaatgaaatcaagtactacaagaacaacacggatgatgggcagcagcccttctactgtctcacgtggaccattcagtttccatatgaccaggacacttgcttctttgcacacttctacccatatacatacactgatttgcaatgctacctcctgtcagtggcaaacaaccctatccagtctcagttctgcaagctccaaactttatgcaggagcctagcaggaaataccgtttacttgctcaccatcaccaacccatcccagacccctcaagaggcagctgcaaagaaagctgtggtcttgagtgccagagttcaccctggagaaagtaatggctcctgggttatgaaaggctttttggacttcatccttagcaactccccagatgcccagctcctcagagatatttttgtcttcaaggtgcttcccatgttaaatccagatggtgtgattgtggggaattatcggtgttccttggccggaagggatttgaacaggcattataaaaccattctgaaggagtctttcccttgtatttggtacaccaggaacatgatcaaaagacttcttgaagaaagagaggttctgttgtattgtgatttccatggccacagtcgtaagaataatatcttcctgtatggctgtaataacaacaatcgcaaatactggcttcatgaacgagtctttcctttaatgttatgcaaaaatgcaccagataagttctcttttcacagttgtaattttaaggtccaaaaatgcaaagaaggaacaggacgagttgttatgtggcggatgggaatcctaaacagctacaccatggagtctacctttggcgggtccaccctgggtaataaaagagacacccactttaccatcgaagatctgaagtccttaggttatcatgtctgtgacacccttctggacttttgtgatcctgaccaaatgaagttcactcagtgtctagcagagcttaaggagcttttacgacaggaaatccacaagaaattccatgaacttggacaagatgtagatttagaaggaagttggagtgacatctctttgtctgacattgaatccagcaccagtggctctgacagttctctctcagatggtcttcctgttcacctagcaaacatagcagatgagctgactcagaaaaagaagatgtttaagaagaaaaaaaagaagtcacttcagactaggaaacagcgaaatgagcagtatcagaaaaaaaatttgatgcagaagttaaagttaacagaagatacctcagaaaaggcaggatttgcttctactctgcaaaagcagccaacctttttcaaaaactcagagaattccagttttttaccaatgaaaaatgaaaacccaaggttaaatgagacaaatttaaatagaagagacaaagacacccccctggacccatcaatggccaccctgattctgcctaagaataaagggagaatgcagaataagaagccaggctttacagtatcatgctctccaaagagaaccataaactccagccaagagccagctccaggtatgaagccaaactggcctaggagcagatatcctgccacaaagagaggctgtgctgccatggcggcatacccatccttgcacatatacacatacccgtaggtgagcctgggctgtgccacacaagcacttcatcgggggttttgagattagacacattttataatgggggagatgtatgactgggaactgcatttacttgtggtatactgtgttgtgcactcatgcactgaccttacactttgtacttacactgtgggcatgtggtcaagatgcatacctcatgaattcaactattttttcataaaatgaaattttattatgatgtgtaaaaatgctttatcagaaactgaagtgtgttctcatggcacacttcatggcagcacagatatacctcattttaaccaatagatattctctctaaaattatgtgcaaatcaatttttaaaaatcaaaatctatgttaaacacattttggcagtgtgctataataaaaaaaagtgttgtgtcaaagctttctagtgacggtcagtcctactgctgtatgtcaggtttgctcacaatgaggtattcccacatagaaataacaatgcatgtattacccagaatttaatgttgcgtaccttatgttcaatgaggttttgtaatttttttaggctgatgattaaaattctttctctctaa

SEQ ID NO: 768 - DNA, 2929 bp, Homo sapiens
  source 1..2929: mol_type = unassigned DNA
agactacccgggccctcacagaaggcggtggcgggcgggtgcagcgagtttgtccccttgcccgcacactgcttggcctctgtacttaagtgcggtggccgcctgcctcgctggagcttctctgccgcagccatccgtgctgcttgggacgggccggggcgcgaaggcggtcgcatccatcgctctgccctcctgggtttgcgactggatgctaatgtcactgactagttttcagcctaccatccagaagtaacatgttcccagctttggaaacgcacctaaagcagactattcctgatccttatgaagactttatgtaccgtcacctccaatattatggctactttaaagctcagagaggcagtttaccaaactctgctacgcatcagcatgttcggaagaataaccctcaatgcctgttgaatggctctcttggggaaaaagatgatttgataccagacaccctgcaaaaggagaagcttctatggcctatcagtttatcttcagctgtgcacagacagatagaagccatcaacagagattcacatatgctgagtttaccacatcttaggagcagacagcttctttatgatgagttggatgaagtaaacccacgtcttcgagaaccccaagagctcttttccattttgtctaccaagaggccactgcaggctccaagatggccaattgaatgtgaggtcatcaaggaaaacatccatcatattgagtgggctccacctcaaccagaatatttctatcagcctaaaggaaatgaaaaggtaccagagattgtaggagagaaaaaaggaacagttgtctatcaattagattcagtgcctatagaaggttcctattttaccagttccagagtgggaggcaaacgaggaattgtcaaggaacttgctgtcacgttgcaaggaccagaagataatactctactgtttgaatcaaggtttgagagtgggaatctgcaaaaagctgtcagagtagacacctatgagtatgaactcaccttgcgaactgacctctacactaacaaacacactcagtggttttattttcgtgttcagaacaccagaaaagatgctacctatcgcttcaccattgtcaacttgctaaaacccaagagtctttatactgtagggatgaagccactcttgtactcccaattggatgccaacacccgcaatattggctggaggagagaaggaaatgaaatcaagtactacaagaacaacacggatgatgggcagcagcccttctactgtctcacgtggaccattcagtttccatatgaccaggacacttgcttctttgcacacttctacccatatacatacactgatttgcaatgctacctcctgtcagtggcaaacaaccctatccagtctcagttctgcaagctccaaactttatgcaggagcctagcaggaaataccgtttacttgctcaccatcaccaacccatcccagacccctcaagaggcagctgcaaagaaagctgtggtcttgagtgccagagttcaccctggagaaagtaatggctcctgggttatgaaaggctttttggacttcatccttagcaactccccagatgcccagctcctcagagatatttttgtcttcaaggtgcttcccatgttaaatccagatggtgtgattgtggggaattatcggtgttccttggccggaagggatttgaacaggcattataaaaccattctgaaggagtctttcccttgtatttggtacaccaggaacatgatcaaaagacttcttgaagaaagagaggttctgttgtattgtgatttccatggccacagtcgtaagaataatatcttcctgtatggctgtaataacaacaatcgcaaatactggcttcatgaacgagtctttcctttaatgttatgcaaaaatgcaccagataagttctcttttcacagttgtaattttaaggtccaaaaatgcaaagaaggaacaggacgagttgttatgtggcggatgggaatcctaaacagctacaccatggagtctacctttggcgggtccaccctgggtaataaaagagacacccactttaccatcgaagatctgaagtccttaggttatcatgtctgtgacacccttctggacttttgtgatcctgaccaaatgaagttcactcagtgtctagcagagcttaaggagcttttacgacaggaaatccacaagaaattccatgaacttggacaagatgtagatttagaaggaagttggagtgacatctctttgtctgacattgaatccagcaccagtggctctgacagttctctctcagatggtcttcctgttcacctagcaaacatagcagatgagctgactcagaaaaagaagatgtttaagaagaaaaaaaagaagtcacttcagactaggaaacagcgaaatgagcagtatcagaaaaaaaatttgatgcagaagttaaagttaacagaagatacctcagaaaaggcaggatttgcttctactctgcaaaagcagccaacctttttcaaaaactcagagaattccagttttttaccaatgaaaaatgaaaacccaaggttaaatgaggtagtatttttgtttttgactctttgtcacacagattctctaacctctcgaattagcacctctctcccacaatgtgacaaatgtaatagccatttacgttaccctaacctgacagtgccactgggagcaagaaaacattaaaactgggggagacattgacactgctttggattagacatgactgaagtctggaatcaaatattggtgatttgtgattttacaccaagaacataagaacaggctgccttacttaccatccattcatccctctactcacccatctactcaatcagcaaatgttattttaaaataaatcaatgaattttattgggcacctacta

SEQ ID NO: 769 - DNA, 2617 bp, Homo sapiens
  source 1..2617: mol_type = unassigned DNA
acagaaggcggtggcgggcgggtgcagcgagtttgtccccttgcccgcacactgcttggcctctgtacttaagtgcggtggccgcctgcctcgctggagcttctctgccgcagccatccgtgctgcttgggacgggccggggcgcgaaggcggtcgcatccatcgctctgccctcctgggaagtttctgctctccttccccgctcctacccttaggaaaccccctcaccacctgccccagaccaggttcctctgaaccctaaattcaatctttagggcccactttcccaaccccctgacctttttccatcggcacctaccgagacgacttcgtcgcgtgctcccatacccatttctttcactttcctgtggcgagcatctcctttctcagggaaagggaagcatggggccagcaccttgggaagaagaagcgggaagatacgctgccctccctgtctcagatgcacctctggcctcggcgtgaccaccttgtttagctgaggagaagctgggttggcagggttttctgaagtcaagagggagctggggggcgcccggggaggtattggcagttttttcacttgtcctcttgtggctttgtagcttctcttgtgtaatcagctgcctatttggaaattgggcagggtttgcgactggatgctaatgtcactgactagttttcagcctaccatccagaagtaacatgttcccagctttggaaacgcacctaaagcagactattcctgatccttatgaagactttatgtaccgtcacctccaatattatggctactttaaagctcagagaggcagtttaccaaactctgctacgcatcagcatgttcggaagaataaccctcaatgcctgttgaatggctctcttggggaaaaagatgatttgataccagacaccctgcaaaaggagaagcttctatattcacatatgctgagtttaccacatcttaggagcagacagcttctttatgatgagttggatgaagtaaacccacgtcttcgagaaccccaagagctcttttccattttgtctaccaagaggccactgcaggctccaagatggccaattgaatgtgaggtcatcaaggaaaacatccatcatattgagtgggctccacctcaaccagaatatttctatcagcctaaaggaaatgaaaaggtaccagagattgtaggagagaaaaaaggaacagttgtctatcaattagattcagtgcctatagaaggttcctattttaccagttccagagtgggaggcaaacgaggaattgtcaaggaacttgctgtcacgttgcaaggaccagaagataatactctactgtttgaatcaaggtttgagagtgggaatctgcaaaaagctgtcagagtagacacctatgagtatgaactcaccttgcgaactgacctctacactaacaaacacactcagtggttttattttcgtgttcagaacaccagaaaagatgctacctatcgcttcaccattgtcaacttgctaaaacccaagagtctttatactgtagggatgaagccactcttgtactcccaattggatgccaacacccgcaatattggctggaggagagaaggaaatgaaatcaagtactacaagaacaacacggatgatgggcagcagcccttctactgtctcacgtggaccattcagtttccatatgaccaggacacttgcttctttgcacacttctacccatatacatacactgatttgcaatgctacctcctgtcagtggcaaacaaccctatccagtctcagttctgcaagctccaaactttatgcaggagcctagcaggaaataccgtttacttgctcaccatcaccaacccatcccagacccctcaagaggcagctgcaaagaaagctgtggtcttgagtgccagagttcaccctggagaaagtaatggctcctgggttatgaaaggctttttggacttcatccttagcaactccccagatgcccagctcctcagagatatttttgtcttcaaggtgcttcccatgttaaatccagatggtgtgattgtggggaattatcggtgttccttggccggaagggatttgaacaggcattataaaaccattctgaaggagtctttcccttgtatttggtacaccaggaacatgatcaaaagacttcttgaagaaagagaggttctgttgtattgtgatttccatggccacagtcgtaagaataatatcttcctgtatggctgtaataacaacaatcgcaaatactggcttcatgaacgagtctttcctttaatgttatgcaaaaatgcaccagataagttctcttttcacagttgtaattttaaggtccaaaaatgcaaagaaggaacaggacgagttgttatgtggcggatgggaatcctaaacagctacaccatggagtctacctttggcgggtccaccctgggtaataaaagagacacccactttaccatcgaagatctgaagtccttaggttatcatgtctgtgacacccttctggacttttgtgatcctgaccaaatgaagcaccagtggctctgacagttctctctcagatggtcttcctgttcacctagcaaacatagcagatgag

SEQ ID NO: 770 - DNA, 1288 bp, Homo sapiens
  source 1..1288: mol_type = unassigned DNA
agactacccgggccctcacagaaggcggtggcgggcgggtgcagcgagtttgtccccttgcccgcacactgcttggcctctgtacttaagtgcggtggccgcctgcctcgctggagcttctctgccgcagccatccgtgctgcttgggacgggccggggcgcgaaggcggtcgcatccatcgctctgccctcctgcttctcttgtgtaatcagctgcctatttggaaattgggcagggtttgcgactggatgctaatgtcactgactagttttcagcctaccatccagaagtaacatgttcccagctttggaaacgcacctaaagcagactattcctgatccttatgaagactttatgtaccgtcacctccaatattatggctactttaaagctcagagaggcagtttaccaaactctgctacgcatcagcatgttcggaagaataaccctcaatgcctgttgaatggctctcttggggaaaaagatgatttgataccagacaccctgcaaaaggagaagcttctatattcacatatgctgagtttaccacatcttaggagcagacagcttctttatgatgagttggatgaagtaaacccacgtcttcgagaaccccaagagctcttttccattttgtctaccaagaggccactgcaggctccaagatggccaattgaatgtgaggtcatcaaggaaaacatccatcatattgagtgggctccacctcaaccagaatatttctatcagcctaaaggaaatgaaaaggtaccagagattgtaggagagaaaaaaggaacagttgtctatcaattagattcagtgcctatagaaggttcctattttaccagttccagagtgggaggcaaacgaggaattgtcaaggaacttgctgtcacgttgcaaggaccagaagataatactctactgtttgaatcaaggtttgagagtgggaatctgcaaaaagctgtcagagtagacacctatgagtatgaactcaccttgcgaactgacctctacactaacaaacacactcagtggttttattttcgtgttcagaacaccagaaaagatgctacctatcgcttcaccattgtcaacttgctaaaacccaagagtctttatactgtagggatgaagccactcttgtactcccaattggatgccaacacccgcaatattggctggaggagagaaggaaatgaaatcaagtactacaagaacaacacggatgatgggcagcagcccttctactgtctcacgtggaccattcagtttccatatgaccag

SEQ ID NO: 771 - DNA, 538 bp, Homo sapiens
  source 1..538: mol_type = unassigned DNA
agaagaatctgctctaacatgggagaggccagggagcagccttggcctctgtttctaacaccattcaaaacttctctctaaatctactttggattacagggcctatcagtttatcttcagctgtgcacagacagatagaagccatcaacagagattcacatatgctgagtttaccacatcttaggagcagacagcttctttatgatgagttggatgaagtaaacccacgtcttcgagaaccccaagagctcttttccattttgtctaccaagaggccactgcaggctccaagatggccaattgaatgtgaggtcatcaaggaaaacatccatcatattgagtgggctccacctcaaccagaatatttctatcagcctaaaggaaatgaaaaggtaccagagattgtaggagagaaaaaaggaacagttgtctatcaattagattcagtgcctatagaaggttcctattttaccagttccagagtgggaggcaaacgaggaattgtcaaggaacttgctgtcacgttgcaaggaccaga

SEQ ID NO: 772 - DNA, 552 bp, Homo sapiens
  source 1..552: mol_type = unassigned DNA
aacaacgctcatgtactttttgttgagtctattatggtttgaaaacattatcttgattgaagtggcctttcctttcacagactattcctgatccttatgaagactttatgtaccgtcacctccaatattatggctactttaaagctcagagaggcagtttaccaaactctgctacgcatcagcatgttcggaagaataaccctcaatgcctgttgaatggctctcttggggaaaaagatgatttgataccagacaccctgcaaaaggagaagcttctatggcctatcagtttatcttcagctgtgcacagacagatagaagccatcaacagagattcacatatgctgagtttaccacatcttaggagcagacagcttctttatgatgagttggatgaagtaaacccacgtcttcgagaaccccaagagctcttttccattttgtctaccaagaggccactgcaggctccaagatggccaattgaatgtgaggtcatcaaggaaaacatccatcatattgagtgggctccacctcaaccagaatatttctatc

SEQ ID NO: 773 - DNA, 901 bp, Homo sapiens
  source 1..901: mol_type = unassigned DNA
taaccctcaatgcctgttgaatggctctcttggggaaaaagatgatttgataccagacaccctgcaaaaggagaagcttctatggcctatcagtttatcttcagctgtgcacagacagatagaagccatcaacagaggtatttcatgtccttccagaccagaagattcaagctccttttttggactatgtcttcatcacctgctgttcccaccagacctaagaattaccagacaggaatgggattcatgcctgatgagcactgaaggaccctcagcctttagttccccctttcatttccatttttttcttttttcctcattccctttcttctttttctttttcttttttttttttttttgacacagactttcactcttgcctgggctggatgcagtggcgcggcctcagctcactgcaacctccacctcccagattcaaggattctcctgcctcagctttccgagtagctgggattacaggcatgtgccaccacgcccagctaatttttatgtttttagtagagacaggatttcaccacgttggccaggctggtctcgaactcctgaactcagatgatcagcccgcctcagcctcccaaagttctgggattacaggcttgagccaccacgcctggcccctcctttcttttttatcttcctgaaagcctttcttttcttcccttttttctcattctttctttcccaagagctcttcctctcttctgccccatctcatgccttctctccccttcctctttccatcttctttgttttatgtctgtctttcctttgtatggttatattatggccctgaaattttatttatagattatttcactatagttgataaaaaagaagaaaaaaagaataaagttttatgtaattttttctaaaatgctaa

SEQ ID NO: 774 - DNA, 550 bp, Homo sapiens
  source 1..550: mol_type = unassigned DNA
ggtttgcgactggatgctaatgtcactgactagttttcagcctaccatccagaagtaacatgttcccagctttggaaacgcacctaaagcagactattcctgatccttatgaagactttatgtaccgtcacctccaatattatggctactttaaaggatctcgctctgtcactcaggctggagggcagtggcctccacatcccaggctcaagcaaccctcccagcctttggctatcattttctgagttccaacacagcccttgtagcttcagaatctttctgcctgccaagtcctttctcactccactacaccaggctgcttctcaagtctcctcttcacatccatttcctcagctgtaagctcagagaggcagtttaccaaactctgctacgcatcagcatgttcggaagaataaccctcaatgcctgttgaatggctctcttggggaaaaagatgatttgataccagacaccctgcaaaaggagaagcttctatggcctatcagtttatcttcagctgtgcacagacagatagaagccatcaacagag

SEQ ID NO: 775 - DNA, 927 bp, Homo sapiens
  source 1..927: mol_type = unassigned DNA
gctttcggttgctagactacccgggccctcacagaaggcggtggcgggcgggtgcagcgagtttgtccccttgcccgcacactgcttggcctctgtacttaagtgcggtggccgcctgcctcgctggagcttctctgccgcagccatccgtgctgcttgggacgggccggggcgcgaaggcggtcgcatccatcgctctgccctcctgggaagtttctgctctccttccccgctcctacccttaggaaaccccctcaccacctgccccagaccaggttcctctgaaccctaaattcaatctttagggcccactttcccaaccccctgacctttttccatcggcacctaccgagacgacttcgtcgcgtgctcccatacccatttctttcactttcctgtggcgagcatctcctttctcagggaaagggaagcatggggccagcaccttgggaagaagaagcgggaagatacgctgccctccctgtctcagatgcacctctggcctcggcgtgaccaccttgtttagctgaggagaagctggcttctcttgtgtaatcagctgcctatttggaaattgggcagggtttgcgactggatgctaatgtcactgactagttttcagcctaccatccagaagtaacatgttcccagctttggaaacgcacctaaagcagactattcctgatccttatgaagactttatgtaccgtcacctccaatattatggctactttaaagctcagagaggcagtttaccaaactctgctacgcatcagcatgttcggaagaataaccctcaatgcctgttgaatggctctcttggggaaaaagatgatttgataccagacaccctgcaaaaggagaagcttctatggcctatcagtttatcttcagctgtgcacagacagatagaagccatcaacagag

SEQ ID NO: 776 - DNA, 592 bp, Homo sapiens
  source 1..592: mol_type = unassigned DNA
agactacccgggccctcacagaaggcggtggcgggcgggtgcagcgagtttgtccccttgcccgcacactgcttggcctctgtacttaagtgcggtggccgcctgcctcgctggagcttctctgccgcagccatccgtgctgcttgggacgggccggggcgcgaaggcggtcgcatccatcgctctgccctcctgcttctcttgtgtaatcagctgcctatttggaaattgggcagggtttgcgactggatgctaatgtcactgactagttttcagcctaccatccagaagtaacatgttcccagctttggaaacgcacctaaagcagactattcctgatccttatgaagactttatgtaccgtcacctccaatattatggctactttaaagtgaaaagtacttcctttccccattgatctgcgggtcacctctgtcaagtagacagcatcacttaatacaaagctcagagaggcagtttaccaaactctgctacgcatcagcatgttcggaagaataaccctcaatgcctgttgaatggctctcttggggaaaaagatgatttgataccagacaccctgcaaaaggagaag

SEQ ID NO: 777 - DNA, 479 bp, Homo sapiens
  source 1..479: mol_type = unassigned DNA
gcttcctgctttcggttgctagactacccgggccctcacagaaggcggtggcgggcgggtgcagcgagtttgtccccttgcccgcacactgcttggcctctgtacttaagtgcggtggccgcctgcctcgctggagcttctctgccgcagccatccgtgctgcttgggacgggccggggcgcgaaggcggtcgcatccatcgctctgccctcctgggaagtttctgctctccttccccgctcctacccttaggaaaccccctcaccacctgccccagaccagcttctcttgtgtaatcagctgcctatttggaaattgggcagggtttgcgactggatgctaatgtcactgactagttttcagcctaccatccagaagtaacatgttcccagctttggaaacgcacctaaagcagactattcctgatccttatgaagactttatgtaccgtcacctccaatattatggctactttaaag

SEQ ID NO: 778 - DNA, 305 bp, Homo sapiens
  source 1..305: mol_type = unassigned DNA
cctctggcctcggcgtgaccaccttgtttagctgaggagaagctgggttggcagggttttctgaagtcaagagggagctggggggcgcccggggaggtattggcagttttttcacttgtcctcttgtggctttgtagcttctcttgtgtaatcagctgcctatttggaaattgggcagggtttgcgactggatgctaatgtcactgactagttttcagcctaccatccagaagtaacatgttcccagctttggaaacgcacctaaagcagactattcctgatccttatgaagactttatgtaccg

SEQ ID NO: 779 - DNA, 3295 bp, Homo sapiens
  source 1..3295: mol_type = unassigned DNA
atgttcccagctttggaaacgcacctaaagcagactattcctgatccttatgaagactttatgtaccgtcacctccaatattatggctactttaaagctcagagaggcagtttaccaaactctgctacgcatcagcatgttcggaagaataaccctcaatgcctgttgaatggctctcttggggaaaaagatgatttgataccagacaccctgcaaaaggagaagcttctatggcctatcagtttatcttcagctgtgcacagacagatagaagccatcaacagagactttcactcttgcctgggctggatgcagtggcgcggcctcagctcactgcaacctccacctcccagattcaaggattctcctgcctcagctttccgagtagctgggattacagattcacatatgctgagtttaccacatcttaggagcagacagcttctttatgatgagttggatgaagtaaacccacgtcttcgagaaccccaagagctcttttccattttgtctaccaagaggccactgcaggctccaagatggccaattgaatgtgaggtcatcaaggaaaacatccatcatattgagtgggctccacctcaaccagaatatttctatcagcctaaaggaaatgaaaaggtaccagagattgtaggagagaaaaaaggaacagttgtctatcaattagattcagtgcctatagaaggttcctattttaccagttccagagtgggaggcaaacgaggaattgtcaaggaacttgctgtcacgttgcaaggaccagaagataatactctactgtttgaatcaaggtttgagagtgggaatctgcaaaaagctgtcagagtagacacctatgagtatgaactcaccttgcgaactgacctctacactaacaaacacactcagtggttttattttcgtgttcagaacaccagaaaagatgctacctatcgcttcaccattgtcaacttgctaaaacccaagagtctttatactgtagggatgaagccactcttgtactcccaattggatgccaacacccgcaatattggctggaggagagaaggaaatgaaatcaagtactacaagaacaacacggatgatgggcagcagcccttctactgtctcacgtggaccattcagtttccatatgaccaggacacttgcttctttgcacacttctacccatatacatacactgatttgcaatgctacctcctgtcagtggcaaacaaccctatccagtctcagttctgcaagctccaaactttatgcaggagcctagcaggaaataccgtttacttgctcaccatcaccaacccatcccagacccctcaagaggcagctgcaaagaaagctgtggtcttgagtgccagagttcaccctggagaaagtaatggctcctgggttatgaaaggctttttggacttcatccttagcaactccccagatgcccagctcctcagagatatttttgtcttcaaggtgcttcccatgttaaatccagatggtgtgattgtggggaattatcggtgttccttggccggaagggatttgaacaggcattataaaaccattctgaaggagtctttcccttgtatttggtacaccaggaacatgatcaaaagacttcttgaagaaagagaggttctgttgtattgtgatttccatggccacagtcgtaagaataatatcttcctgtatggctgtaataacaacaatcgcaaatactggcttcatgaacgagtctttcctttaatgttatgcaaaaatgcaccagataagttctcttttcacagttgtaattttaaggtccaaaaatgcaaagaaggaacaggacgagttgttatgtggcggatgggaatcctaaacagctacaccatggagtctacctttggcgggtccaccctgggtaataaaagagacacccactttaccatcgaagatctgaagtccttaggttatcatgtctgtgacacccttctggacttttgtgatcctgaccaaatgaagttcactcagtgtctagcagagcttaaggagcttttacgacaggaaatccacaagaaattccatgaacttggacaagatgtagatttagaaggaagttggagtgacatctctttgtctgacattgaatccagaaacagcaccagtggctctgacagttctctctcagatggtcttcctgttcacctagcaaacatagcagatgagctgactcagaaaaagaagatgtttaagaagaaaaaaaagaagtcacttcagactaggaaacagcgaaatgagcagtatcagaaaaaaaatttgatgcagaagttaaagttaacagaagatacctcagaaaaggcaggatttgcttctactctgcaaaagcagccaacctttttcaaaaactcagagaattccagttttttaccaatgaaaaatgaaaacccaaggttaaatgagacaaatttaaatagaagagacaaagacacccccctggacccatcaatggccaccctgattctgcctaagaataaagggagaatgcagaataagaagccaggctttacagtatcatgctctccaaagagaaccataaactccagccaagagccagctccaggtatgaagccaaactggcctaggagcagatatcctgccacaaagagaggctgtgctgccatggcggcatacccatccttgcacatatacacatacccgtaggtgagcctgggctgtgccacacaagcacttcatcgggggttttgagattagacacattttataatgggggagatgtatgactgggaactgcatttacttgtggtatactgtgttgtgcactcatgcactgaccttacactttgtacttacactgtgggcatgtggtcaagatgcatacctcatgaattcaactattttttcataaaatgaaattttattatgatgtgtaaaaatgctttatcagaaactgaagtgtgttctcatggcacacttcatggcagcacagatatacctcattttaaccaatagatattctctctaaaattatgtgcaaatcaatttttaaaaatcaaaatctatgttaaacacattttggcagtgtgctataataaaaaaaagtgttgtgtcaaagctttctagtgacggtcagtcctactgctgtatgtcaggtttgctcacaatgaggtattcccacatagaaataacaatgcatgtattacccagaatttaatgttgcgtaccttatgttcaatgaggttttgtaatttttttaggctgatgattaaaattctttctctct

SEQ ID NO: 780 - DNA, 5546 bp, Homo sapiens
  source 1..5546: mol_type = unassigned DNA
gggcggcgggatgggggccgggggcggcgggcgccgcactcgctgaggccccgacgcagggccgggccgggcccagggccgaggagcgcggcggccagagcggggccgcggaggcgacgccggggacgcccgcgcgacgagcaggtggcggcggctgcaggcttgtccagccggaagccctgagggcagctgttcccactggctctgctgaccttgtgccttggacggctgtcctcagcgaggggccgtgcacccgctcctgagcagcgccatgggcctgctggccttcctgaagacccagttcgtgctgcacctgctggtcggctttgtcttcgtggtgagtggtctggtcatcaacttcgtccagctgtgcacgctggcgctctggccggtcagcaagcagctctaccgccgcctcaactgccgcctcgcctactcactctggagccaactggtcatgctgctggagtggtggtcctgcacggagtgtacactgttcacggaccaggccacggtagagcgctttgggaaggagcacgcagtcatcatcctcaaccacaacttcgagatcgacttcctctgtgggtggaccatgtgtgagcgcttcggagtgctggggagctccaaggtcctcgctaagaaggagctgctctacgtgcccctcatcggctggacgtggtactttctggagattgtgttctgcaagcggaagtgggaggaggaccgggacaccgtggtcgaagggctgaggcgcctgtcggactaccccgagtacatgtggtttctcctgtactgcgaggggacgcgcttcacggagaccaagcaccgcgttagcatggaggtggcggctgctaaggggcttcctgtcctcaagtaccacctgctgccgcggaccaagggcttcaccaccgcagtcaagtgcctccgggggacagtcgcagctgtctatgatgtaaccctgaacttcagaggaaacaagaacccgtccctgctggggatcctctacgggaagaagtacgaggcggacatgtgcgtgaggagatttcctctggaagacatcccgctggatgaaaaggaagcagctcagtggcttcataaactgtaccaggagaaggacgcgctccaggagatatataatcagaagggcatgtttccaggggagcagtttaagcctgcccggaggccgtggaccctcctgaacttcctgtcctgggccaccattctcctgtctcccctcttcagttttgtcttgggcgtctttgccagcggatcacctctcctgatcctgactttcttggggtttgtgggagcagcttcctttggagttcgcagactgataggagtaactgagatagaaaaaggctccagctacggaaaccaagagtttaagaaaaaggaataattaatggctgtgactgaacacacgcggccctgacggtggtatccagttaactcaaaaccaacacacagagtgcaggaaaagacaattagaaactatttttcttattaactggtgactaatattaacaaaacttgagccaagagtaaagaattcagaaggcctgtcaggtgaagtcttcagcctcccacagcgcagggtcccagcatctccacgcgcgcccgtgggaggtgggtccggccggagaggcctcccgcggacgccgtctctccagaactccgcttccaagagggagcctttggctgctttctctccttaaacttagatcaaattttttggtttttaatcagttatcttgggaacttaacctggcccctcacctcttctgcaccccccgcccccgaaactgtctcgtaatgaatttctgctgtcctcctgggagtggacggccgggtcccgtcccccgggagcatcgctcggctcagcaccttggctcccagtgggggccccgtggagggcgcccgtagtgataagcacaccggcacgaacgtcaggtccattcctcgaagtcggagccctcactctgccctgtcctggggctggctgagggcgaacgccccacctcactttctagagccctgtctgtcctagctcctatctgaccttgtgtgtaaatacgtacatctgtttttaaagtggatgggcccctgagaactcagtgaaatgcagagttctccatgcacctaaagctcctttgtcgctctcatggctgtcagatcctggtccctccacactgggtgctggggagggaggaccctcggggctaccgcgcgcccccccatcccacagatcaggagccaaggagggagaacagggcagcctgtgggactctaggatgcttcagaagaagcgacggcaccgtcaaccctctgttttttaaaggtggttggagactgttaacactgagctcattgacttctagagattttatttttactggttgatctcttggtggttttcaacttcctgctggaaactagaggtggggcaccccccaccccccagcctcgcactgtgtccttggggaaggcccgcccccatcctggccggtgtcactgtggcccggccacccctgagcgcccagctccctacctcctggacgtctctgagagtccaggcagagcagagggcagcgctcggccggtcatgctggctcccttggccttgcagcgagcccctggcccacgccgagcgagggatgcttctccctacagcatgtccactcccccggcatggccaggtggggcccctggggcaatggcagtggtagaacgctcaacttggttgcggtaccatcagcccacctgcatttggctttcgacttgcttgttctaagtcacagcgccctcatctttttagcaaggtaaaaaaaccaaaatgggtgttatctctgatatcttgaaaccagcgttctgaatagaggtaggttgagttttctaggggaaaacaaatggagaaaagaggcatgaagaaaagtaaaccgagaacataattaggcatcgggcctaagtgtcctggggagattggaggggacggcagcgttctgcatgatggaggcgctgccgggccccgggtctgtgggggccgtgctctcagggcgtgtgcgggacgccacctgtgcacacctgctcagagcacggctcctcgcaggggtgaaggggcagaccaacgaaaccagatgagaccaacgacaccatgcgagacacgcttgcagacactgttgttttggaaatgtgcttccctccatctgaaatctcatccctccacccgcccactcgggcagctgtgccgtgggcagggcatgcgctcccctggctgagcaccccagagattctcctgcaccttcctcatgccgcacgctgctcatccgtctccatgtgtgtttagatccatgccattcactgactcactaacacctgcaaaatctttaaggaaaaaagctgaagggtacgaccatgcacatatgtgacctggaaaatgcaaatttagatcttttatgatttaattattattgtttcccatagaagttccctccctttgaaattaatatataatgtataaattctgcactgagccatggcggagctgggcagcccctaggttagagtggagacggaggcccaggcgcaggggtcacacctcatctggtttccttcccatctcacagcttagcttgtgcttctcaacaccaagtctttaagagcaataaaaactacaccatgaatgtttgaattttttttttttgggggggggagggtggattttgcttttcatccagaaggaaaaggggaggagagctcctttacattttttaaattaaattcataaatcccagaacagtcttttttttttctttttcctttacaccctacttctgagcttaattcagttgatgttatgtccaaattcaggctgagtgctcaggctgaagcaactctgtagcccacagtccgtgctggccactgtcggggtgaggcacattctaggcctggcatcgctgatgccctctgcacccagtccttgagccaggccgaggacaggaagggcattgctggcctgtagctcctgttacccacccagagccaggcgccacactggaggctcccaggcgggagggcccaggcccacccacgggcgtctggccggtcaagctcccagcctgggccgtggtctcctggggacgccgctggcctcccagcttaggcccaggtgccaggtgtcatggggtctcctgcccatcttcccaaggatgccattgctgtcttcatcgtcttcccccgtgtgagacactggttgtctggtactcggcgacagtgtaccagacgcgcaccctatgtgaggtgctttaaggtccctgtcctcaggaagcgcagtctggtggaagagatgagcgctgaacaaatcactaaataacacaaaacaacaatgtaagcagcactttcttgtgtaaaaaaaaaaaaaaagcacgtcctgtcgatgaattttgagtctctctgccttgcctgtcccgactccctttcgcgcaccgtggcatgagaatctttcctcacgctgttcgttgcggtattgctgagcattgatgttgatttgaaggaaaagccgtggttggacccagctgtgtgtttcactcacgtgcaattgagtagctgttgccaggctgtccatgcctgttgtgactaccggttggggtcagatttggggtgaagaatgagtaagtttctgcatgctttgtctctacctgagacacttctacaacaagccaagtataatctctccagccctgcagattttcacctgacttgttcagccccatgcgtagactcccgctgcaggcctctggcctgtggctcactgcatgcagcccctggcgtgcaatactagtgctccacggcgcgatgtgcttctagcccttgcactgcacctaggctcagggttcaaacggccagcccgaaaagcctgcctgccttctttctggaaacagcacgtccccggccgtgtgcctgcccctttctctactgagctagtccccaaaccaaaggcaagccccctcgggcctcgggggatggggccggccacacccctgactccgccctggctctgccccatacccctgccgtggggccgacctgggggatgcagacatccggctccgtattcctgcctatcggggccaggatgcaaaaacaatttttgcgtaaaagatgtcacactgatctgctggagtggggtggacacatgaattcagttttatcatgaacactcgccactggctgcttgttaattcagggataatggtggcattcttacaaactgctcgggaaatagaatgacgggaacacttttagggagcccaggaagttaccagggacattggtgtcgccggcccaggcaacagcagcgtacgcttttcaaagatcattgagttgtcttagaatttgaagctgtgtaatgacaatgtcacctggagttcgtctccatttcttaactttttgttgcacaagtatttggacagaagtcgaactgtgaatgagatactgaaatgcactaaattgtattacattaaactggagttacttgatacaatgaa

SEQ ID NO: 781 - DNA, 427 bp, Homo sapiens
  source 1..427: mol_type = unassigned DNA
ggcgttagcctgtgcctgttacaactcgcttcttgtatccatttctgacacgtgactgatacacctgcctcccatcccctccgcactttgacctcgtaaacaagtgatctgacacaacagggcttgagttacttgcccgaggttgtgtcacggaacggcagggccgcctttaggcttacatccctggaactcccacctccacagacccgtccgggtgctgaaagtccacggatgctatccctggtcaaatcagagccccgcttaggctctcacattgcagaccccacggcagagcccctagtgcttggcactgaagagccagtgcaggcccgttgtcaccatcaaaacccacctctggtatcgccggtggactggtgtttctagatcgcagcgtgggacgtgattggctacatttgactgtttcctt

SEQ ID NO: 782 - DNA, 454 bp, Homo sapiens
  source 1..454: mol_type = unassigned DNA
cggaacggcagggccgcctttaggcttacatccctggaactcccacctccacagacccgtccgggtgctgaaagtccacggatgctatccctggtcaaatcagaggcttgtccagccggaagccctgagggcagctgttcccactggctctgctgaccttgtgccttggacggctgtcctcagcgaggggccgtgcacccgctcctgagcagcgccatgggcctgctggccttcctgaagacccagttcgtgctgcacctgctggtcggctttgtcttcgtggtgagtggtctggtcatcaacttcgtccagctgtgcacgctggcgctctggccggtcagcaagcagctctaccgccgcctcaactgccgcctcgcctactcactctggagccaactggtcatgctgctggagtggtggtcctgcacggagtgtacactgttcacggaccagg

SEQ ID NO: 783 - DNA, 3595 bp, Homo sapiens
  source 1..3595: mol_type = unassigned DNA
tctatgaaaccaacatacatggcgtttgcatcacagttggagtcagatgtgagcccggagggcaggtgtctggcttgtccagccggaagccctgagggcagctgttcccactggctctgctgaccttgtgccttggacggctgtcctcagcgaggggccgtgcacccgctcctgagcagcgccatgggcctgctggccttcctgaagacccagttcgtgctgcacctgctggtcggctttgtcttcgtggtgagtggtctggtcatcaacttcgtccagctgtgcacgctggcgctctggccggtcagcaagcagctctaccgccgcctcaactgccgcctcgcctactcactctggagccaactggtcatgctgctggagtggtggtcctgcacggagtgtacactgttcacggaccaggccacggtagagcgctttgggaaggagcacgcagtcatcatcctcaaccacaacttcgagatcgacttcctctgtgggtggaccatgtgtgagcgcttcggagtgctggggagctccaaggtcctcgctaagaaggagctgctctacgtgcccctcatcggctggacgtggtactttctggagattgtgttctgcaagcggaagtgggaggaggaccgggacaccgtggtcgaagggctgaggcgcctgtcggactaccccgagtacatgtggtttctcctgtactgcgaggggacgcgcttcacggagaccaagcaccgcgttagcatggaggtggcggctgctaaggggcttcctgtcctcaagtaccacctgctgccgcggaccaagggcttcaccaccgcagtcaagtgcctccgggggacagtcgcagctgtctatgatgtaaccctgaacttcagaggaaacaagaacccgtccctgctggggatcctctacgggaagaagtacgaggcggacatgtgcgtgaggagatttcctctggaagacatcccgctggatgaaaaggaagcagctcagtggcttcataaactgtaccaggagaaggacgcgctccaggagatatataatcagaagggcatgtttccaggggagcagtttaagcctgcccggaggccgtggaccctcctgaacttcctgtcctgggccaccattctcctgtctcccctcttcagttttgtcttgggcgtctttgccagcggatcacctctcctgatcctgactttcttggggtttgtgggagcagcttcctttggagttcgcagactgataggagtaactgagatagaaaaaggctccagctacggaaaccaagagtttaagaaaaaggaataattaatggctgtgactgaacacacgcggccctgacggtggtatccagttaactcaaaaccaacacacagagtgcaggaaaagacaattagaaactatttttcttattaactggtgactaatattaacaaaacttgagccaagagtaaagaattcagaaggcctgtcaggtgaagtcttcagcctcccacagcgcagggtcccagcatctccacgcgcgcccgtgggaggtgggtccggccggagaggcctcccgcggacgccgtctctccagaactccgcttccaagagggagcctttggctgctttctctccttaaacttagatcaaattttttggtttttaatcagttatcttgggaacttaacctggcccctcacctcttctgcaccccccgcccccgaaactgtctcgtaatgaatttctgctgtcctcctgggagtggacggccgggtcccgtcccccgggagcatcgctcggctcagcaccttggctcccagtgggggccccgtggagggcgcccgtagtgataagcacaccggcacgaacgtcaggtccattcctcgaagtcggagccctcactctgccctgtcctggggctggctgagggcgaacgccccacctcactttctagagccctgtctgtcctagctcctatctgaccttgtgtgtaaatacgtacatctgtttttaaagtggatgggcccctgagaactcagtgaaatgcagagttctccatgcacctaaagctcctttgtcgctctcatggctgtcagatcctggtccctccacactgggtgctggggagggaggaccctcggggctaccgcgcgcccccccatcccacagatcaggagccaaggagggagaacagggcagcctgtgggactctaggatgcttcagaagaagcgacggcaccgtcaaccctctgttttttaaaggtggttggagactgttaacactgagctcattgacttctagagattttatttttactggttgatctcttggtggttttcaacttcctgctggaaactagaggtggggcaccccccaccccccagcctcgcactgtgtccttggggaaggcccgcccccatcctggccggtgtcactgtggcccggccacccctgagcgcccagctccctacctcctggacgtctctgagagtccaggcagagcagagggcagcgctcggccggtcatgctggctcccttggccttgcagcgagcccctggcccacgccgagcgagggatgcttctccctacagcatgtccactcccccggcatggccaggtggggcccctggggcaatggcagtggtagaacgctcaacttggttgcggtaccatcagcccacctgcatttggctttcgacttgcttgttctaagtcacagcgccctcatctttttagcaaggtaaaaaaaccaaaatgggtgttatctctgatatcttgaaaccagcgttctgaatagaggtaggttgagttttctaggggaaaacaaatggagaaaagaggcatgaagaaaagtaaaccgagaacataattaggcatcgggcctaagtgtcctggggagattggaggggacggcagcgttctgcatgatggaggcgctgccgggccccgggtctgtgggggccgtgctctcagggcgtgtgcgggacgccacctgtgcacacctgctcagagcacggctcctcgcaggggtgaaggggcagaccaacgaaaccagatgagaccaacgacaccatgcgagacacgcttgcagacactgttgttttggaaatgtgcttccctccatctgaaatctcatccctccacccgcccactcgggcagctgtgccgtgggcagggcatgcgctcccctggctgagcaccccagagattctcctgcaccttcctcatgccgcacgctgctcatccgtctccatgtgtgtttagatccatgccattcactgactcactaacacctgcaaaatctttaaggaaaaaagctgaagggtacgaccatgcacatatgtgacctggaaaatgcaaatttagatcttttatgatttaattattattgtttcccatagaagttccctccctttgaaattaatatataatgtataaattctgcactgagccatggcggagctgggcagcccctaggttagagtggagacggaggcccaggcgcaggggtcacacctcatctggtttccttcccatctcacagcttagcttgtgcttctcaacaccaagtctttaagagcaataaaaactacaccatgaa

SEQ ID NO: 784 - DNA, 3589 bp, Homo sapiens
  source 1..3589: mol_type = unassigned DNA
atttggtcacacggcgtctctccagtcctgcgcaagcacgttgacatgtgtgcctttcactttcaggcttgtccagccggaagccctgagggcagctgttcccactggctctgctgaccttgtgccttggacggctgtcctcagcgaggggccgtgcacccgctcctgagcagcgccatgggcctgctggccttcctgaagacccagttcgtgctgcacctgctggtcggctttgtcttcgtggtgagtggtctggtcatcaacttcgtccagctgtgcacgctggcgctctggccggtcagcaagcagctctaccgccgcctcaactgccgcctcgcctactcactctggagccaactggtcatgctgctggagtggtggtcctgcacggagtgtacactgttcacggaccaggccacggtagagcgctttgggaaggagcacgcagtcatcatcctcaaccacaacttcgagatcgacttcctctgtgggtggaccatgtgtgagcgcttcggagtgctggggagctccaaggtcctcgctaagaaggagctgctctacgtgcccctcatcggctggacgtggtactttctggagattgtgttctgcaagcggaagtgggaggaggaccgggacaccgtggtcgaagggctgaggcgcctgtcggactaccccgagtacatgtggtttctcctgtactgcgaggggacgcgcttcacggagaccaagcaccgcgttagcatggaggtggcggctgctaaggggcttcctgtcctcaagtaccacctgctgccgcggaccaagggcttcaccaccgcagtcaagtgcctccgggggacagtcgcagctgtctatgatgtaaccctgaacttcagaggaaacaagaacccgtccctgctggggatcctctacgggaagaagtacgaggcggacatgtgcgtgaggagatttcctctggaagacatcccgctggatgaaaaggaagcagctcagtggcttcataaactgtaccaggagaaggacgcgctccaggagatatataatcagaagggcatgtttccaggggagcagtttaagcctgcccggaggccgtggaccctcctgaacttcctgtcctgggccaccattctcctgtctcccctcttcagttttgtcttgggcgtctttgccagcggatcacctctcctgatcctgactttcttggggtttgtgggagcagcttcctttggagttcgcagactgataggagtaactgagatagaaaaaggctccagctacggaaaccaagagtttaagaaaaaggaataattaatggctgtgactgaacacacgcggccctgacggtggtatccagttaactcaaaaccaacacacagagtgcaggaaaagacaattagaaactatttttcttattaactggtgactaatattaacaaaacttgagccaagagtaaagaattcagaaggcctgtcaggtgaagtcttcagcctcccacagcgcagggtcccagcatctccacgcgcgcccgtgggaggtgggtccggccggagaggcctcccgcggacgccgtctctccagaactccgcttccaagagggagcctttggctgctttctctccttaaacttagatcaaattttttggtttttaatcagttatcttgggaacttaacctggcccctcacctcttctgcaccccccgcccccgaaactgtctcgtaatgaatttctgctgtcctcctgggagtggacggccgggtcccgtcccccgggagcatcgctcggctcagcaccttggctcccagtgggggccccgtggagggcgcccgtagtgataagcacaccggcacgaacgtcaggtccattcctcgaagtcggagccctcactctgccctgtcctggggctggctgagggcgaacgccccacctcactttctagagccctgtctgtcctagctcctatctgaccttgtgtgtaaatacgtacatctgtttttaaagtggatgggcccctgagaactcagtgaaatgcagagttctccatgcacctaaagctcctttgtcgctctcatggctgtcagatcctggtccctccacactgggtgctggggagggaggaccctcggggctaccgcgcgcccccccatcccacagatcaggagccaaggagggagaacagggcagcctgtgggactctaggatgcttcagaagaagcgacggcaccgtcaaccctctgttttttaaaggtggttggagactgttaacactgagctcattgacttctagagattttatttttactggttgatctcttggtggttttcaacttcctgctggaaactagaggtggggcaccccccaccccccagcctcgcactgtgtccttggggaaggcccgcccccatcctggccggtgtcactgtggcccggccacccctgagcgcccagctccctacctcctggacgtctctgagagtccaggcagagcagagggcagcgctcggccggtcatgctggctcccttggccttgcagcgagcccctggcccacgccgagcgagggatgcttctccctacagcatgtccactcccccggcatggccaggtggggcccctggggcaatggcagtggtagaacgctcaacttggttgcggtaccatcagcccacctgcatttggctttcgacttgcttgttctaagtcacagcgccctcatctttttagcaaggtaaaaaaaccaaaatgggtgttatctctgatatcttgaaaccagcgttctgaatagaggtaggttgagttttctaggggaaaacaaatggagaaaagaggcatgaagaaaagtaaaccgagaacataattaggcatcgggcctaagtgtcctggggagattggaggggacggcagcgttctgcatgatggaggcgctgccgggccccgggtctgtgggggccgtgctctcagggcgtgtgcgggacgccacctgtgcacacctgctcagagcacggctcctcgcaggggtgaaggggcagaccaacgaaaccagatgagaccaacgacaccatgcgagacacgcttgcagacactgttgttttggaaatgtgcttccctccatctgaaatctcatccctccacccgcccactcgggcagctgtgccgtgggcagggcatgcgctcccctggctgagcaccccagagattctcctgcaccttcctcatgccgcacgctgctcatccgtctccatgtgtgtttagatccatgccattcactgactcactaacacctgcaaaatctttaaggaaaaaagctgaagggtacgaccatgcacatatgtgacctggaaaatgcaaatttagatcttttatgatttaattattattgtttcccatagaagttccctccctttgaaattaatatataatgtataaattctgcactgagccatggcggagctgggcagcccctaggttagagtggagacggaggcccaggcgcaggggtcacacctcatctggtttccttcccatctcacagcttagcttgtgcttctcaacaccaagtctttaagagcaataaaaactacaccatgaa

SEQ ID NO: 785 - DNA, 582 bp, Homo sapiens
  source 1..582: mol_type = unassigned DNA
atatgtctgacagccttgtgtgcttatttcttgcccgcgtgttctgtctcgggttggaagggacacgcacgtctcctgccttcacatgctgagatgggtttctgtagcatccccagaatttctgctgaatgaagtgtgtcgggttatttggacggctgtcctcagcgaggggccgtgcacccgctcctgagcagcgccatgggcctgctggccttcctgaagacccagttcgtgctgcacctgctggtcggctttgtcttcgtggtgagtggtctggtcatcaacttcgtccagctgtgcacgctggcgctctggccggtcagcaagcagctctaccgccgcctcaactgccgcctcgcctactcactctggagccaactggtcatgctgctggagtggtggtcctgcacggagtgtacactgttcacggaccaggccacggtagagcgctttgggaaggagcacgcagtcatcatcctcaaccacaacttcgagatcgacttcctctgtgggtggaccatgtgtgagcgcttcggagtgctggggagctccaaggtcctcgctaagaaggagctgctctac

SEQ ID NO: 786 - DNA, 5767 bp, Homo sapiens
  source 1..5767: mol_type = unassigned DNA
cgccgacacatggtcgttcgacttctggcttggcctcttttgtgagtgtggggcctggtcatatcctcttggtcagtgtctctgtgatgatgagaacgggaagacggccacggtgcccaccctggcaggactctctcccctcgctggcgctggctcagctgccgtgagcggccgtaggcactgtcccgggccctcctgtggttgctcccagccatgctgctggctgcttctgccgtcctggcttgcagagactctgggtcatgcggggaagagggcagagtcctcctccctgctcaggcaagagaggatccagcaagatttcttcctccccaccctcctgcccctcccagtctgggcagcagataaaagccagggccccacacttctgccacctcctgctgctcacacactccagccagggacctgcccccggggtccaacaaggacggctgtcctcagcgaggggccgtgcacccgctcctgagcagcgccatgggcctgctggccttcctgaagacccagttcgtgctgcacctgctggtcggctttgtcttcgtggtgagtggtctggtcatcaacttcgtccagctgtgcacgctggcgctctggccggtcagcaagcagctctaccgccgcctcaactgccgcctcgcctactcactctggagccaactggtcatgctgctggagtggtggtcctgcacggagtgtacactgttcacggaccaggccacggtagagcgctttgggaaggagcacgcagtcatcatcctcaaccacaacttcgagatcgacttcctctgtgggtggaccatgtgtgagcgcttcggagtgctggggagctccaaggtcctcgctaagaaggagctgctctacgtgcccctcatcggctggacgtggtactttctggagattgtgttctgcaagcggaagtgggaggaggaccgggacaccgtggtcgaagggctgaggcgcctgtcggactaccccgagtacatgtggtttctcctgtactgcgaggggacgcgcttcacggagaccaagcaccgcgttagcatggaggtggcggctgctaaggggcttcctgtcctcaagtaccacctgctgccgcggaccaagggcttcaccaccgcagtcaagtgcctccgggggacagtcgcagctgtctatgatgtaaccctgaacttcagaggaaacaagaacccgtccctgctggggatcctctacgggaagaagtacgaggcggacatgtgcgtgaggagatttcctctggaagacatcccgctggatgaaaaggaagcagctcagtggcttcataaactgtaccaggagaaggacgcgctccaggagatatataatcagaagggcatgtttccaggggagcagtttaagcctgcccggaggccgtggaccctcctgaacttcctgtcctgggccaccattctcctgtctcccctcttcagttttgtcttgggcgtctttgccagcggatcacctctcctgatcctgactttcttggggtttgtgggagcagcttcctttggagttcgcagactgataggagtaactgagatagaaaaaggctccagctacggaaaccaagagtttaagaaaaaggaataattaatggctgtgactgaacacacgcggccctgacggtggtatccagttaactcaaaaccaacacacagagtgcaggaaaagacaattagaaactatttttcttattaactggtgactaatattaacaaaacttgagccaagagtaaagaattcagaaggcctgtcaggtgaagtcttcagcctcccacagcgcagggtcccagcatctccacgcgcgcccgtgggaggtgggtccggccggagaggcctcccgcggacgccgtctctccagaactccgcttccaagagggagcctttggctgctttctctccttaaacttagatcaaattttttggtttttaatcagttatcttgggaacttaacctggcccctcacctcttctgcaccccccgcccccgaaactgtctcgtaatgaatttctgctgtcctcctgggagtggacggccgggtcccgtcccccgggagcatcgctcggctcagcaccttggctcccagtgggggccccgtggagggcgcccgtagtgataagcacaccggcacgaacgtcaggtccattcctcgaagtcggagccctcactctgccctgtcctggggctggctgagggcgaacgccccacctcactttctagagccctgtctgtcctagctcctatctgaccttgtgtgtaaatacgtacatctgtttttaaagtggatgggcccctgagaactcagtgaaatgcagagttctccatgcacctaaagctcctttgtcgctctcatggctgtcagatcctggtccctccacactgggtgctggggagggaggaccctcggggctaccgcgcgcccccccatcccacagatcaggagccaaggagggagaacagggcagcctgtgggactctaggatgcttcagaagaagcgacggcaccgtcaaccctctgttttttaaaggtggttggagactgttaacactgagctcattgacttctagagattttatttttactggttgatctcttggtggttttcaacttcctgctggaaactagaggtggggcaccccccaccccccagcctcgcactgtgtccttggggaaggcccgcccccatcctggccggtgtcactgtggcccggccacccctgagcgcccagctccctacctcctggacgtctctgagagtccaggcagagcagagggcagcgctcggccggtcatgctggctcccttggccttgcagcgagcccctggcccacgccgagcgagggatgcttctccctacagcatgtccactcccccggcatggccaggtggggcccctggggcaatggcagtggtagaacgctcaacttggttgcggtaccatcagcccacctgcatttggctttcgacttgcttgttctaagtcacagcgccctcatctttttagcaaggtaaaaaaaccaaaatgggtgttatctctgatatcttgaaaccagcgttctgaatagaggtaggttgagttttctaggggaaaacaaatggagaaaagaggcatgaagaaaagtaaaccgagaacataattaggcatcgggcctaagtgtcctggggagattggaggggacggcagcgttctgcatgatggaggcgctgccgggccccgggtctgtgggggccgtgctctcagggcgtgtgcgggacgccacctgtgcacacctgctcagagcacggctcctcgcaggggtgaaggggcagaccaacgaaaccagatgagaccaacgacaccatgcgagacacgcttgcagacactgttgttttggaaatgtgcttccctccatctgaaatctcatccctccacccgcccactcgggcagctgtgccgtgggcagggcatgcgctcccctggctgagcaccccagagattctcctgcaccttcctcatgccgcacgctgctcatccgtctccatgtgtgtttagatccatgccattcactgactcactaacacctgcaaaatctttaaggaaaaaagctgaagggtacgaccatgcacatatgtgacctggaaaatgcaaatttagatcttttatgatttaattattattgtttcccatagaagttccctccctttgaaattaatatataatgtataaattctgcactgagccatggcggagctgggcagcccctaggttagagtggagacggaggcccaggcgcaggggtcacacctcatctggtttccttcccatctcacagcttagcttgtgcttctcaacaccaagtctttaagagcaataaaaactacaccatgaatgtttgaattttttttttttgggggggggagggtggattttgcttttcatccagaaggaaaaggggaggagagctcctttacattttttaaattaaattcataaatcccagaacagtcttttttttttctttttcctttacaccctacttctgagcttaattcagttgatgttatgtccaaattcaggctgagtgctcaggctgaagcaactctgtagcccacagtccgtgctggccactgtcggggtgaggcacattctaggcctggcatcgctgatgccctctgcacccagtccttgagccaggccgaggacaggaagggcattgctggcctgtagctcctgttacccacccagagccaggcgccacactggaggctcccaggcgggagggcccaggcccacccacgggcgtctggccggtcaagctcccagcctgggccgtggtctcctggggacgccgctggcctcccagcttaggcccaggtgccaggtgtcatggggtctcctgcccatcttcccaaggatgccattgctgtcttcatcgtcttcccccgtgtgagacactggttgtctggtactcggcgacagtgtaccagacgcgcaccctatgtgaggtgctttaaggtccctgtcctcaggaagcgcagtctggtggaagagatgagcgctgaacaaatcactaaataacacaaaacaacaatgtaagcagcactttcttgtgtaaaaaaaaaaaaaaagcacgtcctgtcgatgaattttgagtctctctgccttgcctgtcccgactccctttcgcgcaccgtggcatgagaatctttcctcacgctgttcgttgcggtattgctgagcattgatgttgatttgaaggaaaagccgtggttggacccagctgtgtgtttcactcacgtgcaattgagtagctgttgccaggctgtccatgcctgttgtgactaccggttggggtcagatttggggtgaagaatgagtaagtttctgcatgctttgtctctacctgagacacttctacaacaagccaagtataatctctccagccctgcagattttcacctgacttgttcagccccatgcgtagactcccgctgcaggcctctggcctgtggctcactgcatgcagcccctggcgtgcaatactagtgctccacggcgcgatgtgcttctagcccttgcactgcacctaggctcagggttcaaacggccagcccgaaaagcctgcctgccttctttctggaaacagcacgtccccggccgtgtgcctgcccctttctctactgagctagtccccaaaccaaaggcaagccccctcgggcctcgggggatggggccggccacacccctgactccgccctggctctgccccatacccctgccgtggggccgacctgggggatgcagacatccggctccgtattcctgcctatcggggccaggatgcaaaaacaatttttgcgtaaaagatgtcacactgatctgctggagtggggtggacacatgaattcagttttatcatgaacactcgccactggctgcttgttaattcagggataatggtggcattcttacaaactgctcgggaaatagaatgacgggaacacttttagggagcccaggaagttaccagggacattggtgtcgccggcccaggcaacagcagcgtacgcttttcaaagatcattgagttgtcttagaatttgaagctgtgtaatgacaatgtcacctggagttcgtctccatttcttaactttttgttgcacaagtatttggacagaagtcgaactgtgaatgagatactgaaatgcactaaattgtattacattaaactggagttacttgatacaatgaa

SEQ ID NO: 787 - DNA, 4338 bp, Homo sapiens
  source 1..4338: mol_type = unassigned DNA
attgtgcagtcatcaggccctgggagctttccacatccctccacctcccacccaacatcaccactctccggccagtgagaccatcacagcaccccagaggagacaaattctggagctcagagagctgggtggctcctgcaccttcagacactgcctcctcaccgagggagggaagaacgacaaaggacctccaggacgtagaggttgatgatccgggcaggtggccttcagcgagggagcacgtcaaaaggctgtgggccgtgcagacagctgggggacaccgtcccgggtgtgaccttgggccacacggcagggtggtggacttgctcctagaattgggctccagggctgaagccagcccctctgatctggcactggccggctccattcaccctttttggggcttactgccgcagagacttcctttgaggagagctggacccaagacgccagagttccgggggcactgagtgctgtgtggcacccgggccaggagaaacatgtgccagagggcaggcgtgggctctccggggagtctctgcgtagactttctagcccagaggttcaggtgatggaccagagactggccgctttgtgacaccgaggacggttgataaagtggattctcgaggggaagctgcatccacacagaggctgggacgtgaatgtgcatcacggctctatctgtggcccccaaaggctgggtgccagctgcctgtcggcagggagcgtatcaccgtggcacgtccatgccgtgggggtcactcagcagccacggatgcgccctgggtgctgtcccggggccgtctcagaagcaccgcgctggaccggctgggccagatgccatgggattctgtgtttgtgaacctctagaaaaggacggctgtcctcagcgaggggccgtgcacccgctcctgagcagcgccatgggcctgctggccttcctgaagacccagttcgtgctgcacctgctggtcggctttgtcttcgtggtgagtggtctggtcatcaacttcgtccagctgtgcacgctggcgctctggccggtcagcaagcagctctaccgccgcctcaactgccgcctcgcctactcactctggagccaactggtcatgctgctggagtggtggtcctgcacggagtgtacactgttcacggaccaggccacggtagagcgctttgggaaggagcacgcagtcatcatcctcaaccacaacttcgagatcgacttcctctgtgggtggaccatgtgtgagcgcttcggagtgctggggagctccaaggtcctcgctaagaaggagctgctctacgtgcccctcatcggctggacgtggtactttctggagattgtgttctgcaagcggaagtgggaggaggaccgggacaccgtggtcgaagggctgaggcgcctgtcggactaccccgagtacatgtggtttctcctgtactgcgaggggacgcgcttcacggagaccaagcaccgcgttagcatggaggtggcggctgctaaggggcttcctgtcctcaagtaccacctgctgccgcggaccaagggcttcaccaccgcagtcaagtgcctccgggggacagtcgcagctgtctatgatgtaaccctgaacttcagaggaaacaagaacccgtccctgctggggatcctctacgggaagaagtacgaggcggacatgtgcgtgaggagatttcctctggaagacatcccgctggatgaaaaggaagcagctcagtggcttcataaactgtaccaggagaaggacgcgctccaggagatatataatcagaagggcatgtttccaggggagcagtttaagcctgcccggaggccgtggaccctcctgaacttcctgtcctgggccaccattctcctgtctcccctcttcagttttgtcttgggcgtctttgccagcggatcacctctcctgatcctgactttcttggggtttgtgggagcagcttcctttggagttcgcagactgataggagtaactgagatagaaaaaggctccagctacggaaaccaagagtttaagaaaaaggaataattaatggctgtgactgaacacacgcggccctgacggtggtatccagttaactcaaaaccaacacacagagtgcaggaaaagacaattagaaactatttttcttattaactggtgactaatattaacaaaacttgagccaagagtaaagaattcagaaggcctgtcaggtgaagtcttcagcctcccacagcgcagggtcccagcatctccacgcgcgcccgtgggaggtgggtccggccggagaggcctcccgcggacgccgtctctccagaactccgcttccaagagggagcctttggctgctttctctccttaaacttagatcaaattttttggtttttaatcagttatcttgggaacttaacctggcccctcacctcttctgcaccccccgcccccgaaactgtctcgtaatgaatttctgctgtcctcctgggagtggacggccgggtcccgtcccccgggagcatcgctcggctcagcaccttggctcccagtgggggccccgtggagggcgcccgtagtgataagcacaccggcacgaacgtcaggtccattcctcgaagtcggagccctcactctgccctgtcctggggctggctgagggcgaacgccccacctcactttctagagccctgtctgtcctagctcctatctgaccttgtgtgtaaatacgtacatctgtttttaaagtggatgggcccctgagaactcagtgaaatgcagagttctccatgcacctaaagctcctttgtcgctctcatggctgtcagatcctggtccctccacactgggtgctggggagggaggaccctcggggctaccgcgcgcccccccatcccacagatcaggagccaaggagggagaacagggcagcctgtgggactctaggatgcttcagaagaagcgacggcaccgtcaaccctctgttttttaaaggtggttggagactgttaacactgagctcattgacttctagagattttatttttactggttgatctcttggtggttttcaacttcctgctggaaactagaggtggggcaccccccaccccccagcctcgcactgtgtccttggggaaggcccgcccccatcctggccggtgtcactgtggcccggccacccctgagcgcccagctccctacctcctggacgtctctgagagtccaggcagagcagagggcagcgctcggccggtcatgctggctcccttggccttgcagcgagcccctggcccacgccgagcgagggatgcttctccctacagcatgtccactcccccggcatggccaggtggggcccctggggcaatggcagtggtagaacgctcaacttggttgcggtaccatcagcccacctgcatttggctttcgacttgcttgttctaagtcacagcgccctcatctttttagcaaggtaaaaaaaccaaaatgggtgttatctctgatatcttgaaaccagcgttctgaatagaggtaggttgagttttctaggggaaaacaaatggagaaaagaggcatgaagaaaagtaaaccgagaacataattaggcatcgggcctaagtgtcctggggagattggaggggacggcagcgttctgcatgatggaggcgctgccgggccccgggtctgtgggggccgtgctctcagggcgtgtgcgggacgccacctgtgcacacctgctcagagcacggctcctcgcaggggtgaaggggcagaccaacgaaaccagatgagaccaacgacaccatgcgagacacgcttgcagacactgttgttttggaaatgtgcttccctccatctgaaatctcatccctccacccgcccactcgggcagctgtgccgtgggcagggcatgcgctcccctggctgagcaccccagagattctcctgcaccttcctcatgccgcacgctgctcatccgtctccatgtgtgtttagatccatgccattcactgactcactaacacctgcaaaatctttaaggaaaaaagctgaagggtacgaccatgcacatatgtgacctggaaaatgcaaatttagatcttttatgatttaattattattgtttcccatagaagttccctccctttgaaattaatatataatgtataaattctgcactgagccatggcggagctgggcagcccctaggttagagtggagacggaggcccaggcgcaggggtcacacctcatctggtttccttcccatctcacagcttagcttgtgcttctcaacaccaagtctttaagagcaataaaaactacaccatgaa

SEQ ID NO: 788 - DNA, 924 bp, Homo sapiens
  source 1..924: mol_type = unassigned DNA
tgggagctttccacatccctccacctcccacccaacatcaccactctccggccagtgagaccatcacagcaccccagaggagacaaattctggagctcagagagctggggacggctgtcctcagcgaggggccgtgcacccgctcctgagcagcgccatgggcctgctggccttcctgaagacccagttcgtgctgcacctgctggtcggctttgtcttcgtggtgagtggtctggtcatcaacttcgtccagctgtgcacgctggcgctctggccggtcagcaagcagctctaccgccgcctcaactgccgcctcgcctactcactctggagccaactggtcatgctgctggagtggtggtcctgcacggagtgtacactgttcacggaccaggccacggtagagcgctttgggaaggagcacgcagtcatcatcctcaaccacaacttcgagatcgacttcctctgtgggtggaccatgtgtgagcgcttcggagtgctggggagctccaaggtcctcgctaagaaggagctgctctacgtgcccctcatcggctggacgtggtactttctggagattgtgttctgcaagcggaagtgggaggaggaccgggacaccgtggtcgaagggctgaggcgcctgtcggactaccccgagtacatgtggtttctcctgtactgcgaggggacgcgcttcacggagaccaagcaccgcgttagcatggaggtggcggctgctaaggggcttcctgtcctcaagtaccacctgctgccgcggaccaagggcttcaccaccgcagtcaagtgcctccgggggacagtcgcagctgtctatgatgtaaccctgaacttcagaggaaacaagaacccgtccctgctggggatcctctacgggaagaagtacgaggcggacatgtgcgtgag

SEQ ID NO: 789 - DNA, 392 bp, Homo sapiens
  source 1..392: mol_type = unassigned DNA
gagaccatcacagcaccccagaggagacaaattctggagctcagagagctgggagggcagctgctggtgtgacctcagctgctccccagaccctaaggggatctgggaccttccaccttctaccaacggtgttggtcttctgtcctcacgcctatggtttcacgctcccacagtggctcctgcaccttcagacactgcctcctcaccgagggagggaagaacgacaaaggacggctgtcctcagcgaggggccgtgcacccgctcctgagcagcgccatgggcctgctggccttcctgaagacccagttcgtgctgcacctgctggtcggctttgtcttcgtggtgagtggtctggtcatcaacttcgtccagctgtgcacgctggcgctct

SEQ ID NO: 790 - DNA, 791 bp, Homo sapiens
  source 1..791: mol_type = unassigned DNA
ccatcacagcaccccagaggagacaaattctggagctcagagagctgggagggcagctgctggtgtgacctcagctgctccccagaccctaaggggatctgggaccttccaccttctaccaacggtgttggtcttctgtcctcacgcctatggtttcacgctcccacagtggctcctgcaccttcagacactgcctcctcaccgagggagggaagaacgacaaaggtgatgaccagaggacctccaggacgtagaggttgatgatccgggcaggtggccttcagcgagggagcacgtcaaaaggctgtgggccgtgcagacagctgggggacaccgtcccgggtgtgaccttgggccacacggcagggtggtggacttgctcctagaattgggctccagggctgaagccagcccctctgatctggcactggccggctccattcaccctttttggggcttactgccgcagagacttcctttgaggagagctggacccaagacgccagagttccgggggcactgagtgctgtgtggcacccgggccaggagaaacatgtgccagagggcaggcgtgggctctccggggagtctctgcgtagactttctagcccagaggttcaggtgatggaccagagactggccgctttgtgacaccgaggacggttgataaagtggattctcgaggggaagctgcatccacacagaggctgggacgtgaatgtgcatcacggctctatctgtggcccccaaaggctgggtgccagctgcctgtcggcagggagcgtatcacc

SEQ ID NO: 791 - DNA, 1003 bp, Homo sapiens
  source 1..1003: mol_type = unassigned DNA
tcctgggctcgtttctgccccaggtagtgctgtcagcggcatgcctgccttctgcaagcccctcttccctgttccccagcccgcacttccaatgagctgtgggccaggaaaccagcccgtcacacttgtccacgctgcgtttaaagcgggaggaaggaggacccaatgcagggcccgaaaggtccactgacggctgtcctcagcgaggggccgtgcacccgctcctgagcagcgccatgggcctgctggccttcctgaagacccagttcgtgctgcacctgctggtcggctttgtcttcgtggtgagtggtctggtcatcaacttcgtccagctgtgcacgctggcgctctggccggtcagcaagcagctctaccgccgcctcaactgccgcctcgcctactcactctggagccaactggtcatgctgctggagtggtggtcctgcacggagtgtacactgttcacggaccaggccacggtagagcgctttgggaaggagcacgcagtcatcatcctcaaccacaacttcgagatcgacttcctctgtgggtggaccatgtgtgagcgcttcggagtgctggggagctccaaggtcctcgctaagaaggagctgctctacgtgcccctcatcggctggacgtggtactttctggagattgtgttctgcaagcggaagtgggaggaggaccgggacaccgtggtcgaagggctgaggcgcctgtcggactaccccgagtacatgtggtttctcctgtactgcgaggggacgcgcttcacggagaccaagcaccgcgttagcatggaggtggcggctgctaaggggcttcctgtcctcaagtaccacctgctgccgcggaccaagggcttcaccaccgcagtcaagtgcctccgggggacagtcgcagctgtctatgatgtaaccctgaacttcagaggaaacaagaacccgtccctgctggggatcctctacgggaagaagtacgaggcggacatgtgcgtgag

SEQ ID NO: 792 - DNA, 773 bp, Homo sapiens
  source 1..773: mol_type = unassigned DNA
gtgctgtcagcggcatgcctgccttctgcaagcccctcttccctgttccccagcccgcacttccaatgagctgtgggccaggaaaccagcccgtcacacttgtccacgctgcgtttaaagcgggaggaaggaggacccaatgcagggcccgaaaggtccactgacctccaggacgtagaggttgatgatccgggcaggtggccttcagcgagggagcacgtcaaaaggctgtgggccgtgcagacagctgggggacaccgtcccgggtgtgaccttgggccacacggcagggtggtggacttgctcctagaattgggctccagggctgaagccagcccctctgatctggcactggccggctccattcaccctttttggggcttactgccgcagagacttcctttgaggagagctggacccaagacgccagagttccgggggcactgagtgctgtgtggcacccgggccaggagaaacatgtgccagagggcaggcgtgggctctccggggagtctctgcgtagactttctagcccagaggttcaggtgatggaccagagactggccgctttgtgacaccgaggacggttgataaagtggattctcgaggggaagctgcatccacacagaggctgggacgtgaatgtgcatcacggctctatctgtggcccccaaaggctgggtgccagctgcctgtcggcagggagcgtatcaccgtggcacgtccatgccgtgggggtcactcagcagccacggatgcgccctgggtgctgt

SEQ ID NO: 793 - DNA, 1510 bp, Homo sapiens
  source 1..1510: mol_type = unassigned DNA
cacgctggcgctctggccggtcagcaagcagctctaccgccgcctcaactgccgcctcgcctactcactctggagcctagcacaaaactagaagcaacccaagcacctgtcactggagactaattatgcggcacccatacagggaccctctgcggccatcatggagagccttcatcttgcccgtacagttttaagcgaaaaaggaagtatacaacaaagtccataaactggtcatgctgctggagtggtggtcctgcacggagtgtacactgttcacggaccaggccacggtagagcgctttgggaaggagcacgcagtcatcatcctcaaccacaacttcgagatcgacttcctctgtgggtggaccatgtgtgagcgcttcggagtgctggggagctccaaggtcctcgctaagaaggagctgctctacgtgcccctcatcggctggacgtggtactttctggagattgtgttctgcaagcggaagtgggaggaggaccgggacaccgtggtcgaagggctgaggcgcctgtcggactaccccgagtacatgtggtttctcctgtactgcgaggggacgcgcttcacggagaccaagcaccgcgttagcatggaggtggcggctgctaaggggcttcctgtcctcaagtaccacctgctgccgcggaccaagggcttcaccaccgcagtcaagtgcctccgggggacagtcgcagctgtctatgatgtaaccctgaacttcagaggaaacaagaacccgtccctgctggggatcctctacgggaagaagtacgaggcggacatgtgcgtgaggagatttcctctggaagacatcccgctggatgaaaaggaagcagctcagtggcttcataaactgtaccaggagaaggacgcgctccaggagatatataatcagaagggcatgtttccaggggagcagtttaagcctgcccggaggccgtggaccctcctgaacttcctgtcctgggccaccattctcctgtctcccctcttcagttttgtcttgggcgtctttgccagcggatcacctctcctgatcctgactttcttggggtttgtgggagcagcttcctttggagttcgcagactgataggagtaactgagatagaaaaaggctccagctacggaaaccaagagtttaagaaaaaggaataattaatggctgtgactgaacacacgcggccctgacggtggtatccagttaactcaaaaccaacacacagagtgcaggaaaagacaattagaaactatttttcttattaactggtgactaatattaacaaaacttgagccaagagtaaagaattcagaaggcctgtcaggtgaagtcttcagcctcccacagcgcagggtcccagcatctccacgcgcgcccgtgggaggtgggtccggccggagaggcctcccgcggacgccgtctctccagaactccgcttccaagagggagcctttggctgctttctctccttaaacttagatcaaatttt

SEQ ID NO: 794 - DNA, 616 bp, Homo sapiens
  source 1..616: mol_type = unassigned DNA
ggcgctctggccggtcagcaagcagctctaccgccgcctcaactgccgcctcgcctactcactctggagcctagcacaaaactagaagcaacccaagcacctgtcactggagactaattatgcggcacccatacagggaccctctgcggccatcatggagagccttcatcttgcccgtacagttttaagcgaaaaaggaagtatacaacaaagtccatagtgtctcctgtgggcgctccctgaccatcccaggaggaggggtcctaccagtgccaacgccctccccctgtccgcagaactggtcatgctgctggagtggtggtcctgcacggagtgtacactgttcacggaccaggccacggtagagcgctttgggaaggagcacgcagtcatcatcctcaaccacaacttcgagatcgacttcctctgtgggtggaccatgtgtgagcgcttcggagtgctggggagctccaaggtcctcgctaagaaggagctgctctacgtgcccctcatcggctggacgtggtactttctggagattgtgttctgcaagcggaagtgggaggaggaccgggacaccgtggtcgaagggctgaggcgcctgtcggactacccc

SEQ ID NO: 795 - DNA, 3955 bp, Homo sapiens
  source 1..3955: mol_type = unassigned DNA
ttatgtttgtttgtttttgagacagggtcttgctctgtcgcccaggctggagtgcagtggtgtgatcttggctcactgcaatctctgcctcctgggctcaagcagtcctcctacctcagcctccttgagtagctgagaccacaggtgtgcaccatcatgcccagctaatttttgtattttttgtagagacagggttttgccatgttgcccagactggtctccaactcctaggctcatgtgatcctcctgcctcagcctgctgggctgctgggattacaggctgagccaccgcaccagccacagtgttttctgatgaccctgaaccacggttttattttcaattcttcattcctgttctcattccttaatgctgggtgccttcttgctgcccattttgaactcactgccagtgtgtctctgctgtcatctgatgtgcagagctataggtgctgcggcgaagggtgcaggtttggagccgtttaaacaacctggcccagcctcctcactccctgctgaccttggtcaaggcttcagtctctaaacctcagctttctcatctgcagagcacagacaaaaccacctgcctttgagctgtcttataaagcctaaatcaatgcgcacagcaggtacacagcaatgcttgataaattgttactattattgggtgaattttaggttttttttgttgttgttgttgttttgagacagagtctctctgttgtcctggctggagcacagcagtgcgatcttggctcactgcaacctccatcttctgaggttcaagtgattctcgtgccccagcctcccaagtagctgggattacaggtgcctgccaccacatccagctaattttttttatttttaagtagagatgggcttttgccatgcttccccagctggtcttgaactcctggcctcaagtgatcctcctgtctcggcctcccaaagtgctgggattacaggcttgagccaccgcacccgtccagaattttagatttttttaaatccgtggttgaaaaataggctatggctggcttactcattgtgctttagggaagcatgtatttgagtgaaggaaatgataaaaggaatttcatatcgggcccaggcgccgcccaccctgcaagacagtttacagatgcctgccctgacagctgtctgcagttagccagcgtcagccgaggggtcctgagatccgctgaaggctgcctttgcatgccgacagcaagggaaaagtgccacatgtccctgggcttgccacaggtgacctttggatgggaccattctccagacagcgcagctcgtctttccagaacactcatggggagtgtgcctgtgtctggctggctgtgtgggctcccattcagttcattccccttctccagcctttaggcatgaccctaaaggcagaggtctcaagcacttgccaggggtgagccagcggtgggggcgcccctgccagggcaggcctgctgtgggggcttggtcagcgagtcttctccccacacgcaggatttcctcccgtccactgcctctgcccacaggtgacctttctcttttaaaggaattggggtcccttggtacccccacaaaccctgagttccctctctcctttctgcgtcctttctgctcgcctgcatgtgcctgcagcatcatgaccgctgggaagacacttccctgcacctgcacgctgtctgcaggcgtctctggccatcctgggctgagctgcgtgatctcgggtagcggccctttgttcacccgtgcaggatgtctttggaattggtctctagtgtcctttataaataactggtataaaagaaccccgggcaatggccttgcagaaagcccacacttcagagctgggctggtgtccagcgcgagaagcctgaggccgtcctgagctggaagccgcgtcctggttctgtggggccatccttcccggacaactggctggggggcacaagactctggtggccgacaagaggcccacctgcttggcctccctcttgtccttccccacatggccctctgaacaggactaactccctctgaggcccacgtgtgacaaagatgcaccgttctcaccacggaactcttcagccctgcagttctcccgaaggtgaatgagggcatcccagagtccccatcaggagacagacgatgctgcgttcccagcagccccagagccctcccaggcgtgcaggtctcctgccggcaaacagatctcccggcacgagcccctccacacttctgggaagagtgtcttcagctcaccaggccggagccaggggaagagaccaagggaggaggctccaagaacccctgggtgggggggacaagcactcaaagccaggactggcacccctcacatgccagcacccacggggtcaggtgtgccctgctgtctctggggaccccgcaggcctctggccacctgcccagcagcaagccccgtcgagcacccccagccggccttcctgggggcgggctaggcctcacatggcttttttttaaatatggaaaaccagtgtaaccccaaagcaagttttaggagaaaatataattcctattactctgtcgtctataattccattctgctcttaactcttcattttttcccactgtctgttctgcagacatacgatggttgttttctgcttcctaatcatctagtgacatttttcatcttctgcacctctcacggggcgtggctgtgcggtactcggccacaccaaggtgcacgtgagaagcgtaattgggcgtaaagatcagcgtctccatgcagagtggcggttctctccctttctgctgctaccttccatctgtctcctcccaactgttgcttagagaaagttattgtaatttcataaaacgtactcagtgtaagtcatcaaaactcatgtttagcagagacttcctctctggacaaaaatactgtaggtgtctcctgtgggcgctccctgaccatcccaggaggaggggtcctaccagtgccaacgccctccccctgtccgcagaactggtcatgctgctggagtggtggtcctgcacggagtgtacactgttcacggaccaggccacggtagagcgctttgggaaggagcacgcagtcatcatcctcaaccacaacttcgagatcgacttcctctgtgggtggaccatgtgtgagcgcttcggagtgctggggagctccaaggtcctcgctaagaaggagctgctctacgtgcccctcatcggctggacgtggtactttctggagattgtgttctgcaagcggaagtgggaggaggaccgggacaccgtggtcgaagggctgaggcgcctgtcggactaccccgagtacatgtggtttctcctgtactgcgaggggacgcgcttcacggagaccaagcaccgcgttagcatggaggtggcggctgctaaggggcttcctgtcctcaagtaccacctgctgccgcggaccaagggcttcaccaccgcagtcaagtgcctccgggggacagtcgcagctgtctatgatgtaaccctgaacttcagaggaaacaagaacccgtccctgctggggatcctctacgggaagaagtacgaggcggacatgtgcgtgaggagatttcctctggaagacatcccgctggatgaaaaggaagcagctcagtggcttcataaactgtaccaggagaaggacgcgctccaggagatatataatcagaagggcatgtttccaggggagcagtttaagcctgcccggaggccgtggaccctcctgaacttcctgtcctgggccaccattctcctgtctcccctcttcagttttgtcttgggcgtctttgccagcggatcacctctcctgatcctgactttcttggggtttgtgggagcagcttcctttggagttcgcagactgataggagtaactgagatagaaaaaggctccagctacggaaaccaagagttt

SEQ ID NO: 796 - DNA, 588 bp, Homo sapiens
  source 1..588: mol_type = unassigned DNA
atgtaaccctgaacttcagaggaaacaagaacccgtccctgctggggatcctctacgggaagaagtacgaggcggacatgtgcgtgaggagatttcctctggaagacatcccgctggatgaaaaggaagcagctcagtggcttcataaactgtaccaggagaaggacgcgctccaggagatatataatcagaagggcatgtttccaggggagcagtttaagcctgcccggaggccgtggaccctcctgaacttcctgtcctgggccaccattctcctgtctcccctcttcagttttgtcttgggcgtctttgccagcggatcacctctcctgatcctgactttcttggggtttgtgggagcaggtaatggacactgtcgctaacagctcacactctgacgggcctcacagtatcagccacagggtccgggacctggtgactcatcacagtggctgtgggaggcaggggcctggctgttatggaccctggagccaggatccccccacggcctgcgggcctcagagcctggattcttgcactgagctgagggtcgcctccccagagagccgaacggccgccacctggcgc

SEQ ID NO: 797 - DNA, 2199 bp, Homo sapiens
  source 1..2199: mol_type = unassigned DNA
aggacctccaggacgtagaggttgatgatccgggcaggtggccttcagcgagggagcacgtcaaaaggctgtgggccgtgcagacagctgggggacaccgtcccgggtgtgaccttgggccacacggcagggtggtggacttgctcctagaattgggctccagggctgaagccagcccctctgatctggcactggccggctccattcaccctttttggggcttactgccgcagagacttcctttgaggagagctggacccaagacgccagagttccgggggcactgagtgctgtgtggcacccgggccaggagaaacatgtgccagagggcaggcgtgggctctccggggagtctctgcgtagactttctagcccagaggttcaggtgatggaccagagactggccgctttgtgacaccgaggacggttgataaagtggattctcgaggggaagctgcatccacacagaggctgggacgtgaatgtgcatcacggctctatctgtggcccccaaaggctgggtgccagctgcctgtcggcagggagcgtatcaccgtggcacgtccatgccgtgggggtcactcagcagccacggatgcgccctgggtgctgtcccggggccgtctcagaagcaccgcgctggaccggctgggccagatgccatgggattctgtgtttgtgaacctctagaaaaggacggctgtcctcagcgaggggccgtgcacccgctcctgagcagcgccatgggcctgctggccttcctgaagacccagttcgtgctgcacctgctggtcggctttgtcttcgtggtgagtggtctggtcatcaacttcgtccagctgtgcacgctggcgctctggccggtcagcaagcagctctaccgccgcctcaactgccgcctcgcctactcactctggagccaactggtcatgctgctggagtggtggtcctgcacggagtgtacactgttcacggaccaggccacggtagagcgctttgggaaggagcacgcagtcatcatcctcaaccacaacttcgagatcgacttcctctgtgggtggaccatgtgtgagcgcttcggagtgctggggagctccaaggtcctcgctaagaaggagctgctctacgtgcccctcatcggctggacgtggtactttctggagattgtgttctgcaagcggaagtgggaggaggaccgggacaccgtggtcgaagggctgaggcgcctgtcggactaccccgagtacatgtggtttctcctgtactgcgaggggacgcgcttcacggagaccaagcaccgcgttagcatggaggtggcggctgctaaggggcttcctgtcctcaagtaccacctgctgccgcggaccaagggcttcaccaccgcagtcaagtgcctccgggggacagtcgcagctgtctatgatgtaaccctgaacttcagaggaaacaagaacccgtccctgctggggatcctctacgggaagaagtacgaggcggacatgtgcgtgaggagatttcctctggaagacatcccgctggatgaaaaggaagcagctcagtggcttcataaactgtaccaggagaaggacgcgctccaggagatatataatcagaagggcatgtttccaggggagcagtttaagcctgcccggaggccgtggaccctcctgaacttcctgtcctgggccaccattctcctgtctcccctcttcagttttgtcttgggcgtctttgccagcggatcacctctcctgatcctgactttcttggggtttgtgggagcagcttcctttggagttcgcagactgataggagtaactgagatagaaaaaggctccagctacggaaaccaagagtttaagaaaaaggaataattaatggctgtgactgaacacacgcggccctgacggtggtatccagttaactcaaaaccaacacacagagtgcaggaaaagacaattagaaactatttttcttattaactggtgactaatattaacaaaacttgagccaagagtaaagaattcagaaggcctgtcaggtgaagtcttcagcctcccacagcgcagggtcccagcatctccacgcgcgcccgtgggaggtgggtccggccggagaggcctcccgcggacgccgtctctccagaactccgcttccaagagggagcctttggctgctttctctccttaaacttagatc

SEQ ID NO: 798 - DNA, 7865 bp, Homo sapiens
  source 1..7865: mol_type = unassigned DNA
gctttttctttccagtgttggctgacttacagctcttataaactagtggcaatttctgaacccagccggctccatctcagcttctggtttctaagtccatgtgccaaaggctgccaggaaggagacgccttcctgagtcctggatctttcttccttctggaaatctttgactgtgggtagttatttatttctgaataagagcgtccacgcatcatggacctcgcgggactgctgaagtctcagttcctgtgccacctggtcttctgctacgtctttattgcctcagggctaatcatcaacaccattcagctcttcactctcctcctctggcccattaacaagcagctcttccggaagatcaactgcagactgtcctattgcatctcaagccagctggtgatgctgctggagtggtggtcgggcacggaatgcaccatcttcacggacccgcgcgcctacctcaagtatgggaaggaaaatgccatcgtggttctcaaccacaagtttgaaattgactttctgtgtggctggagcctgtccgaacgctttgggctgttagggggctccaaggtcctggccaagaaagagctggcctatgtcccaattatcggctggatgtggtacttcaccgagatggtcttctgttcgcgcaagtgggagcaggatcgcaagacggttgccaccagtttgcagcacctccgggactaccccgagaagtattttttcctgattcactgtgagggcacacggttcacggagaagaagcatgagatcagcatgcaggtggcccgggccaaggggctgcctcgcctcaagcatcacctgttgccacgaaccaagggcttcgccatcaccgtgaggagcttgagaaatgtagtttcagctgtatatgactgtacactcaatttcagaaataatgaaaatccaacactgctgggagtcctaaacggaaagaaataccatgcagatttgtatgttaggaggatcccactggaagacatccctgaagacgatgacgagtgctcggcctggctgcacaagctctaccaggagaaggatgcctttcaggaggagtactacaggacgggcaccttcccagagacgcccatggtgcccccccggcggccctggaccctcgtgaactggctgttttgggcctcgctggtgctctaccctttcttccagttcctggtcagcatgatcaggagcgggtcttccctgacgctggccagcttcatcctcgtcttctttgtggcctccgtgggagttcgatggatgattggtgtgacggaaattgacaagggctctgcctacggcaactctgacagcaagcagaaactgaatgactgactcagggaggtgtcaccatccgaagggaaccttggggaactggtggcctctgcatatcctccttagtgggacacggtgacaaaggctgggtgagcccctgctgggcacggcggaagtcacgacctctccagccagggagtctggtctcaaggccggatggggaggaagatgttttgtaatctttttttccccatgtgctttagtgggctttggttttctttttgtgcgagtgtgtgtgagaatggctgtgtggtgagtgtgaactttgttctgtgatcatagaaagggtattttaggctgcaggggagggcagggctggggaccgaaggggacaagttcccctttcatcctttggtgctgagttttctgtaacccttggttgccagagataaagtgaaaagtgctttaggtgagatgactaaattatgcctccaagaaaaaaaaattaaagtgcttttctgggtcatctgtggtgtatgttgacatggaccgctgcccctccatcctgcccttgcccgtggctttggtgtttcagatcctactcacgggaggcagctgccgcggaggtgtgggcagctgagaggggtgggcaggccagcacagctcctggcaggagacacaggtccaggagcccgtgagcatttgtgagagcagagatggcaagcacgtgcgtggagaccaacgaagcgtgtccctggcacacagcaagggagagtttcgctcggtctctgcagtgcagtctcctggcgtaagtcttgaagatggacccaactccctgaagaaatggatcttgaaattgaacacaaacatcatgaacgtacagcctgggcattctgcagtgatttgtgagatgagcttgcatcgactgttcctctcagcagtgacagccaaagtcacccctgataaaatgcagtttcactttataaaatgcctcgccccttcccagcatgtagagcttgtctgcagccctaaaggagccaggtcctgctctgatgagggtcaaatcagagccgacatcccatgtacaaaaaacccccaggcttctgccttccttccgggctcctgtctgctcccattttactccacggaatagttctgccctgtagcatctccagcggcctttgcagactgctgtcagccaacaggtgccaaaaatgcaaaagaagaagaaactaaaagcagtgctatttttgcagaacaaatgctagctattaaatcatcttaggccaagacaccaatggcacttggaccgataggtatttggagcatgagttaggaaggatatgtctttctccaggtgcgcagctgaaagttgctgagaaaagctgcctgtgttgctgtggtaacatgagaaggaatgaacagctctatacaaaaactggccacacattataaggcctattctatgcagttatgtttttggctatttgctcatttagtcattgtttatcaaccaaactaggtaagccaaggagttacaagacagctctagagaagctccctctgcttacaggacaataatgcattgtttgtttgttgatacaaatgaattatttgaatccacagaagtgaaaaagggaaaaaatcctggctgacttgtgggaagagcgtactgcagagcctagggcctgagttaactcgctggcggccctgcaggcaggcttgatgggagcgcccagcacatctgcccaccctgcacagggcatgaagcaccgtgtgcagagatctgtgggcaaaagcccaggacgtgaccttaggcaagaggggtccttggagaagtggaggtgtgcatggtgtgtagccttgcgtgtctgtgagcacgccctagtggacctgcgcctggattatcgggccagtctctcggaggggtccgtgatgctgagttacgccattcacctgaactctgcagctcatcggctgtaggatttgggtgagacacttttccttgctgactcatttccccatctgcaaaatgggggtgacgatatctacctcttggggtgtgtcaagggtaaaagagcacactttaagaatcctaaagcactaagccaaggatgaaagactagaaagctgcctctatgttgctactctcaaaaatgctcagaaattttcttgtcgtactaaaaatgtgttatttttctcattttcattcttccattcaacacagaagtaatctaagtaagttctaaaaacatagatccgggggcccacagacattcaattttcttctgaattggctctggtatcacacaacacacaagcaagcaaacagcctgcctgctagggccttgggttccaggctggaggaatgcaggcagaaatctcttaggaaataactaagtgagcgccaagttttgaattgccttagagccgaaagagaatgtggcgtgctggggagagatctggacctctttctcatcagtcatttgacctgtccacgaagaacaattttgttatgcagcctgggaacctggtttccttacaccctgcgcccttaatgacacagacaaccacgggtactcctggacggaagctcatcacgcctcctcaaataccttcacccatgttcaggtcacacggaggtcaccatctcctcagcacacaacaactgctttggttcccagggttattttttctacgagttgaaaacccacggagcctaagccatctttttgtcccctaaggagagccccatagactaagagctacacttcctgtctgtctttcccacctttccatctcattctagcttaaagcttatcacgctactgagagcctgttctgtagttcaaggtggcagagaaaaatacgaaccttgagtgaaatctggagagcagtgcagggtcatccccagacgtgacgggccatatcctaggcgactcctgcagcttatagaagcagggaatttaatggacttcttccaggaaagccagcccacggggactcttaaaaagacaccaaccatttggaagatgcagcttgaggtctgggggactggactgattctgccaccatatagtgaacacgattaatcgggaggaagaagtaaggcactctgtgagttagtctaccaccctattgactttgacagagagaaaaccaacttttttcatatgatcacacagtagtactggaatatctcgactgcaatatcctctaaacaaatgcatgcaaagctttgtaaaagcagctgatgattaaaaaaattttaaaacattagggtttttctaatatatccatatgtgggacagtgatttaaatgtcattaattgtccagccacaacttgtaacagtgatgtgaaagacacaaaaaaggccccactggagtggaggagtggtctggctggtccccaagcaaaacagaatgggcttcgcataggctttagaacttattcataaatattgaccaaagtgtgaagcaaggtatccagtgaagattctctagggtctctacttctgctcaagagatttaatccagctttctctaaagcagtggtccagacttgccacatactaggttaaagataaagtgagaaaaacaaatactttggtttgcacgtctcttgaggggccctaggctgtatggaggaatatttagaggaatatttgtgagctgccatttgtgtttaaaagaacatgaaagcaagacgggccctaacccgcctgtgtctgtagctgaccaggaggccactgcttccttcccccagagcttctaggagagccccccaaaatgcaactctccaaggtcctgtggagtagtcccctcataatgcctccaccacacctgtgtctcacgatgccttaactgacgtagctcctaagtgatgttcacagagaaggaaatacttaggcaagcccatgtgtaacatgctcacagatgtgctggctttgccaatgctttcggactccaccatgctttctgattcttctggtcctagtcacgccttggcacggggcagaagcggccgagctatgctgacaggtgctgctgagagccaacagccattcagccgagaaggcgtttctaggtgagggcatgagagctggcattccaggctgctgagtgcggcatctgcaggtgcaccacattgctccacggtgtgttcagaagagaccagcatcttgaatctcaggctctgggctcattctttgcctctgccaagggaccattcaggggcttcaagccagctgctgaaaatcccccttttctggatttttccccatctatataaggatatggtggctgtgtggacaagaaattggtttcatctcagaagggtgcttccctacaaagatcttcagaaatttaattgaaaacaattttttgaactttttttgtttggccaggatgaatgaagctgaagtcacatcctgaatgtgcatgccagacaaagggtaagcaagcagtctttacaaatgccaatccctctgcactccaaaaccggagcccgtaatgaaggcccaggttccagtcatcacaggatcccccaagccagcacagtgcctgatgcctccctaggcattagcacatcccagcactctaattcacatcctcagcatccctgcctcctgcatccagggcttaggttgagtgtttccagagtgtcaagtacatttaaacacaaaccaaatactccagggttttgacctgtcacaatggcttttgaaaacaacagacgtacaatttgagagaaggactcgatggacttcttaggctgaggactaaggacatgttgctgttcctcttggtccaggacattcaataccattcacagcattcatcaccaactgacatagtatcgatcacgacattcaactgtttgaaattactgctattttggtcaaaaactaagaaatcagaaattgcacctacatagtgtgtctcctcattggagtcccatctctctgagcacagggatgggctcctgagctcacagccctgccctgcccccccagcagggcctcaccctcatggccctcagtgaatagtgactacatgaagggggcacttactagaggcctgagtaatggaatttcaattagcttctgcttcccttttctaaaaaagaaccacctttcttaagaataattaggccaaaataaacttgagtaatttgtacagtcaatattttgaagtttcggagttaccagtgaaatagcaaagctgttctccaggaaaggacatccaggttcccacccaggccttccttcctcagctcctgcagcctcatcctagtttaatatgaaggttgtgaatgggttaaaaagcagttcttaagcacctacttagatcttttcagtatctggaaatagcacccagggctgtgttagtaaagcttttcactgggtaagagtcatacaatttttacatttaatttgtttttttaaaacaaggcagtcttgttttacatattggaatgactagatattttttgacatttctggcacctctggttctgctgaattttaagggaggtgagtggtatgtacacaaagttaagattgctgcataataattcctttgcatttccaaaataaattacacaaatgtcacttttccttttctattccatagtactagttttagccagatctttgccaaacattctaggacattcagaaaagtcatccatggaattttggaatgccattctctctgtatctttgcagatcatgaggaaggaaagttgatgaactagtacgggatggctcagacttgtaaagtgtctaagtcacaacgctgcagagccagcttccgggtagcaatggcatggcctcagctgtgccaaggctacaactggagcttccttactcgcatctgaggcaaacacagcaaggctggcccaggccgcccacagtcaacagatgttcacgggagatggatcagcccctcttttgcttgttctatcaaggaaagagatctaaccatgggcaagggtggaacacacccggttcaggtcagggaatgagttgctctaagtgaacagtgaattcttacttctcagcctgtatcaattgtacccagggttcatgattactgtgacccactaagggatgatctttgaggaaacagacctggagggaggtaatttaaggagggaaagcgagtgggttttacagactgctttgtggcgacattcaggaacagaccattcaatggatgacttttcagtacataaaagcaagcagtaatggccaggagagagcaaagatgccctaagaatgacatcagactgaccaaatgtgccttttcaaataagttatgagaacgaatgaattggaattagagcaaggtattggacagaaccatgctagtctttgagagaacgtgtggattgggtggatgtttggaccgaatgaatggtaactttttaatgtgaaacagagaactgatatatgggctgtcatgtcaccctagggtactgtcgctctgtcatgtgtagcaatctttccaaatttttgttggtgggctgaacaaagataaaactaataaagtatgtgtggataccactaga

SEQ ID NO: 799 - DNA, 490 bp, Homo sapiens
  source 1..490: mol_type = unassigned DNA
tttcagctgtatatgactgtacactcaatttcagaaataatgaaaatccaacactgctgggagtcctaaacggaaagaaataccatgcagatttgtatgttaggaggatcccactggaagacatccctgaagacgatgacgagtgctcggcctggctgcacaagctctaccaggagaagggctggggcgacaccgagttctctaagcagtatgtgtctgtgagcaggcctgggaggctggccctttgcccttccgagaagatcgctgagcagcaagtggaagtggtgcatggtttctccaagcagagtggtgaatagacatcaagggacaattcctttctgtatcagcctattttgctaggagcctagatctaaagctttacgtgccccaaatctgggtgcccgacccagtttgtcaaagtgggatttcattttaatgatcaaccttgcagtcagaagtgtggtgtatgtcaaaagacagttctgttgat

SEQ ID NO: 800 - DNA, 875 bp, Homo sapiens
  source 1..875: mol_type = unassigned DNA
ctgaataagagcgtccacgcatcatggacctcgcgggactgctgaagtctcagttcctgtgccacctggtcttctgctacgtctttattgcctcagggctaatcatcaacaccattcagctcttcactctcctcctctggcccattaacaagcagctcttccggaagatcaactgcagactgtcctattgcatctcaagccagctggtgatgctgctggagtggtggtcgggcacggaatgcaccatcttcacggacccgcgcgcctacctcaagtatgggaaggaaaatgccatcgtggttctcaaccacaagtttgaaattgactttctgtgtggctggagcctgtccgaacgctttgggctgttagggtttgacctcttgcacgtagcttgcatgcctttggaactgggtctcttcagttgacttttgtcgtcttcaacacactgcagcgtgtagcggttgagcctgtgtcacatagctgaatcagagtcatctgcggtactcagggctccaaggtcctggccaagaaagagctggcctatgtcccaattatcggctggatgtggtacttcaccgagatggtcttctgttcgcgcaagtgggagcaggatcgcaagacggttgccaccagtttgcagcacctccgggactaccccgagaagtattttttcctgattcactgtgagggcacacggttcacggagaagaagcatgagatcagcatgcaggtggcccgggccaaggggctgcctcgcctcaagcatcacctgttgccacgaaccaagggcttcgccatcaccgtgaggagcttgagaaatgtagaaataatgaaaatccaacactgctgggagtcctaaacggaaagaaatacca

SEQ ID NO: 801 - DNA, 942 bp, Homo sapiens
  source 1..942: mol_type = unassigned DNA
cagctcttataaactagtggcaatttctgaacccagccggctccatctcagcttctggtttctaagtccatgtgccaaaggctgccaggaaggagacgccttcctgagtcctggatctttcttccttctggaaatctttgactgtgggtagttatttatttctgaataagagcgtccacgcatcatggacctcgcgggactgctgaagtctcagttcctgtgccacctggtcttctgctacgtctttattgcctcagggctaatcatcaacaccattcagctcttcactctcctcctctggcccattaacaagcagctcttccggaagatcaactgcagactgtcctattgcatctcaagccagctggtgatgctgctggagtggtggtcgggcacggaatgcaccatcttcacggacccgcgcgcctacctcaagtatgggaaggaaaatgccatcgtggttctcaaccacaagtttgaaattgactttctgtgtggctggagcctgtccgaacgctttgggctgttaggggtaagtcagaagtgcattcccccctgcctcacacatttctctggttcagccccaccacttgtctttttgctcctggtcattcagaacttgcagaagaatcaacagagtttctacttgatgaaatggtcctaataaactgctttttattcttgctgggagtcagtcttaacagcttcttatgggcaatcataagaggtactcaacaattgctacctgccggccattttacatatgattcatttatttaatccttacagcaacatgaatagatgatgtgccacactccattttttaaaaactaagttatatagagcttaatattcggctcagagtcacacagctgtaattagatttggatttcactcccatccatatttcttaattccatgctctactgcctccttggctaa

SEQ ID NO: 802 - DNA, 7705 bp, Homo sapiens
  source 1..7705: mol_type = unassigned DNA
tataaactagtggcaatttctgaacccagccggctccatctcagcttctggtttctaagtccatgtgccaaaggctgccaggaaggagacgccttcctgagtcctggatctttcttccttctggaaatctttgactgtgggtagttatttatttctgaataagagcgtccacgcatcatggacctcgcgggactgctgaagtctcagttcctgtgccacctggtcttctgctacgtctttattgcctcagggctaatcatcaacaccattcagctcttcactctcctcctctggcccattaacaagcagctcttccggaagatcaactgcagactgtcctattgcatctcaagccggctccaaggtcctggccaagaaagagctggcctatgtcccaattatcggctggatgtggtacttcaccgagatggtcttctgttcgcgcaagtgggagcaggatcgcaagacggttgccaccagtttgcagcacctccgggactaccccgagaagtattttttcctgattcactgtgagggcacacggttcacggagaagaagcatgagatcagcatgcaggtggcccgggccaaggggctgcctcgcctcaagcatcacctgttgccacgaaccaagggcttcgccatcaccgtgaggagcttgagaaatgtagtttcagctgtatatgactgtacactcaatttcagaaataatgaaaatccaacactgctgggagtcctaaacggaaagaaataccatgcagatttgtatgttaggaggatcccactggaagacatccctgaagacgatgacgagtgctcggcctggctgcacaagctctaccaggagaaggatgcctttcaggaggagtactacaggacgggcaccttcccagagacgcccatggtgcccccccggcggccctggaccctcgtgaactggctgttttgggcctcgctggtgctctaccctttcttccagttcctggtcagcatgatcaggagcgggtcttccctgacgctggccagcttcatcctcgtcttctttgtggcctccgtgggagttcgatggatgattggtgtgacggaaattgacaagggctctgcctacggcaactctgacagcaagcagaaactgaatgactgactcagggaggtgtcaccatccgaagggaaccttggggaactggtggcctctgcatatcctccttagtgggacacggtgacaaaggctgggtgagcccctgctgggcacggcggaagtcacgacctctccagccagggagtctggtctcaaggccggatggggaggaagatgttttgtaatctttttttccccatgtgctttagtgggctttggttttctttttgtgcgagtgtgtgtgagaatggctgtgtggtgagtgtgaactttgttctgtgatcatagaaagggtattttaggctgcaggggagggcagggctggggaccgaaggggacaagttcccctttcatcctttggtgctgagttttctgtaacccttggttgccagagataaagtgaaaagtgctttaggtgagatgactaaattatgcctccaagaaaaaaaaattaaagtgcttttctgggtcatctgtggtgtatgttgacatggaccgctgcccctccatcctgcccttgcccgtggctttggtgtttcagatcctactcacgggaggcagctgccgcggaggtgtgggcagctgagaggggtgggcaggccagcacagctcctggcaggagacacaggtccaggagcccgtgagcatttgtgagagcagagatggcaagcacgtgcgtggagaccaacgaagcgtgtccctggcacacagcaagggagagtttcgctcggtctctgcagtgcagtctcctggcgtaagtcttgaagatggacccaactccctgaagaaatggatcttgaaattgaacacaaacatcatgaacgtacagcctgggcattctgcagtgatttgtgagatgagcttgcatcgactgttcctctcagcagtgacagccaaagtcacccctgataaaatgcagtttcactttataaaatgcctcgccccttcccagcatgtagagcttgtctgcagccctaaaggagccaggtcctgctctgatgagggtcaaatcagagccgacatcccatgtacaaaaaacccccaggcttctgccttccttccgggctcctgtctgctcccattttactccacggaatagttctgccctgtagcatctccagcggcctttgcagactgctgtcagccaacaggtgccaaaaatgcaaaagaagaagaaactaaaagcagtgctatttttgcagaacaaatgctagctattaaatcatcttaggccaagacaccaatggcacttggaccgataggtatttggagcatgagttaggaaggatatgtctttctccaggtgcgcagctgaaagttgctgagaaaagctgcctgtgttgctgtggtaacatgagaaggaatgaacagctctatacaaaaactggccacacattataaggcctattctatgcagttatgtttttggctatttgctcatttagtcattgtttatcaaccaaactaggtaagccaaggagttacaagacagctctagagaagctccctctgcttacaggacaataatgcattgtttgtttgttgatacaaatgaattatttgaatccacagaagtgaaaaagggaaaaaatcctggctgacttgtgggaagagcgtactgcagagcctagggcctgagttaactcgctggcggccctgcaggcaggcttgatgggagcgcccagcacatctgcccaccctgcacagggcatgaagcaccgtgtgcagagatctgtgggcaaaagcccaggacgtgaccttaggcaagaggggtccttggagaagtggaggtgtgcatggtgtgtagccttgcgtgtctgtgagcacgccctagtggacctgcgcctggattatcgggccagtctctcggaggggtccgtgatgctgagttacgccattcacctgaactctgcagctcatcggctgtaggatttgggtgagacacttttccttgctgactcatttccccatctgcaaaatgggggtgacgatatctacctcttggggtgtgtcaagggtaaaagagcacactttaagaatcctaaagcactaagccaaggatgaaagactagaaagctgcctctatgttgctactctcaaaaatgctcagaaattttcttgtcgtactaaaaatgtgttatttttctcattttcattcttccattcaacacagaagtaatctaagtaagttctaaaaacatagatccgggggcccacagacattcaattttcttctgaattggctctggtatcacacaacacacaagcaagcaaacagcctgcctgctagggccttgggttccaggctggaggaatgcaggcagaaatctcttaggaaataactaagtgagcgccaagttttgaattgccttagagccgaaagagaatgtggcgtgctggggagagatctggacctctttctcatcagtcatttgacctgtccacgaagaacaattttgttatgcagcctgggaacctggtttccttacaccctgcgcccttaatgacacagacaaccacgggtactcctggacggaagctcatcacgcctcctcaaataccttcacccatgttcaggtcacacggaggtcaccatctcctcagcacacaacaactgctttggttcccagggttattttttctacgagttgaaaacccacggagcctaagccatctttttgtcccctaaggagagccccatagactaagagctacacttcctgtctgtctttcccacctttccatctcattctagcttaaagcttatcacgctactgagagcctgttctgtagttcaaggtggcagagaaaaatacgaaccttgagtgaaatctggagagcagtgcagggtcatccccagacgtgacgggccatatcctaggcgactcctgcagcttatagaagcagggaatttaatggacttcttccaggaaagccagcccacggggactcttaaaaagacaccaaccatttggaagatgcagcttgaggtctgggggactggactgattctgccaccatatagtgaacacgattaatcgggaggaagaagtaaggcactctgtgagttagtctaccaccctattgactttgacagagagaaaaccaacttttttcatatgatcacacagtagtactggaatatctcgactgcaatatcctctaaacaaatgcatgcaaagctttgtaaaagcagctgatgattaaaaaaattttaaaacattagggtttttctaatatatccatatgtgggacagtgatttaaatgtcattaattgtccagccacaacttgtaacagtgatgtgaaagacacaaaaaaggccccactggagtggaggagtggtctggctggtccccaagcaaaacagaatgggcttcgcataggctttagaacttattcataaatattgaccaaagtgtgaagcaaggtatccagtgaagattctctagggtctctacttctgctcaagagatttaatccagctttctctaaagcagtggtccagacttgccacatactaggttaaagataaagtgagaaaaacaaatactttggtttgcacgtctcttgaggggccctaggctgtatggaggaatatttagaggaatatttgtgagctgccatttgtgtttaaaagaacatgaaagcaagacgggccctaacccgcctgtgtctgtagctgaccaggaggccactgcttccttcccccagagcttctaggagagccccccaaaatgcaactctccaaggtcctgtggagtagtcccctcataatgcctccaccacacctgtgtctcacgatgccttaactgacgtagctcctaagtgatgttcacagagaaggaaatacttaggcaagcccatgtgtaacatgctcacagatgtgctggctttgccaatgctttcggactccaccatgctttctgattcttctggtcctagtcacgccttggcacggggcagaagcggccgagctatgctgacaggtgctgctgagagccaacagccattcagccgagaaggcgtttctaggtgagggcatgagagctggcattccaggctgctgagtgcggcatctgcaggtgcaccacattgctccacggtgtgttcagaagagaccagcatcttgaatctcaggctctgggctcattctttgcctctgccaagggaccattcaggggcttcaagccagctgctgaaaatcccccttttctggatttttccccatctatataaggatatggtggctgtgtggacaagaaattggtttcatctcagaagggtgcttccctacaaagatcttcagaaatttaattgaaaacaattttttgaactttttttgtttggccaggatgaatgaagctgaagtcacatcctgaatgtgcatgccagacaaagggtaagcaagcagtctttacaaatgccaatccctctgcactccaaaaccggagcccgtaatgaaggcccaggttccagtcatcacaggatcccccaagccagcacagtgcctgatgcctccctaggcattagcacatcccagcactctaattcacatcctcagcatccctgcctcctgcatccagggcttaggttgagtgtttccagagtgtcaagtacatttaaacacaaaccaaatactccagggttttgacctgtcacaatggcttttgaaaacaacagacgtacaatttgagagaaggactcgatggacttcttaggctgaggactaaggacatgttgctgttcctcttggtccaggacattcaataccattcacagcattcatcaccaactgacatagtatcgatcacgacattcaactgtttgaaattactgctattttggtcaaaaactaagaaatcagaaattgcacctacatagtgtgtctcctcattggagtcccatctctctgagcacagggatgggctcctgagctcacagccctgccctgcccccccagcagggcctcaccctcatggccctcagtgaatagtgactacatgaagggggcacttactagaggcctgagtaatggaatttcaattagcttctgcttcccttttctaaaaaagaaccacctttcttaagaataattaggccaaaataaacttgagtaatttgtacagtcaatattttgaagtttcggagttaccagtgaaatagcaaagctgttctccaggaaaggacatccaggttcccacccaggccttccttcctcagctcctgcagcctcatcctagtttaatatgaaggttgtgaatgggttaaaaagcagttcttaagcacctacttagatcttttcagtatctggaaatagcacccagggctgtgttagtaaagcttttcactgggtaagagtcatacaatttttacatttaatttgtttttttaaaacaaggcagtcttgttttacatattggaatgactagatattttttgacatttctggcacctctggttctgctgaattttaagggaggtgagtggtatgtacacaaagttaagattgctgcataataattcctttgcatttccaaaataaattacacaaatgtcacttttccttttctattccatagtactagttttagccagatctttgccaaacattctaggacattcagaaaagtcatccatggaattttggaatgccattctctctgtatctttgcagatcatgaggaaggaaagttgatgaactagtacgggatggctcagacttgtaaagtgtctaagtcacaacgctgcagagccagcttccgggtagcaatggcatggcctcagctgtgccaaggctacaactggagcttccttactcgcatctgaggcaaacacagcaaggctggcccaggccgcccacagtcaacagatgttcacgggagatggatcagcccctcttttgcttgttctatcaaggaaagagatctaaccatgggcaagggtggaacacacccggttcaggtcagggaatgagttgctctaagtgaacagtgaattcttacttctcagcctgtatcaattgtacccagggttcatgattactgtgacccactaagggatgatctttgaggaaacagacctggagggaggtaatttaaggagggaaagcgagtgggttttacagactgctttgtggcgacattcaggaacagaccattcaatggatgacttttcagtacataaaagcaagcagtaatggccaggagagagcaaagatgccctaagaatgacatcagactgaccaaatgtgccttttcaaataagttatgagaacgaatgaattggaattagagcaaggtattggacagaaccatgctagtctttgagagaacgtgtggattgggtggatgtttggaccgaatgaatggtaactttttaatgtgaaacagagaactgatatatgggctgtcatgtcaccctagggtactgtcgctctgtcatgtgtagcaatctttccaaatttttgttggtgggctgaacaaagataaaactaataaagtatgtgtggataccactagacagcacagcttactggactggatgtaataaaactgactgaaacttt

SEQ ID NO: 803 - DNA, 7323 bp, Homo sapiens
  source 1..7323: mol_type = unassigned DNA
cccgtccccggcgcggcccgcgcgctcctccgccgcctctcgcctgcgccatggccggccggtcccacccgggcccgctgcggccgctgctgccgctccttgtggtggccgcgtgcgtcctgcccggagccggcgggacatgcccggagcgcgcgctggagcggcgcgaggaggaggcgaacgtggtgctcaccgggacggtggaggagatcctcaacgtggacccggtgcagcacacgtactcctgcaaggttcgggtctggcggtacttgaagggcaaagacctggtggcccgggagagcctgctggacggcggcaacaaggtggtgatcagcggctttggagaccccctcatctgtgacaaccaggtgtccactggggacaccaggatcttctttgtgaaccctgcacccccatacctgtggccagcccacaagaacgagctgatgctcaactccagcctcatgcggatcaccctgcggaacctggaggaggtggagttctgtgtggaagataaacccgggacccacttcactccagtgcctccgacgcctcctgatgcgtgccggggaatgctgtgcggcttcggcgccgtgtgcgagcccaacgcggaggggccgggccgggcgtcctgcgtctgcaagaagagcccgtgccccagcgtggtggcgcctgtgtgtgggtcggacgcctccacctacagcaacgaatgcgagctgcagcgggcgcagtgcagccagcagcgccgcatccgcctgctcagccgcgggccgtgcggctcgcgggacccctgctccaacgtgacctgcagcttcggcagcacctgtgcgcgctcggccgacgggctgacggcctcgtgcctgtgccccgcgacctgccgtggcgcccccgaggggaccgtctgcggcagcgacggcgccgactaccccggcgagtgccagctcctgcgccgcgcctgcgcccgccaggagaatgtcttcaagaagttcgacggcccttgtgacccctgtcagggcgccctccctgacccgagccgcagctgccgtgtgaacccgcgcacgcggcgccctgagatgctcctacggcccgagagctgccctgcccggcaggcgccagtgtgtggggacgacggagtcacctacgaaaacgactgtgtcatgggccgatcgggggccgcccggggtctcctcctgcagaaagtgcgctccggccagtgccagggtcgagaccagtgcccggagccctgccggttcaatgccgtgtgcctgtcccgccgtggccgtccccgctgctcctgcgaccgcgtcacctgtgacggggcctacaggcccgtgtgtgcccaggacgggcgcacgtatgacagtgattgctggcggcagcaggctgagtgccggcagcagcgtgccatccccagcaagcaccagggcccgtgtgaccaggccccgtccccatgcctcggggtgcagtgtgcatttggggcgacgtgtgctgtgaagaacgggcaggcagcgtgtgaatgcctgcaggcgtgctcgagcctctacgatcctgtgtgcggcagcgacggcgtcacatacggcagcgcgtgcgagctggaggccacggcctgtaccctcgggcgggagatccaggtggcgcgcaaaggaccctgtgaccgctgcgggcagtgccgctttggagccctgtgcgaggccgagaccgggcgctgcgtgtgcccctctgaatgcgtggctttggcccagcccgtgtgtggctccgacgggcacacgtaccccagcgagtgcatgctgcacgtgcacgcctgcacacaccagatcagcctgcacgtggcctcagctggaccctgtgagacctgtggagatgccgtgtgtgcttttggggctgtgtgctccgcagggcagtgtgtgtgtccccggtgtgagcaccccccgcccggccccgtgtgtggcagcgacggtgtcacctacggcagtgcctgcgagctacgggaagccgcctgcctccagcagacacagatcgaggaggcccgggcagggccgtgcgagcaggccgagtgcggttccggaggctctggctctggggaggacggtgactgtgagcaggagctgtgccggcagcgcggtggcatctgggacgaggactcggaggacgggccgtgtgtctgtgacttcagctgccagagtgtcccaggcagcccggtgtgcggctcagatggggtcacctacagcaccgagtgtgagctgaagaaggccaggtgtgagtcacagcgagggctctacgtagcggcccagggagcctgccgaggccccaccttcgccccgctgccgcctgtggcccccttacactgtgcccagacgccctacggctgctgccaggacaatatcaccgcagcccggggcgtgggcctggctggctgccccagtgcctgccagtgcaacccccatggctcttacggcggcacctgtgacccagccacaggccagtgctcctgccgcccaggtgtggggggcctcaggtgtgaccgctgtgagcctggcttctggaactttcgaggcatcgtcaccgatggccggagtggctgtacaccctgcagctgtgatccccaaggcgccgtgcgggatgactgtgagcagatgacggggctgtgctcgtgtaagcccggggtggctggacccaagtgtgggcagtgtccagacggccgtgccctgggccccgcgggctgtgaagctgacgcttctgcgcctgcgacctgtgcggagatgcgctgtgagttcggtgcgcggtgcgtggaggagtctggctcagcccactgtgtctgcccgatgctcacctgtccagaggccaacgctaccaaggtctgtgggtcagatggagtcacatacggcaacgagtgtcagctgaagaccatcgcctgccgccagggcctgcaaatctctatccagagcctgggcccgtgccaggaggctgttgctcccagcactcacccgacatctgcctccgtgactgtgaccaccccagggctcctcctgagccaggcactgccggccccccccggcgccctccccctggctcccagcagtaccgcacacagccagaccacccctccgccctcatcacgacctcggaccactgccagcgtccccaggaccaccgtgtggcccgtgctgacggtgccccccacggcaccctcccctgcacccagcctggtggcgtccgcctttggtgaatctggcagcactgatggaagcagcgatgaggaactgagcggggaccaggaggccagtgggggtggctctggggggctcgagcccttggagggcagcagcgtggccacccctgggccacctgtcgagagggcttcctgctacaactccgcgttgggctgctgctctgatgggaagacgccctcgctggacgcagagggctccaactgccccgccaccaaggtgttccagggcgtcctggagctggagggcgtcgagggccaggagctgttctacacgcccgagatggctgaccccaagtcagaactgttcggggagacagccaggagcattgagagcaccctggacgacctcttccggaattcagacgtcaagaaggattttcggagtgtccgcttgcgggacctggggcccggcaaatccgtccgcgccattgtggatgtgcactttgaccccaccacagccttcagggcacccgacgtggcccgggccctgctccggcagatccaggtgtccaggcgccggtccttgggggtgaggcggccgctgcaggagcacgtgcgatttatggactttgactggtttcctgcgtttatcacgggggccacgtcaggagccattgctgcgggagccacggccagagccaccactgcatcgcgcctgccgtcctctgctgtgacccctcgggccccgcaccccagtcacacaagccagcccgttgccaagaccacggcagcccccaccacacgtcggccccccaccactgcccccagccgtgtgcccggacgtcggcccccggccccccagcagcctccaaagccctgtgactcacagccctgcttccacggggggacctgccaggactgggcattgggcgggggcttcacctgcagctgcccggcaggcaggggaggcgccgtctgtgagaaggtgcttggcgcccctgtgccggccttcgagggccgctccttcctggccttccccactctccgcgcctaccacacgctgcgcctggcactggaattccgggcgctggagcctcaggggctgctgctgtacaatggcaacgcccggggcaaggacttcctggcattggcgctgctagatggccgcgtgcagctcaggtttgacacaggttcggggccggcggtgctgaccagtgccgtgccggtagagccgggccagtggcaccgcctggagctgtcccggcactggcgccggggcaccctctcggtggatggtgagacccctgttctgggcgagagtcccagtggcaccgacggcctcaacctggacacagacctctttgtgggcggcgtacccgaggaccaggctgccgtggcgctggagcggaccttcgtgggcgccggcctgagggggtgcatccgtttgctggacgtcaacaaccagcgcctggagcttggcattgggccgggggctgccacccgaggctctggcgtgggcgagtgcggggaccacccctgcctgcccaacccctgccatggcggggccccatgccagaacctggaggctggaaggttccattgccagtgcccgcccggccgcgtcggaccaacctgtgccgatgagaagagcccctgccagcccaacccctgccatggggcggcgccctgccgtgtgctgcccgagggtggtgctcagtgcgagtgccccctggggcgtgagggcaccttctgccagacagcctcggggcaggacggctctgggcccttcctggctgacttcaacggcttctcccacctggagctgagaggcctgcacacctttgcacgggacctgggggagaagatggcgctggaggtcgtgttcctggcacgaggccccagcggcctcctgctctacaacgggcagaagacggacggcaagggggacttcgtgtcgctggcactgcgggaccgccgcctggagttccgctacgacctgggcaagggggcagcggtcatcaggagcagggagccagtcaccctgggagcctggaccagggtctcactggagcgaaacggccgcaagggtgccctgcgtgtgggcgacggcccccgtgtgttgggggagtccccggttccgcacaccgtcctcaacctgaaggagccgctctacgtagggggcgctcccgacttcagcaagctggcccgtgctgctgccgtgtcctctggcttcgacggtgccatccagctggtctccctcggaggccgccagctgctgaccccggagcacgtgctgcggcaggtggacgtcacgtcctttgcaggtcacccctgcacccgggcctcaggccacccctgcctcaatggggcctcctgcgtcccgagggaggctgcctatgtgtgcctgtgtcccgggggattctcaggaccgcactgcgagaaggggctggtggagaagtcagcgggggacgtggataccttggcctttgacgggcggacctttgtcgagtacctcaacgctgtgaccgagagcgagaaggcactgcagagcaaccactttgaactgagcctgcgcactgaggccacgcaggggctggtgctctggagtggcaaggccacggagcgggcagactatgtggcactggccattgtggacgggcacctgcaactgagctacaacctgggctcccagcccgtggtgctgcgttccaccgtgcccgtcaacaccaaccgctggttgcgggtcgtggcacatagggagcagagggaaggttccctgcaggtgggcaatgaggcccctgtgaccggctcctccccgctgggcgccacgcagctggacactgatggagccctgtggcttgggggcctgccggagctgcccgtgggcccagcactgcccaaggcctacggcacaggctttgtgggctgcttgcgggacgtggtggtgggccggcacccgctgcacctgctggaggacgccgtcaccaagccagagctgcggccctgccccaccccatgagctggcaccagagccccgcgcccgctgtaattattttctatttttgtaaacttgttgctttttgatatgattttcttgcctgagtgttggccggagggactgctggcccggcctcccttccgtccaggcagccgtgctgcagacagacctagtgccgagggatggacaggcgaggtggcagcgtggagggctcggcgtggatggcagcctcaggacacacacccctgcctcaaggtgctgagcccccgccttgcactgcgcctgccccacggtgtccccgccgggaagcagccccggctcctgaatcaccctcgctccgtcaggcgggactcgtgtcccagagaggaaggggctgctgaggtctgatggggcccttcctccgggtgaccccacagggcctttccaagcccccatttgagctgctccttcctgtgtgtgctctgggccctgcctcggcctcctgcgccaatactgtgacttccaaacaatgttactgctgggcacagctctgcgttgctcccgtgctgcctgcgccagccccaggctgctgaggagcagaggccagaccagggccgatctgggtgtcctgaccctcagctggccctgcccagccaccctggacgtgaccgtatccctctgccacaccccaggccctgcgaggggctatcgagaggagctcactgtgggatggggttgacctctgccgcctgcctgggtatctgggcctggccatggctgtgttcttcatgtgttgattttatttgacccctggagtggtgggtctcatctttcccatctcgcctgagagcggctgagggctgcctcactgcaaatcctccccacagcgtcagtgaaagtcgtccttgtctcagaatgaccaggggccagccagtgtctgaccaaggtcaaggggcaggtgcagaggtggcagggatggctccgaagccagaaatgccttaaactgcaacgtcccgtcccttccccacccccatcccatccccacccccagccccagcccagtcctcctaggagcaggacccgatgaagcgggcggcggtggggctgggtgccgtgttactaactctagtatgtttctgtgtcaatcgctgtgaaataaagtctgaaaactttaaaa

SEQ ID NO: 804 - DNA, 707 bp, Homo sapiens
  source 1..707: mol_type = unassigned DNA
tgcccgctcctatcgccgcttccgcctctgccggggacggggacagcagaccctcggcgcccggcccccgcgcacctgccgcgcgcaccgcctctccggcctgcgcggctccgggggctccgggaagaccgagcgctggcggccagcccggggaggctgtgggcagcaggggtggctgcgggctcccagtccctcctccgcctacctcggagcccacatttgggatttctactccgggagaattctgccctcctcccacgatgagcctggaggactggagccgggacctggcacccccagggctgtgactgggtgaactctgagggcacagctgctgtccgccgccccaggggtcccaggatggggcgagcagccctgaagaggcccaagggcaccccgtgaggagcccccacgctctgagagtggggcgcagagccggagccccgggccatgcctccgctgccgctggcgcgggacacccggcagccgcctggcgcctccctgctggtgcgaggcttcatggtgccctgcaacgcctgcctgatcctgctggccaccgccacgctcggcttcgcggtgctgctgttcctcaacaactataaacccgggacccacttcactccagtgcctccgacgcctcctgatgcgtgccggggaatgctgtgcggcttcggcgccgtgtgcgagcccaacgcggaggggccggg

SEQ ID NO: 805 - DNA, 899 bp, Homo sapiens
  source 1..899: mol_type = unassigned DNA
ctctcagtgggcctggccctcacccaaagctgcagaaacactttctgcgggagctggggagggaggggcagccggctacactgagagccggcagttgggggtagggcaggacctgcggtggactcttccagggaagggggtcctgcctgcacccctgtggctggggccccatctgacaggggtcaggccatgactatttggctggaggggcagagaaaagcaggggcctctgtctcagacctcagccagcccatggggtcagggctggacccttcagcagcctggatccctggggctagcggtgggggggggggggtgggcaggggtgcccctttccaggctgggcaaagggatgggacagggaggagcctgctcagaggagcctaacttggggatttgttttcttccagataaacccgggacccacttcactccagtgcctccgacgcctcctgatgcgtgccggggaatgctgtgcggcttcggcgccgtgtgcgagcccaacgcggaggggccgggccgggcgtcctgcgtctgcaagaagagcccgtgccccagcgtggtggcgcctgtgtgtgggtcggacgcctccacctacagcaacgaatgcgagctgcagcgggcgcagtgcagccagcagcgccgcatccgcctgctcagccgcgggccgtgcggctcgcgggacccctgctccaacgtgacctgcagcttcggcagcacctgtgcgcgctcggccgacgggctgacggcctcgtgcctgtgccccgcgacctgccgtggcgcccccgaggggaccgtctgcggcagcgacggcgccgactaccccggcgagtgccagctcctgcgccgcgcctgcgcccgccaggagaatgtcttcaagaagttcgacggcccttgtg

SEQ ID NO: 806 - DNA, 584 bp, Homo sapiens
  source 1..584: mol_type = unassigned DNA
ctgtgacccagccacaggccagtgctcctgccgcccaggtgtggggggcctcaggtgtgaccgctgtgagcctggcttctggaactttcgaggcatcgtcaccgatggccggagtggctgtacaccctgcagctgtgatccccaaggcgccgtgcgggatgactgtgagcagatgacggggctgtgctcgtgtaagcccggggtggctggacccaagtgtgggcagtgtccagacggccgtgccctgggccccgcgggctgtgaagctgacgcttctgcgcctgcgacctgtgcggagatgcgctgtgagttcggtgcgcggtgcgtggaggagtctggctcagcccactgtgtctgcccgatgctcacctgtccagaggccaacgctaccaaggtctgtgggtcagatggagtcacatacggcaacgagtgtcagctgaagaccatcgcctgccgccagggcctgcaaatctctatccagagcctgggcccgtgccagggtgaggcctgacggccactgccccagaactgaccaggaaggcctgacgctgccctaaatccagccccacccgccctgagccacc

SEQ ID NO: 807 - DNA, 459 bp, Homo sapiens
  source 1..459: mol_type = unassigned DNA
ctcatgaccatctgactaacatccaccttcccttgcacccttgtggcttgctgctggggcctgtgcctgggccagcctggatgccaggcagatgccaggcagggcctcactgtacctcccccacagccaccaaggtgttccagggcgtcctggagctggagggcgtcgagggccaggagctgttctacacgcccgagatggctgaccccaagtcagaactgttcggggagacagccaggagcattgagagcaccctggacgacctcttccggaattcagacgtcaagaaggattttcggagtgtccgcttgcgggacctggggcccggcaaatccgtccgcgccattgtggatgtgcactttgaccccaccacagccttcagggcacccgacgtggcccgggccctgctccggcagatccaggtgtccaggcgccggtccttgggggtgaggcggccgc

SEQ ID NO: 808 - DNA, 276 bp, Homo sapiens
  source 1..276: mol_type = unassigned DNA
ccacctacccactggccttcctccccagatacccagagcagcaccagggcagcccggcttgggcggccccccaagtccttgcctactccctgccacagctggacgacctcttccggaattcagacgtcaagaaggattttcggagtgtccgcttgcgggacctggggcccggcaaatccgtccgcgccattgtggatgtgcactttgaccccaccacagccttcagggcacccgacgtggcccgggccctgctccggcagatccaggtgtccaggc

SEQ ID NO: 809 - DNA, 690 bp, Homo sapiens
  source 1..690: mol_type = unassigned DNA
gggaggccgaggcaggcggatcacctgaggtcgggagttcgagaccagcctgaccaacatggagacactctgtctctactaaaaatacaaaattagccgggcgtggtggtgggcgcctgtaatcccacctcgtgaggctgaggcaggagaatcgcttgaacctggcaggcggaggttgcggtgagccaggatcgcgccactgcactccagccggggcaaaaagagcaaaactccgtctcaaaaaaaaaaaaaaaaaaaaaagcagggggcggtttcagggataaaagtggggaatcctcggagcttttccagccggccctcccggtcgccctttgcagtgcttggcgcccctgtgccggccttcgagggccgctccttcctggccttccccactctccgcgcctaccacacgctgcgcctggcactggaattccgggcgctggagcctcaggggctgctgctgtacaatggcaacgcccggggcaaggacttcctggcattggcgctgctagatggccgcgtgcagctcaggtttgacacaggttcggggccggcggtgctgaccagtgccgtgccggtagagccgggccagtggcaccgcctggagctgtcccggcactggcgccggggcaccctctcggtggatggtgagacccctgttctgggcgagagtcccagtggcaccgacgg

SEQ ID NO: 810 - DNA, 861 bp, Homo sapiens
  source 1..861: mol_type = unassigned DNA
caagggggacttcgtgtcgctggcactgcgggaccgccgcctggagttccgctacgacctgggcaagggggcagcggtcatcaggagcagggagccagtcaccctgggagcctggaccagggtctcactggagcgaaacggccgcaagggtgccctgcgtgtgggcgacggcccccgtgtgttgggggagtccccgaaatcccgcaaggttccgcacaccgtcctcaacctgaaggagccgctctacgtagggggcgctcccgacttcagcaagctggcccgtgctgctgccgtgtcctctggcttcgacggtgccatccagctggtctccctcggaggccgccagctgctgaccccggagcacgtgctgcggcaggtggacgtcacgtcctttgcaggtcacccctgcacccgggcctcaggccacccctgcctcaatggggcctcctgcgtcccgagggaggctgcctatgtgtgcctgtgtcccgggggattctcaggaccgcactgcgagaaggggctggtggagaagtcagcgggggacgtggataccttggcctttgacgggcggacctttgtcgagtacctcaacgctgtgaccgagagcgaactggccaatgagatccccgtccccgaaactctggattccggggcccttcacagcgagaaggcactgcagagcaaccactttgaactgagcctgcgcactgaggccacgcaggggctggtgctctggagtggcaaggccacggagcgggcagactatgtggcactggccattgtggacgggcacctgcaactgagctacaacctgggctcccagcccgtggtgctgcgttccaccgtgcccgtcaacaccaa

SEQ ID NO: 811 - DNA, 3385 bp, Homo sapiens
  source 1..3385: mol_type = unassigned DNA
ttccaagcgaactggccaatgagatccccgtgtgagtagagctcggcgccccccgctccctctcactcccactcctccatccttcctggtggggagcagagtccggagcccccggggaactttccatcccttgtggcggaggatgggggtccggcgctatttggctgcaagaggccgtttcctgcctcagaagtgcagtcgcccctcccagggcacaggccgagggtcgccccacagccaacccccaccactgaggctgtacacacctgtgcgcatatgcatgcatgtctgtgtccgtgtgcacttccgcgtgtgtgaacatgcagctgtgtctgtgcgtgtctatgtatatggagtggatgtgcaagtgtgtgtgaatatccagctgtgtgtgtgcatgggtccatgtatatgtgtgtgtgtatatgtgggggggacatgtagatatgcgtgtgtgactatgcggccgtgtgtgtgcatggctccatgtatgtgtgtgtatatgagggagacatgcaggtatgtgtccgtgtgtgtgtgtgtgcatatgggtccatgtatgtgtgtgtatatgagggagacacgcaggtgtgtgtctgagtgtgtgcgcacatgggtccatgtatgtgtgtgtataggtgagggagacatgcatgtgtgtgtccgtgtgtgtgcatgggtccatgtgtgtatagtgtgtacacatgggtccatgtatgtgtgtgtatatgagggagacacgcaggtgtgtgtccgagtgtgtgtgcatgggtccatgtgtgtatagtgtgtgcacatgggtccatgtatgtgtgtgtatatgagggagacacgcaggtgtgtgtccgagtgtgtgtccatgggtccatgtatgtgtgtgtatatgtgggggagacaggtgtgtgtccgagtgtgtgcatgggtccgtgtatatgcgtgtatatatggggggatatgtagatgtgtgtgtgtatgaacaggtgtaagtggggagcactcaggtgtgtctgtgtgtgttcgtgtacacgtgtgtatgtgtgtgaacatggaggggtgtgtgtgtccgtgtgtaggtttgcgtgcatgcacacatgcatgtgtgtactggggcatccaagcccctggtctccactccataccaccctacgcctacctccttgatctctgcgcccagccttggctgtgctcccctgctgtctgcacgtgggtgtctgcacgtgggtgtctgcatgtgggtgtctgtgccctcaagtgtctcgtgtctgcacgtgggtgtctgcaccctcacgtgtctcgtgtccgcacaagcatgtgtaggtgtccctgctgggctctttggtgggcggccagtgatcctcgaggtcacgcatgtcttctgtgggtgcctgctccttgcaccccacagtgttgagatgggtttgcattggccccgcctgtcccctgctcacccgcctccctctcttcctgcttctaagccccgaaactctggattccggggcccttcacaggtgagcacgtggcagcagtgcctgcagacccctggctggcccatctgtcctcccgcccgtctctctgatctctctctgccaggctgcccctgtctccatccctcttctccctcccactgtcggtgtctgcccaccagccacccctgggtcccgtcacagcccttgtggcctccgcagctggggcccttgtcctcccgcctcccccaccctgtcctgttgccaccttcctagaggccctgacctgccctctgccctccagcgagaaggcactgcagagcaaccactttgaactgagcctgcgcactgaggccacgcaggggctggtgctctggagtggcaaggccacggagcgggcagactatgtggcactggccattgtggacgggcacctgcaactgagctacaacctgggctcccagcccgtggtgctgcgttccaccgtgcccgtcaacaccaaccgctggttgcgggtcgtggcacatagggagcagagggaaggttccctgcaggtgggcaatgaggcccctgtgaccggctcctccccgctgggcgccacgcagctggacactgatggagccctgtggcttgggggcctgccggagctgcccgtgggcccagcactgcccaaggcctacggcacaggctttgtgggctgcttgcgggacgtggtggtgggccggcacccgctgcacctgctggaggacgccgtcaccaagccagagctgcggccctgccccaccccatgagctggcaccagagccccgcgcccgctgtaattattttctatttttgtaaacttgttgctttttgatatgattttcttgcctgagtgttggccggagggactgctggcccggcctcccttccgtccaggcagccgtgctgcagacagacctagtgccgagggatggacaggcgaggtggcagcgtggagggctcggcgtggatggcagcctcaggacacacacccctgcctcaaggtgctgagcccccgccttgcactgcgcctgccccacggtgtccccgccgggaagcagccccggctcctgaatcaccctcgctccgtcaggcgggactcgtgtcccagagaggaaggggctgctgaggtctgatggggcccttcctccgggtgaccccacagggcctttccaagcccccatttgagctgctccttcctgtgtgtgctctgggccctgcctcggcctcctgcgccaatactgtgacttccaaacaatgttactgctgggcacagctctgcgttgctcccgtgctgcctgcgccagccccaggctgctgaggagcagaggccagaccagggccgatctgggtgtcctgaccctcagctggccctgcccagccaccctggacgtgaccgtatccctctgccacaccccaggccctgcgaggggctatcgagaggagctcactgtgggatggggttgacctctgccgcctgcctgggtatctgggcctggccatggctgtgttcttcatgtgttgattttatttgacccctggagtggtgggtctcatctttcccatctcgcctgagagcggctgagggctgcctcactgcaaatcctccccacagcgtcagtgaaagtcgtccttgtctcagaatgaccaggggccagccagtgtctgaccaaggtcaaggggcaggtgcagaggtggcagggatggctccgaagccagaaatgccttaaactgcaacgtcccgtcccttccccacccccatcccatccccacccccagccccagcccagtcctcctaggagcaggacccgatgaagcgggcggcggtggggctgggtgccgtgttactaactctagtatgtttctgtgtcaatcgctgtgaaataaagtctgaaaacttt

SEQ ID NO: 812 - DNA, 7394 bp, Homo sapiens
  source 1..7394: mol_type = unassigned DNA
cccgtccccggcgcggcccgcgcgctcctccgccgcctctcgcctgcgccatggccggccggtcccacccgggcccgctgcggccgctgctgccgctccttgtggtggccgcgtgcgtcctgcccggagccggcgggacatgcccggagcgcgcgctggagcggcgcgaggaggaggcgaacgtggtgctcaccgggacggtggaggagatcctcaacgtggacccggtgcagcacacgtactcctgcaaggttcgggtctggcggtacttgaagggcaaagacctggtggcccgggagagcctgctggacggcggcaacaaggtggtgatcagcggctttggagaccccctcatctgtgacaaccaggtgtccactggggacaccaggatcttctttgtgaaccctgcacccccatacctgtggccagcccacaagaacgagctgatgctcaactccagcctcatgcggatcaccctgcggaacctggaggaggtggagttctgtgtggaagataaacccgggacccacttcactccagtgcctccgacgcctcctgatgcgtgccggggaatgctgtgcggcttcggcgccgtgtgcgagcccaacgcggaggggccgggccgggcgtcctgcgtctgcaagaagagcccgtgccccagcgtggtggcgcctgtgtgtgggtcggacgcctccacctacagcaacgaatgcgagctgcagcgggcgcagtgcagccagcagcgccgcatccgcctgctcagccgcgggccgtgcggctcgcgggacccctgctccaacgtgacctgcagcttcggcagcacctgtgcgcgctcggccgacgggctgacggcctcgtgcctgtgccccgcgacctgccgtggcgcccccgaggggaccgtctgcggcagcgacggcgccgactaccccggcgagtgccagctcctgcgccgcgcctgcgcccgccaggagaatgtcttcaagaagttcgacggcccttgtgacccctgtcagggcgccctccctgacccgagccgcagctgccgtgtgaacccgcgcacgcggcgccctgagatgctcctacggcccgagagctgccctgcccggcaggcgccagtgtgtggggacgacggagtcacctacgaaaacgactgtgtcatgggccgatcgggggccgcccggggtctcctcctgcagaaagtgcgctccggccagtgccagggtcgagaccagtgcccggagccctgccggttcaatgccgtgtgcctgtcccgccgtggccgtccccgctgctcctgcgaccgcgtcacctgtgacggggcctacaggcccgtgtgtgcccaggacgggcgcacgtatgacagtgattgctggcggcagcaggctgagtgccggcagcagcgtgccatccccagcaagcaccagggcccgtgtgaccaggccccgtccccatgcctcggggtgcagtgtgcatttggggcgacgtgtgctgtgaagaacgggcaggcagcgtgtgaatgcctgcaggcgtgctcgagcctctacgatcctgtgtgcggcagcgacggcgtcacatacggcagcgcgtgcgagctggaggccacggcctgtaccctcgggcgggagatccaggtggcgcgcaaaggaccctgtgaccgctgcgggcagtgccgctttggagccctgtgcgaggccgagaccgggcgctgcgtgtgcccctctgaatgcgtggctttggcccagcccgtgtgtggctccgacgggcacacgtaccccagcgagtgcatgctgcacgtgcacgcctgcacacaccagatcagcctgcacgtggcctcagctggaccctgtgagacctgtggagatgccgtgtgtgcttttggggctgtgtgctccgcagggcagtgtgtgtgtccccggtgtgagcaccccccgcccggccccgtgtgtggcagcgacggtgtcacctacggcagtgcctgcgagctacgggaagccgcctgcctccagcagacacagatcgaggaggcccgggcagggccgtgcgagcaggccgagtgcggttccggaggctctggctctggggaggacggtgactgtgagcaggagctgtgccggcagcgcggtggcatctgggacgaggactcggaggacgggccgtgtgtctgtgacttcagctgccagagtgtcccaggcagcccggtgtgcggctcagatggggtcacctacagcaccgagtgtgagctgaagaaggccaggtgtgagtcacagcgagggctctacgtagcggcccagggagcctgccgaggccccaccttcgccccgctgccgcctgtggcccccttacactgtgcccagacgccctacggctgctgccaggacaatatcaccgcagcccggggcgtgggcctggctggctgccccagtgcctgccagtgcaacccccatggctcttacggcggcacctgtgacccagccacaggccagtgctcctgccgcccaggtgtggggggcctcaggtgtgaccgctgtgagcctggcttctggaactttcgaggcatcgtcaccgatggccggagtggctgtacaccctgcagctgtgatccccaaggcgccgtgcgggatgactgtgagcagatgacggggctgtgctcgtgtaagcccggggtggctggacccaagtgtgggcagtgtccagacggccgtgccctgggccccgcgggctgtgaagctgacgcttctgcgcctgcgacctgtgcggagatgcgctgtgagttcggtgcgcggtgcgtggaggagtctggctcagcccactgtgtctgcccgatgctcacctgtccagaggccaacgctaccaaggtctgtgggtcagatggagtcacatacggcaacgagtgtcagctgaagaccatcgcctgccgccagggcctgcaaatctctatccagagcctgggcccgtgccaggaggctgttgctcccagcactcacccgacatctgcctccgtgactgtgaccaccccagggctcctcctgagccaggcactgccggccccccccggcgccctccccctggctcccagcagtaccgcacacagccagaccacccctccgccctcatcacgacctcggaccactgccagcgtccccaggaccaccgtgtggcccgtgctgacggtgccccccacggcaccctcccctgcacccagcctggtggcgtccgcctttggtgaatctggcagcactgatggaagcagcgatgaggaactgagcggggaccaggaggccagtgggggtggctctggggggctcgagcccttggagggcagcagcgtggccacccctgggccacctgtcgagagggcttcctgctacaactccgcgttgggctgctgctctgatgggaagacgccctcgctggacgcagagggctccaactgccccgccaccaaggtgttccagggcgtcctggagctggagggcgtcgagggccaggagctgttctacacgcccgagatggctgaccccaagtcagaactgttcggggagacagccaggagcattgagagcaccctggacgacctcttccggaattcagacgtcaagaaggattttcggagtgtccgcttgcgggacctggggcccggcaaatccgtccgcgccattgtggatgtgcactttgaccccaccacagccttcagggcacccgacgtggcccgggccctgctccggcagatccaggtgtccaggcgccggtccttgggggtgaggcggccgctgcaggagcacgtgcgatttatggactttgactggtttcctgcgtttatcacgggggccacgtcaggagccattgctgcgggagccacggccagagccaccactgcatcgcgcctgccgtcctctgctgtgacccctcgggccccgcaccccagtcacacaagccagcccgttgccaagaccacggcagcccccaccacacgtcggccccccaccactgcccccagccgtgtgcccggacgtcggcccccggccccccagcagcctccaaagccctgtgactcacagccctgcttccacggggggacctgccaggactgggcattgggcgggggcttcacctgcagctgcccggcaggcaggggaggcgccgtctgtgagaaggtgcttggcgcccctgtgccggccttcgagggccgctccttcctggccttccccactctccgcgcctaccacacgctgcgcctggcactggaattccgggcgctggagcctcaggggctgctgctgtacaatggcaacgcccggggcaaggacttcctggcattggcgctgctagatggccgcgtgcagctcaggtttgacacaggttcggggccggcggtgctgaccagtgccgtgccggtagagccgggccagtggcaccgcctggagctgtcccggcactggcgccggggcaccctctcggtggatggtgagacccctgttctgggcgagagtcccagtggcaccgacggcctcaacctggacacagacctctttgtgggcggcgtacccgaggaccaggctgccgtggcgctggagcggaccttcgtgggcgccggcctgagggggtgcatccgtttgctggacgtcaacaaccagcgcctggagcttggcattgggccgggggctgccacccgaggctctggcgtgggcgagtgcggggaccacccctgcctgcccaacccctgccatggcggggccccatgccagaacctggaggctggaaggttccattgccagtgcccgcccggccgcgtcggaccaacctgtgccgatgagaagagcccctgccagcccaacccctgccatggggcggcgccctgccgtgtgctgcccgagggtggtgctcagtgcgagtgccccctggggcgtgagggcaccttctgccagacagcctcggggcaggacggctctgggcccttcctggctgacttcaacggcttctcccacctggagctgagaggcctgcacacctttgcacgggacctgggggagaagatggcgctggaggtcgtgttcctggcacgaggccccagcggcctcctgctctacaacgggcagaagacggacggcaagggggacttcgtgtcgctggcactgcgggaccgccgcctggagttccgctacgacctgggcaagggggcagcggtcatcaggagcagggagccagtcaccctgggagcctggaccagggtctcactggagcgaaacggccgcaagggtgccctgcgtgtgggcgacggcccccgtgtgttgggggagtccccgaaatcccgcaaggttccgcacaccgtcctcaacctgaaggagccgctctacgtagggggcgctcccgacttcagcaagctggcccgtgctgctgccgtgtcctctggcttcgacggtgccatccagctggtctccctcggaggccgccagctgctgaccccggagcacgtgctgcggcaggtggacgtcacgtcctttgcaggtcacccctgcacccgggcctcaggccacccctgcctcaatggggcctcctgcgtcccgagggaggctgcctatgtgtgcctgtgtcccgggggattctcaggaccgcactgcgagaaggggctggtggagaagtcagcgggggacgtggataccttggcctttgacgggcggacctttgtcgagtacctcaacgctgtgaccgagagcgaactggccaatgagatccccgtccccgaaactctggattccggggcccttcacagcgagaaggcactgcagagcaaccactttgaactgagcctgcgcactgaggccacgcaggggctggtgctctggagtggcaaggccacggagcgggcagactatgtggcactggccattgtggacgggcacctgcaactgagctacaacctgggctcccagcccgtggtgctgcgttccaccgtgcccgtcaacaccaaccgctggttgcgggtcgtggcacatagggagcagagggaaggttccctgcaggtgggcaatgaggcccctgtgaccggctcctccccgctgggcgccacgcagctggacactgatggagccctgtggcttgggggcctgccggagctgcccgtgggcccagcactgcccaaggcctacggcacaggctttgtgggctgcttgcgggacgtggtggtgggccggcacccgctgcacctgctggaggacgccgtcaccaagccagagctgcggccctgccccaccccatgagctggcaccagagccccgcgcccgctgtaattattttctatttttgtaaacttgttgctttttgatatgattttcttgcctgagtgttggccggagggactgctggcccggcctcccttccgtccaggcagccgtgctgcagacagacctagtgccgagggatggacaggcgaggtggcagcgtggagggctcggcgtggatggcagcctcaggacacacacccctgcctcaaggtgctgagcccccgccttgcactgcgcctgccccacggtgtccccgccgggaagcagccccggctcctgaatcaccctcgctccgtcaggcgggactcgtgtcccagagaggaaggggctgctgaggtctgatggggcccttcctccgggtgaccccacagggcctttccaagcccccatttgagctgctccttcctgtgtgtgctctgggccctgcctcggcctcctgcgccaatactgtgacttccaaacaatgttactgctgggcacagctctgcgttgctcccgtgctgcctgcgccagccccaggctgctgaggagcagaggccagaccagggccgatctgggtgtcctgaccctcagctggccctgcccagccaccctggacgtgaccgtatccctctgccacaccccaggccctgcgaggggctatcgagaggagctcactgtgggatggggttgacctctgccgcctgcctgggtatctgggcctggccatggctgtgttcttcatgtgttgattttatttgacccctggagtggtgggtctcatctttcccatctcgcctgagagcggctgagggctgcctcactgcaaatcctccccacagcgtcagtgaaagtcgtccttgtctcagaatgaccaggggccagccagtgtctgaccaaggtcaaggggcaggtgcagaggtggcagggatggctccgaagccagaaatgccttaaactgcaacgtcccgtcccttccccacccccatcccatccccacccccagccccagcccagtcctcctaggagcaggacccgatgaagcgggcggcggtggggctgggtgccgtgttactaactctagtatgtttctgtgtcaatcgctgtgaaataaagtctgaaaactttaaaagc

SEQ ID NO: 813 - DNA, 2291 bp, Homo sapiens
  source 1..2291: mol_type = unassigned DNA
aagacttcctggaagaggtcccagcgtgagtgtcgcttctggcatctgtccttctggccagcctgtggtctggccaagtgatgtaaccctcctctccagcctgtgcacaggcagcctgggaacagctccatccccacccctcagctataaatagggcatcgtgacccggccgggggaagaagctgccgttgttctgggtactacagcagaagggtatgcggaagcgagcaccccagtctgagatggctcctgccggtgtgagcctgagggccaccatcctctgcctcctggcctgggctggcctggctgcaggtgaccgggtgtacatacaccccttccacctcgtcatccacaatgagagtacctgtgagcagctggcaaaggccaatgccgggaagcccaaagaccccaccttcatacctgctccaattcaggccaagacatcccctgtggatgaaaaggccctacaggaccagctggtgctagtcgctgcaaaacttgacaccgaagacaagttgagggccgcaatggtcgggatgctggccaacttcttgggcttccgtatatatggcatgcacagtgagctatggggcgtggtccatggggccaccgtcctctccccaacggctgtctttggcaccctggcctctctctatctgggagccttggaccacacagctgacaggctacaggcaatcctgggtgttccttggaaggacaagaactgcacctcccggctggatgcgcacaaggtcctgtctgccctgcaggctgtacagggcctgctagtggcccagggcagggctgatagccaggcccagctgctgctgtccacggtggtgggcgtgttcacagccccaggcctgcacctgaagcagccgtttgtgcagggcctggctctctatacccctgtggtcctcccacgctctctggacttcacagaactggatgttgctgctgagaagattgacaggttcatgcaggctgtgacaggatggaagactggctgctccctgatgggagccagtgtggacagcaccctggctttcaacacctacgtccacttccaagggaagatgaagggcttctccctgctggccgagccccaggagttctgggtggacaacagcacctcagtgtctgttcccatgctctctggcatgggcaccttccagcactggagtgacatccaggacaacttctcggtgactcaagtgcccttcactgagagcgcctgcctgctgctgatccagcctcactatgcctctgacctggacaaggtggagggtctcactttccagcaaaactccctcaactggatgaagaaactatctccccggaccatccacctgaccatgccccaactggtgctgcaaggatcttatgacctgcaggacctgctcgcccaggctgagctgcccgccattctgcacaccgagctgaacctgcaaaaattgagcaatgaccgcatcagggtgggggaggtgctgaacagcattttttttgagcttgaagcggatgagagagagcccacagagtctacccaacagcttaacaagcctgaggtcttggaggtgaccctgaaccgcccattcctgtttgctgtgtatgatcaaagcgccactgccctgcacttcctgggccgcgtggccaacccgctgagcacagcatgaggccagggccccagaacacagtgcctggcaaggcctctgcccctggcctttgaggcaaaggccagcagcagataacaaccccggacaaatcagcgatgtgtcacccccagtctcccaccttttcttctaatgagtcgactttgagctggaaagcagccgtttctccttggtctaagtgtgctgcatggagtgagcagtagaagcctgcagcggcacaaatgcacctcccagtttgctgggtttattttagagaatgggggtggggaggcaagaaccagtgtttagcgcgggactactgttccaaaaagaattccaaccgaccagcttgtttgtgaaacaaaaaagtgttcccttttcaagttgagaacaaaaattgggttttaaaattaaagtatacatttttgcattgccttcggtttgtatttagtgtcttgaatgtaagaacatgacctccgtgtagtgtctgtaataccttagttttttccacagatgcttgtgatttttgaacaatacgtgaaagatgcaagcacctgaatttctgtttgaatgcggaaccatagctggttatttctcccttgtgttagtaataaacgtcttgccacaataagcctccaaaaa

SEQ ID NO: 814 - DNA, 701 bp, Homo sapiens
  source 1..701: mol_type = unassigned DNA
tcattccagatggagaaggaggagacaacccgggagctgctgctgcccaactggcagggtagtggctcccacgggctgaccatcgcccagagggacgacggcgtctttgtgcaggaggtgacgcagaactcccctgcggcccgcactggggtggtcaaggagggggaccagattgtgggtgccaccatctactttgacaacctgcagtcgggtgaggtgacccagctgctgaacaccatggggcaccacacggtgggcctgaagctgcaccgcaagggggaccgctctcccgagcctggccagacctggacccgtgaagtcttcagctcctgcagctctgaagtggttctggactgtagaagcggccaggaagaaaaccaccccctcttaaggttgtttttgtgaccgttctttggagcattgttctaaaaatgggaaattacatattgctgtgccaagggcaacaaacacctgcagttaaaggaataccttccgcgaggcggcttttcggagcatgcatgtttatagctccagccaggccagaccgagggctgctgcataagccctgcttggtgcatttctttacttgcaaggggacagagtgtgggcttaggtttgggactagagggggctttggcaactatggtgctcaggtgattatccttcgctcgtttatccaataaacatttatcaagcatctg

SEQ ID NO: 815 - DNA, 1024 bp, Homo sapiens
  source 1..1024: mol_type = unassigned DNA
agctgctctgccgcggggactgcaccgcccgccctgccagacccgcccggaacggggctcgtcgccgccagtagccgcagcaccgcagccttgggcctcgcgccggctatggccgtgccctggggctgagccctcaggttgtgaccgagattcccgacgagagagactgaggggaagagaggaaggaggggcgggctcctggcaaggcattcgctcctgagcggaatcctgcaaagatggagaaggaggagacaacccgggagctgctgctgcccaactggcagggtagtggctcccacgggctgaccatcgcccagagggacgacggcgtctttgtgcaggaggtgacgcagaactcccctgcggcccgcactggggtggtcaaggagggggaccagattgtgggtgccaccatctactttgacaacctgcagtcgggtgaggtgacccagctgctgaacaccatggggcaccacacggtgggcctgaagctgcaccgcaagggggaccgctctcccgagcctggccagacctggacccgtgaagtcttcagctcctgcagctctgaagtggttctgaacacaccacagccatcagcactggaatgcaaagaccagaacaaacagaaggaagccagcagccaagccggggcagtttcagtctccaccccaaatgcaggactgtagaagcggccaggaagaaaaccaccccctcttaaggttgtttttgtgaccgttctttggagcattgttctaaaaatgggaaattacatattgctgtgccaagggcaacaaacacctgcagttaaaggaataccttccgcgaggcggcttttcggagcatgcatgtttatagctccagccaggccagaccgagggctgctgcataagccctgcttggtgcatttctttacttgcaaggggacagagtgtgggcttaggtttgggactagagggggctttggcaactatggtgctcaggtgattatccttcgctcgtttatccaataaacatttatcaagca

SEQ ID NO: 816 - DNA, 793 bp, Homo sapiens
  source 1..793: mol_type = unassigned DNA
cagaggccagcatccaagctggtgctggagacggcgagtgggaagagtctgaagtcaaactgaaaaagtccaagatcaaaatgcccaagtttaatttttccaaacctaaagggaaaggtggtgtcactggctcaccagaagcatcaatttctgggtccaaaggtgacctgaaaagttcaaaggccagcctgggctctctggaaggagaggcagaggccgaagcctcttcaccgaaaggcaaattctccttatttaaaagtaagaagccacggcaccgctcaaattcattcagtgatgaaagagagttctctggaccttccaccccgacggggacgctggagtttgaagaacacaccacagccatcagcactggaatgcaaagaccagaacaaacagaaggaagccagcagccaagccggggcagtttcagtctccaccccaaatgcaggactgtagaagcggccaggaagaaaaccaccccctcttaaggttgtttttgtgaccgttctttggagcattgttctaaaaatgggaaattacatattgctgtgccaagggcaacaaacacctgcagttaaaggaataccttccgcgaggcggcttttcggagcatgcatgtttatagctccagccaggccagaccgagggctgctgcataagccctgcttggtgcatttctttacttgcaaggggacagagtgtgggcttaggtttgggactagagggggctttggcaactatggtgctcaggtgattatccttcgctcgtttatccaataaacatttatcaagc

SEQ ID NO: 817 - DNA, 584 bp, Homo sapiens
  source 1..584: mol_type = unassigned DNA
gggcttggcgtgggaggagggctaagctgcgctcgctggaaccctgcgctccagcggtgcgcgccaggagagggggcccgaagcgaggtctcgcctagagttggaaaggcagcgtgcttagggttgtgaccgagattcccgacgagagagactgaggggaagagaggaaggaggggcgggctcctggcaaggcattcgctcctgagcggaatcctgcaaagatggagaaggaggagacaacccgggagctgctgctgcccaactggcagggtagtggctcccacgggctgaccatcgcccagagggacgacggcgtctttgtgcaggaggtgacgcagaactcccctgcggcccgcactggggtggtcaaggagggggaccagattgtgggtgccaccatctactttgacaacctgcagtcgggtgaggtgacccagctgctgaacaccatggggcaccacacggtgggcctgaagctgcaccgcaagggggaccgctctcccgagcctggccagacctggacccgtgaagtcttcagctcctgcagctctgaagtggttctgaacacaccacagccatcagca

SEQ ID NO: 818 - DNA, 18787 bp, Homo sapiens
  source 1..18787: mol_type = unassigned DNA
acaagagccgcctccgcgcacgggggcccggccactcggagctgctctgccgcggggactgcaccgcccgccctgccagacccgcccggaacggggctcgtcgccgccagtagccgcagcaccgcagccttgggcctcgcgccggctatggccgtgccctggggctgagccctcaggttgtgaccgagattcccgacgagagagactgaggggaagagaggaaggaggggcgggctcctggcaaggcattcgctcctgagcggaatcctgcaaagatggagaaggaggagacaacccgggagctgctgctgcccaactggcagggtagtggctcccacgggctgaccatcgcccagagggacgacggcgtctttgtgcaggaggtgacgcagaactcccctgcggcccgcactggggtggtcaaggagggggaccagattgtgggtgccaccatctactttgacaacctgcagtcgggtgaggtgacccagctgctgaacaccatggggcaccacacggtgggcctgaagctgcaccgcaagggggaccgctctcccgagcctggccagacctggacccgtgaagtcttcagctcctgcagctctgaagtggttctgagcggggatgatgaggagtaccagcgcatctacaccacgaagatcaagccacggctgaagtcggaagatggagtggaaggagacctcggggagacccagagccgtaccatcacagtgaccagaagggtcacggcctacactgtggatgtgactggccgggaaggagccaaggacatagacatcagtagccctgaattcaagatcaagattccaagacatgaactgactgaaatctccaatgtggatgtggagacccagtctgggaagaccgtgatcagactgccctcgggctcgggggcagcctctccgacaggctctgctgtggatatccgagcaggggccatttctgcttcaggaccagagctccaaggtgctggccactcgaagctccaggtcaccatgcctgggataaaggtgggaggctcaggtgtcaatgtcaatgcaaagggcttggacttgggtggcagaggaggggtccaagttccagcagtggacatttcatcttctcttgggggtagggcagtagaggtacagggcccatctctggagagtggtgatcatggcaaaattaaatttcccaccatgaaagtgccgaaatttggtgtctcaacagggcgtgagggccagacaccaaaggcagggctgagggtttctgcacctgaagtctctgtggggcacaagggcggcaagccaggcttgactatccaagcccctcagctggaagtcagtgtgccctctgccaatattgagggccttgaggggaagctgaagggcccccaaatcactgggccatcacttgagggtgacctaggcctgaaaggtgccaagccacaggggcacattggggtggatgcctctgctccccaaattgggggtagcatcactggccccagtgtggaagttcaggcccctgacattgatgttcaggggcctgggagcaaactgaatgtgcccaagatgaaagtccccaagttctctgtatcaggtgcaaagggagaggaaactgggattgatgtgacactgcctacaggtgaagtgactgttcctggggtctctggggatgtcagcctgcctgagattgctactggtgggctggaaggaaagatgaaaggtactaaagtgaagactcctgaaatgattattcagaaacctaaaatctccatgcaggatgtggatctgagccttgggtctcctaaactgaaaggagatattaaggtttctgctcctggggtgcaaggtgatgttaaaggccctcaagtggcacttaaaggctccagagtggacatagagacaccaaacctagagggaaccttgacaggccctaggcttggcagtccttccgggaaaaccggaacctgtaggatctctatgtcagaagtagacttaaatgtggccgcacctaaagtgaaagggggtgtagatgtcacactccccagagtagaagggaaagtcaaagtccctgaagttgatgtcagaggccccaaagtggatgtcagtgccccagatgtcgaagcgcatggcccagaatggaacctgaaaatgcccaagatgaaaatgcccacgttcagcactccaggagccaaaggggaaggtccagatgttcatatgactctacccaaaggagatatcagtatttcagggcccaaggtcaatgtggaagccccagatgtcaacttggagggtctggggggaaaacttaaaggccccgatgttaagctgcctgatatgagtgtcaagacaccaaagatctccatgcctgatgtagatttgcacgtgaaaggtacaaaggtgaagggagagtatgatgtaactgtaccaaagctggaaggagaactcaaaggcccaaaagtggacattgatgccccagatgtggatgttcatggcccagactggcacttgaagatgcccaagatgaaaatgcccaaattcagtgtgccagggttcaaagcagagggcccagaagtggatgtgaacctgcccaaggctgatgtggacatttccgggcccaagatagatgttactgctcctgatgtgagcattgaggaaccagaagggaaattgaaagggcccaagtttaagatgcctgagatgaacatcaaagtccccaagatctccatgcctgatgtggacttacatctgaaaggccctaacgtaaagggagaatatgatgtcacaatgccaaaggttgaaagtgagattaaagttcctgatgttgaacttaaaagtgccaaaatggacattgatgtcccagatgtggaggttcaaggcccagactggcacctgaagatgcccaagatgaaaatgcccaagttcagcatgcctggcttcaaagcagagggcccagaagtggatgtgaacctgcccaaggctgatgtggacatctcaggacccaaggtgggtgttgaagttccagatgtgaatattgaaggacctgaaggaaagctgaagggccccaagttcaagatgccagagatgaatatcaaggcccccaagatctccatgcctgatgtggacttgcatatgaaaggtcctaaagtaaagggagaatatgatatgacagtgccaaagctggaaggggacctgaaaggcccaaaagtagatgtcagtgccccagatgttgaaatgcagggtcctgactggaacttgaagatgccaaagattaaaatgcccaaatttagcatgcccagcctcaaaggagaggggccagaatttgatgtgaacctgtccaaagcgaatgtggacatttctgcaccaaaagtagatactaatgctccagatctgagccttgaaggacctgaagggaagttgaaaggcccgaagtttaagatgcctgagatgcacttcagagctcctaagatgtctttgccagatgttgacctggatcttaaaggacccaaaatgaaaggaaatgtagatatctctgcaccaaagatagagggtgaaatgcaggttccagatgtggacatcagaggtcccaaggtagatattaaagcaccagatgtggaaggccaaggcctggactggagcctgaaaatacccaagatgaaaatgcccaagttcagcatgcccagcctcaaaggcgagggcccagaagtggatgtgaacttgcctaaggctgacgttgttgtctcaggacccaaggtggacatcgaagccccagatgtgagcctcgaaggtccagaagggaagctgaagggtcccaagtttaagatgcctgagatgcatttcaagacccccaagatctccatgcctgatgtggacttacacttgaaaggccccaaagtcaaaggggatgtggatgtgtctgtgcccaaggtagaaggtgaaatgaaagtgccagatgttgaaatcaaaggacccaaaatggacattgatgccccagatgtggaggttcaaggcccagactggcacctgaagatgcccaagatgaaaatgcccaagtttagcatgcctggcttcaaaggagagggccgagaagtggatgtgaacctgcccaaggctgacattgatgtctcaggacccaaggtggatgttgaagtcccagatgtgagccttgagggcccggaaggaaagctgaagggccccaagtttaagatgcctgagatgcacttcaaggcccccaagatctccatgcctgatgtggacctgaatcttaaggggccaaaattgaagggagatgtggatgtgtccttgcctgaggtagaaggtgaaatgaaagtgccagatgttgacattaaagggcccaaagttgacattagtgctccagatgtggatgttcatggcccagattggcacctgaagatgcccaaggtgaaaatgcccaagttcagcatgcccggcttcaaaggagagggccctgaagtggatgtgaagctgcccaaagctgacgttgatgtctcaggacccaaaatggatgctgaagttccagatgtgaatattgaaggtccagacgcaaaactaaaaggtcccaaattcaagatgccagaaatgagtataaagcctcagaagatatccataccagatgttggtttgcatttgaaaggtcctaaaatgaaaggagattatgatgtaacagttccaaaagtagaaggagagataaaagctcctgatgttgacatcaaaggccccaaagttgatattaatgcaccagatgtggaggttcatggcccagactggcacctgaagatgcccaaggtaaaaatgcccaagttcagcatgcctggctttaaaggagagggcccagaggtggatatgaacctgcccaaggctgaccttggtgtttcaggacccaaggtggacattgatgttccagatgtgaatcttgaagctccagaggggaaactaaaaggccctaagttcaagatgccaagcatgaatatacagacgcacaaaatctctatgcctgatgttggacttaatttgaaagcccctaaactgaaaactgatgtagatgtttcccttcccaaagtggaaggagacttgaagggtcctgaaattgatgtgaaagcccctaagatggatgtgaatgttggtgatattgatattgaaggtccagaagggaagttgaagggccccaagtttaagatgcctgagatgcatttcaaggcccccaagatctccatgcccgatgtggacttacacttgaaaggccccaaagtcaaaggggatatggatgtgtctgtgcccaaggtagaaggtgaaatgaaagtgccagatgttgacattaaagggcccaaagtggacattgatgccccagatgtggaggttcacgacccagattggcacctgaaaatgcccaagatgaaaatgcccaagttcagtatgcctggcttcaaagcagagggccctgaagtggatgtgaatctgccaaaggctgacattgatgtgtctggacccagtgtggacactgatgctcctgatttggatattgagggaccagaaggaaagttgaaaggctccaaatttaagatgcccaagttgaatataaaagctcccaaggtctccatgccagatgtggacttgaatttgaagggacccaaactgaagggagagatagatgcttctgtgccagaactggaaggtgatctcagagggccgcaagttgatgtcaaaggtccttttgtggaagcggaggtgcccgatgttgatctggagtgtcctgatgcaaagttgaaagggcccaagtttaagatgcctgagatgcacttcaaggcccccaagatctccatgcctgatgtggacttacacctgaaaggccccaaagtcaaaggggatgcggatgtgtcggtgccaaaattggagggagatttaacaggccccagtgtgggtgtggaggtgcctgatgttgagctggagtgtcctgatgcaaagttgaaaggccctaaatttaagatgccagacatgcacttcaaggcccccaagatctccatgcctgatgtggacttacacttgaaaggccccaaagtcaaaggggatgtggatgtgtcggtgccaaaattggagggagatttaacaggtcccagtgtgggtgtggaggtgcctgatgttgagctggagtgtcctgatgcaaagttgaaagggcccaagtttaagatgcctgagatgcacttcaagacccccaagatctccatgcctgatgtggacttacacctgaaaggccccaaagtcaaaggggatatggatgtgtctgtgcccaaggtagaaggtgaaatgaaagtgccagatgttgacatcaaaggacccaaaatggacattgatgccccagatgtggatgttcatggcccagactggcacctgaagatgcccaagatgaaaatgcccaagttcagcatgcctggcttcaaagcagagggcccagaagtggatgtgaacttgcccaaggctgatgttgttgtctcaggacccaaggtggatgttgaagtcccagatgtgagccttgaaggtccagaagggaagctgaagggccccaagcttaagatgcctgagatgcacttcaaggcccccaagatctccatgcctgatgtggacttacacttgaaaggccccaaagtcaaaggggatgtggatgtgtctttgccaaaattggagggagatttaacaggccccagtgtggatgtggaggtgcctgatgttgagctggagtgtcctgatgcaaagttgaaagggcccaagtttaagatgcctgagatgcacttcaagacccccaagatctccatgcctgatgtgaacttaaacttgaaaggccccaaagtcaaaggggatatggatgtgtctgttcccaaggtagaaggtgaaatgaaagtgccagatgttgacatcagagggcccaaagtggacattgatgccccagatgtggatgttcatggcccagactggcacctgaagatgcctaagatgaaaatgcccaagttcagcatgcctggcttcaaaggagagggcccagaagtggatgtgaacttgcccaaggctgacgttgatgtctcaggacccaaggtggatgttgaagtcccagatgtgagccttgaaggtccagaagggaagctgaagggccccaagtttaagatgcctgagatgcacttcaagacccccaagatctccatgcctgatgttgatttcaatttaaagggacccaaaatcaaaggagatgttgatgtttctgccccaaagctggagggagagttaaaaggtccagaattggatgtcaaaggtcccaaattagatgctgacatgccagaagtagctgtggaaggcccaaatggcaagtggaaaactcctaagttcaagatgccagatatgcactttaaagctcccaaaatctctatgccagacctcgatctacacttgaagagccccaaggcaaaaggagaggtggatgtagatgttcccaaattggaaggggaccttaaagggccacatgtggatgtcagtgggccagacattgacattgagggaccagagggcaaattgaaaggccctaagttcaagatgcctgatatgcatttcaaagcccccaatatttctatgcctgatgttgatctaaatctcaaaggacccaaaatcaagggggatgtggatgtgtctgtgcctgaggtagaaggtaaacttgaagtaccagatatgaacatcaggggccccaaagttgatgtaaatgcccccgatgtccaagctccagactggcacctgaagatgcccaagatgaaaatgcccaagttcagcatgcctggcttcaaagcagagggccctgaagtagacgtcaacttgcctaaggctgacgttgacatctcaggacccaaggtggacattgaaggccctgatgttaatattgaaggaccagagggaaagttgaaagggcctaagttaaagatgccagagatgaacatcaaagcccccaagatctccatgcctgactttgatttgcatctgaaaggtcccaaggtgaagggcgatgtggatgtttctctgcccaaagtggaaggtgacctcaagggccccgaagttgacatcaaggggcccaaagtggatattaatgccccagatgtgggtgttcaaggcccagactggcacctgaagatgcccaaggtgaaaatgccaaagttcagcatgcctggcttcaaaggagagggcccagatggggatgtgaagctgcccaaggctgacattgatgtctcaggacccaaagtggacattgaaggccctgatgttaacattgaaggaccagagggaaagttgaaagggcctaagttcaagatgccagagatgaatatcaaagcccccaagatctccatgcctgatattgacttaaacctgaaaggacccaaagtgaagggtgatgtggatgtttcccttcctaaagtggaaggtgacctcaagggcccagaagttgacatcaagggcccaaaagtggacattgacgcacctgatgttgatgttcatggcccagactggcacctaaagatgcccaagataaaaatgcccaagatcagcatgcctggcttcaaaggagaaggtccagatgtggacgtgaacctgcccaaggctgacattgatgtctcaggaccgaaagtggatgttgaatgtcccgatgtgaatatcgaaggacctgaaggaaagtggaaaagtccaaagtttaagatgccagagatgcattttaagactccaaagatatccatgccagatattgacctgaatctcacaggtccaaaaataaaaggagatgtggatgttacaggccctaaggtagagggagatctgaaaggtcctgaagttgacctcaaaggccccaaagtggacattgatgtcccagatgttaatgttcagggtccagactggcacctgaagatgcccaagatgaaaatgcccaagttcagcatgcctggcttcaaagcagagggccctgaagtggatgtgaacctgcccaaggctgacgttgatgtctcaggccccaaagtggacgttgaaggccctgatgttaacattgaaggaccagagggaaagttgaaagggcccaagttcaagatgccagagatgaatatcaaagcccccaagatccccatgcctgactttgatttgcatctgaaaggtcccaaggtgaagggcgatgtggatatttctctgcccaaagtggaaggtgacctcaagggccctgaagttgacatcaggggtccccaagtggacattgatgtcccggatgtgggcgttcaaggcccagactggcacctaaaaatgcccaaagtgaaaatgcccaaattcagcatgcctggcttcaaaggagagggcccagatgtggatgtgaacctgcccaaggctgaccttgatgtctcaggacccaaggtggacattgatgttccagatgtgaatatcgaaggcccagagggaaagttgaaaggtcccaaattcaaaatgcctgagatgaacatcaaagcccccaagatctccatgcctgacattgatcttaacctgaaaggtcccaaagtgaagggtgacatggatgtgtctctgccaaaagtggaaggtgacatgaaagttcctgacgtggatattaaaggccccaaagtggatattaatgccccagatgtggatgttcaaggcccagactggcacctgaagatgcctaaaataaaaatgcccaagatcagcatgcctggcttcaaaggagaaggtccagaagtggacgtgaacctgcccaaggctgaccttgacgtctcaggacccaaggtggacgttgatgttccagatgtgaatattgaaggtccagatgcgaaactgaagggccctaaattcaagatgccagagatgaacatcaaagctcctaaaatatcaatgcctgatttggacctcaatcttaaaggccctaaaatgaaaggagaggtggatgtttcacttgcaaatgtagaaggtgatttgaaaggacctgctcttgacataaaaggcccaaagatagatgtagatgctccagatattgacattcatggcccagatgccaaattaaaaggtccaaaactgaagatgcctgacatgcatgtaaacatgcccaagatctccatgccagaaattgacttgaatttgaaaggctcaaagcttaagggagatgttgatgtctctgggcccaagttggaaggtgacattaaagctcccagtttggatataaagggcccagaagtggacgtttccggtcctaagcttaatatcgaaggcaagtcaaagaaatctcgttttaagcttcccaaatttaatttttcgggctctaaagttcagacacctgaagtggatgtcaaaggtaaaaagccagatattgacataacaggtccaaaagttgatattaatgctcctgatgtcgaggtccaaggaaaagtgaaaggatccaagtttaaaatgcctttcctgagtatttcatctcccaaagtttctatgcctgacgtggagctaaatttgaaaagtcccaaagtcaaaggagacttagatattgcaggtcccaatttagaaggtgactttaaaggccccaaagtggatattaaggcaccagaagtcaatcttaatgcacctgatgtggatgttcatggtccagactggaatctgaaaatgcccaagatgaaaatgcccaaattcagtgtgtctggcttaaaagcagaagggccagatgtagctgtggatctaccaaaaggagacatcaacatagagggcccaagtatgaacattgagggcccagatctcaatgtggaaggtccggagggaggcttgaaaggtcccaaattcaagatgcctgacatgaatatcaaagctcccaagatctccatgcctgacattgacttaaacttgaaaggccccaaggtgaaaggtgatgtggatatttctcttcccaaacttgaaggggatctgaaagggccagaggttgatatcaaaggccctaaagtggacatcaatgccccagatgtggatgttcatggtccagactggcatctgaagatgcccaaagtgaaaatgcccaagttcagcatgcctggcttcaaaggagaaggccctgaagtcgatgttaccctccctaaagctgacattgacatttctggtcccaatgtagacgttgatgttccagacgtgaatattgaaggtccagatgcaaagctgaagggccccaagttcaagatgcctgagatgaacatcaaagcccccaagatctccatgcctgactttgacctgaacttgaagggacccaaaatgaagggtgatgtggttgtgtctttgcccaaagtggaaggtgatctaaaaggccctgaggtggacatcaagggccccaaagtggacattgacactcctgacattaacatcgaaggctcagagggtaaattcaagggacccaaatttaagataccagagatgcacctgaaggctcccaaaatatcgatgcctgacattgatttaaacctgaagggccccaaagtcaagggcgatgtggatgtttctctgcccaaaatggaaggtgacctcaagggtcctgaagttgacatcaagggccccaaagtggacattaatgctccagatgttgatgttcaaggcccagactggcacctgaagatgcccaaggtgaaaatgcccaagttcagcatgcctggcttcaaaggagagggcccagatgtggatgtgaacctgcccaaggctgaccttgatgtctcaggacccaaggtggacattgatgttccagatgtgaatatcgaaggcccagagggaaagttgaaaggtcccaaattcaagatgcctgagatgaacatcaaagcccccaagatctccatgcctgacattgatcttaacctgaaaggacccaaagtgaagggtgatatggatgtgtctctgccaaaagtggaaggtgacatgcaagttcctgacttggatattaaaggccccaaagtggatattaatgccccagatgtggatgttcgaggcccagactggcacctgaagatgcctaagataaaaatgcccaagatcagcatgcctggcttcaaaggagaaggtccagaagtggatgtgaacctgcccaaggctgaccttgacgtctcaggacccaaggtggacgttgatgttccagatgtgaatattgaaggtccagatgcgaaactgaagggccctaaattcaagatgccagagatgaacatcaaagcccccaagatctccatgcctgactttgatttgcatctgaaaggccctaaggtgaaaggagatgtggatgtttctctgcctaagatggaaggtgatctaaaggcccctgaagttgacatcaagggccccaaagtggacattgatgccccagatgtggatgttcatggcccagactggcacctgaagatgcccaaggtgaaaatgcccaaattcagcatgccaggatttaaaggagagggcccagaagtggatgttaatttgcccaaagctgacattgatgtctcaggacccaaagtggacattgacactcctgatattgatattcatggtccagaagggaaactgaagggccccaaatttaaaatgcctgacctgcacctcaaggcaccgaagatctctatgcctgaagttgacctgaatctgaaaggtccaaagatgaagggcgacgtggacgtttctctgcccaaagtggaaggcgacctcaagggccctgaagttgacatcaagggccccaaagtggacattgatgtcccagatgtggacgttcaaggcccagactggcacttaaaaatgcccaaagtgaaaatgcccaagttcagcatgcctggcttcaaaggagagggcccagatgtggatgtgaacctgcccaaggctgaccttgacgtctcaggacccaaggtggacattgatgttcctgatgtgaatatcgaaggtccagatgcgaaactaaagggccctaaattcaagatgcctgagatgaacatcaaagcccccaagatctccatgcctgactttgatttgcatctgaaaggtcccaaggtgaagggtgatgtggatgtttcccttcctaaagtggaaggtgacctcaagggcccagaagttgacatcaagggccccaaagtggacatcgatgcccctgatgtagatgttcatggcccagactggcacctgaagatgcccaaggtgaaaatgcccaaattcagcatgccaggattcaaaggagagggcccagatgtggatgttacccttcctaaggctgacattgagatttctggccccaaagtggacattgatgcccctgatgtcagtatcgaaggtccagatgcaaaactcaagggtccaaagttcaagatgccagagatgaacatcaaggcccccaaaatctccatgcctgacattgactttaacttgaagggtcccaaagtgaaaggtgatgtggatgtctctctgcccaaagtggaaggtgatctcaagggccctgaaattgacataaaaggccccagtttggacattgacacacctgatgtcaatattgaaggtccggaaggaaaattgaaggggcccaaatttaagatgcctgagatgaacatcaaagctcccaaaatctctatgcctgactttgatttgcacctgaaaggtcccaaggtgaagggtgatgtggatgtttcactacctaaggtggaaagtgatctgaaagggccagaggtagacattgaaggtcctgaagggaagctcaaaggtcccaagtttaagatgcctgatgtacatttcaaaagcccacaaatctccatgagtgacattgatttgaatttgaaaggacctaagataaaaggagatatggacatttccgttcctaaactggagggagatctgaaaggtcccaaagtggatgtcaaaggccctaaagtgggcattgacactcctgatattgacattcatggtccagaagggaaactgaagggccccaaatttaaaatgcctgacttacacctcaaggcaccgaagatctctatgcctgaagttgacctgaatctgaaaggtccaaaggtgaagggcgacatggacatttctctgcccaaagtggaaggcgacctcaagggccccgaagttgacatcagggaccccaaagtggacattgatgtcccagatgtggacgttcaaggcccagactggcacctaaaaatgcccaaagtgaaaatgcccaagttcagcatgcctggcttcaaaggagagggcccagatgtggatgtgaacctgcccaaggctgacattgatgtctcaggacccaaagtggacgttgatgttcctgatgtgaatatcgaaggtccagatgcgaaactaaagggccccaagttcaagatgcctgagatgagcatcaaagcccccaagatctccatgcctgatattgacttaaacctgaaaggacccaaagtgaagggcgatgtggatgttacccttcctaaagtggaaggtgacctcaagggcccagaagctgacatcaagggcccaaaagtggacatcaacacccctgatgtggatgttcatggcccagactggcacctgaagatgcccaaggtgaaaatgcccaaattcagcatgcctggcttcaaaggagaaggtccagatgtggatgtgagcctgcccaaggccgacatcgatgtctcgggacccaaggtggacgttgatattccagatgtgaatatcgaaggtccagacgcaaaactgaagggccccaagttcaagatgcctgaaataaatatcaaagctcccaagatctccatacctgatgttgacctggatttgaaaggacccaaagtaaaaggagattttgatgtgtctgtccctaaggttgaagggactttgaaaggcccagaagtagatcttaaaggtccacgtctggatttcgaaggccctgatgccaaactcagtggcccatctttgaagatgccatcgctggagatatctgctcctaaagtaactgctcctgatgttgatttgcatctcaaggcaccaaaaattggattttcaggtccgaagttagaaggtggtgaagtggacctcaagggacccaaagttgaagctccaagcttagatgtacacatggacagcccagatattaacatcgaagggccagatgttaaaatccccaaatttaagaaacccaagtttggatttggggcaaaaagccccaaagctgacatcaagtcaccttcactggatgtcactgttcctgaggcagagctgaaccttgagactcctgaaattagtgttggtggcaagggcaagaaaagtaagtttaaaatgcctaaaattcatatgagtggtcctaagattaaggccaaaaaacagggatttgacctgaatgttcctgggggtgaaattgatgccagcctcaaggctccggatgtagatgtcaacatcgcagggccggatgctgcactcaaagtcgacgtgaaatcgcccaaaaccaagaaaacgatgtttggaaaaatgtacttcccagatgtagagtttgacattaaatcacctaaatttaaagctgaggcccctctccctagccccaaactggagggtgaactccaggcacctgatctggaactttctttgccagcgattcacgtcgaaggtcttgacatcaaggcgaaggctcccaaggtcaagatgccagatgtggacatctcagtgccaaaaatagagggtgacctgaaaggccccaaagtgcaggcaaacttgggtgcacctgacatcaacatcgaaggcctagatgctaaagtcaaaacaccgtccttcggcatttctgcccctcaagtctccatccctgatgtgaatgtaaacttgaaaggaccaaagataaagggtgatgtccccagcgtgggactggaaggaccagatgtagatctgcaaggtccagaagcaaaaattaagttccccaagttttccatgcccaagatcggcatcccaggtgtgaaaatggagggtgggggagccgaggtccatgcccagctaccctctcttgaaggagacttgagaggaccagatgttaagctcgaagggcccgatgtttctctaaaggggccaggagtagacttgccttcagtgaacctctctatgccaaaagtctctgggcctgaccttgatctgaacttgaaaggaccaagtttgaagggagacctggatgcatctgttcccagcatgaaggtgcatgctccagggctcaacctcagtggtgtcggtggcaaaatgcaggtgggaggagacggtgtgaaagtgccagggatcgatgccacaacaaagcttaacgttggggcaccagatgtgacactgaggggaccaagcctgcagggagatctggctgtctctggtgacatcaaatgccctaaagtatccgtaggagctcctgatctaagcttggaggcatccgaaggcagcattaaacttcccaaaatgaagctgccccaatttggcatctctactccggggtccgacttgcacgtcaatgccaaggggccacaggtttctggcgaactgaaggggccaggtgtggatgtgaacctgaaagggcctcggatttcagcaccgaatgtggactttaacttggaaggaccaaaagtgaaagggagccttggggccactggtgagatcaaaggccccactgtcggaggaggtcttccaggcattggtgttcaaggcctagaaggaaacctccagatgcctggaattaagtcctctggatgtgatgtgaacctgccaggcgtgaatgtgaaactcccaactgggcagatttctgggcctgaaatcaaaggtggtctgaaaggttcagaagtaggtttccatggggctgctcctgatatcagtgtgaaggggcctgcctttaatatggcatctcctgagtcagattttggcatcaacttgaagggcccaaaaatcaaaggaggtgcggatgtttcagggggtgtcagtgccccagacatcagccttggtgaagggcatttgagtgttaaaggttccgggggtgagtggaagggaccccaagtctcctctgctctcaacttggacacatctaagtttgctgggggccttcatttctcaggaccaaaggtggaaggaggtgtgaaaggaggtcagattggactccaggctcctgggctgagtgtgtctgggcctcaaggtcacttggaaagtggatctggaaaagtaacattccctaaaatgaagatccccaaatttaccttctctggccgtgagctggttggcagagaaatgggggtggatgttcacttccctaaagcagaggccagcatccaagctggtgctggagacggcgagtgggaagagtctgaagtcaaactgaaaaagtccaagatcaaaatgcccaagtttaatttttccaaacctaaagggaaaggtggtgtcactggctcaccagaagcatcaatttctgggtccaaaggtgacctgaaaagttcaaaggccagcctgggctctctggaaggagaggcagaggccgaagcctcttcaccgaaaggcaaattctccttatttaaaagtaagaagccacggcaccgctcaaattcattcagtgatgaaagagagttctctggaccttccaccccgacggggacgctggagtttgaaggtggggaagtgtctctggaaggtgggaaagttaaagggaaacacgggaagctgaaattcggtacctttggtggattggggtcaaagagcaaaggtcattatgaggtgactgggagcgatgatgagacaggcaagttacaggggagtggggtgtccctggcctctaagaagtcccgactgtcctcctcttctagcaatgacagtgggaataaggttggcatccagcttcccgaggtggagctgtcagtttccacaaagaaagagtagcaggcctttgtatgtgtgtacatatatatatatataacaaaacatcagccttgggtggtgtgttcctatataaactccaaagggaaacacaccgactgcctcagcaatcatgcaaagaccttgcctggcccggtggcaagcgctgaaaaaccgaccgcctgtaggctcctggaactatacagataggtaaagagttccaagttcgtccagcccatgtgcaaagtcaacagtatttgccttaagatttcatatatatatatttttttgcattgactgctgagagctcctgtttactaagcaagcttttgtgtttattatcctcatttttactgaacattgttagttttggggtaatggaaacccactttttcattgtaatgactttgggggcttttgttagtaagggtgggtggggtgatgggttgcagacggaggtcaggtcttcctctttcctgagactggatctgttcaaacagcaaacgcccacagatggcccagaggtggtggtagtcagggtgtgtgggtgtttttagggttctttagtgttgtttctttcacccaggggtggtggtcccagccagtttggtgctgacggtgagaggaaattagaatctgtttgcaaattgtccaacccaccccctcaacatgaggggcttccattttctgtgttttgtaagggaactgtttccttcatgccgccatgttcctgatattagttctgatttctttttaacaaatgttatcatgattaagaaaatttccagcactttaatggccaattaactgagaatgtaagaaaattgatgctgtacaaggcaaataaagctgtttattaacct

SEQ ID NO: 819 - DNA, 580 bp, Homo sapiens
  source 1..580: mol_type = unassigned DNA
gagctggcgacccgactccatggtccagcacatggcacagagactggggttgtgaccgagattcccgacgagagagactgaggggaagagaggaaggaggggcgggctcctggcaaggcattcgctcctgagcggaatcctgcaaagatggagaaggaggagacaacccgggagctgctgctgcccaactggcagggtagtggctcccacgggctgaccatcgcccagagggacgacggcgtctttgtgcaggaggtgacgcagaactcccctgcggcccgcactggggtggtcaaggagggggaccagattgtgggtgccaccatctactttgacaacctgcagtcgggtgaggtgacccagctgctgaacaccatggggcaccacacggtgggcctgaagctgcaccgcaagggggaccgctctcccgagcctggccagacctggacccgtgaagtcttcagctcctgcagctctgaagtggttctgagcggggatgatgaggagtaccagcgcatctacaccacgaagatcaagccacggctgaagtcggaagatggagtggaaggagacctcgggg

SEQ ID NO: 820 - DNA, 568 bp, Homo sapiens
  source 1..568: mol_type = unassigned DNA
agctgcgctcgctggaaccctgcgctccagcggtgcgcgccaggagagggggcccgaagcgaggtctcgcctagagttggaaaggcagcgtgcttagggttgtgaccgagattcccgacgagagagactgaggggaagagaggaaggaggggcgggctcctggcaaggcattcgctcctgagcggaatcctgcaaagatggagaaggaggagacaacccgggagctgctgctgcccaactggcagggtagtggctcccacgggctgaccatcgcccagagggacgacggcgtctttgtgcaggaggtgacgcagaactcccctgcggcccgcactggggtggtcaaggagggggaccagattgtgggtgccaccatctactttgacaacctgcagtcgggtgaggtgacccagctgctgaacaccatggggcaccacacggtgggcctgaagctgcaccgcaagggggaccgctctcccgagcctggccagacctggacccgtgaagtcttcagctcctgcagctctgaagtggttctgagcggggatgatgaggagtaccagcgcat

SEQ ID NO: 821 - DNA, 579 bp, Homo sapiens
  source 1..579: mol_type = unassigned DNA
aagagccgcctccgcgcacgggggcccggccactcggagctgctctgccgcggggactgcaccgcccgccctgccagacccgcccggaacggggctcgtcgccgccagtagccgcagcaccgcagccttgggcctcgcgccggctatggccgtgccctggggctgagccctcaggttgtgaccgagattcccgacgagagagactgaggggaagagaggaaggaggggcgggctcctggcaaggcattcgctcctgagcggaatcctgcaaagtggaaggacgtgagacgaattaccccacccccaacacctcacctggcagatggagaaggaggagacaacccgggagctgctgctgcccaactggcagggtagtggctcccacgggctgaccatcgcccagagggacgacggcgtctttgtgcaggaggtgacgcagaactcccctgcggcccgcactggggtggtcaaggagggggaccagattgtgggtgccaccatctactttgacaacctgcagtcgggtgaggtgacccagctgctgaacaccatggggcaccacacggtgggcctgaagct

SEQ ID NO: 822 - DNA, 2173 bp, Homo sapiens
  source 1..2173: mol_type = unassigned DNA
ggcacgtggactccctttaatccagtgactgtcaggtcgatcatatgccgaggacgatgatcccgccgggggagtgcacgtacgcgggccggaagcggaggaggcccctgcagaaacagaggcccgccgtgggggcagagaagtccaacccctccaagcgacaccgggaccgcctcaacgccgagttggaccacctggccagcctgctgccgttcccgcctgacatcatctccaagctggacaagctttctgtcctgcgcctcagtgtcagttacctccgggtgaagagcttcttccaagtcgtgcaggagcagagctcacggcagcctgcggccggcgccccctcgcccggagacagctgtcctcttgcagggtctgccgtgctggagggaaggctgctgttggagtctcttaatggctttgctctggtcgtgagtgcagaagggacgatattttatgcatcagcaacgatcgtggactatctgggcttccatcagacggatgtaatgcaccagaacatttatgactacatccacgtggacgaccgccaggacttctgccggcagctccactgggccatggaccctccccaggtggtgtttgggcagcccccgcccttggagacaggagatgatgctatcctggggaggctgctcagggcccaggagtggggcacaggcacgcccaccgagtactcggccttcctgacccgctgcttcatctgccgtgtgcgctgcctgctggacagcacctcgggcttcctgacgatgcagtttcaaggaaaactaaaattcctgtttggacagaagaagaaggcgccgtcaggagccatgctcccgccgcggctgtcgctgttctgcattgcggcacccgttctcctcccctccgcagcggagatgaaaatgaggagcgcgctcctgagggcaaaacccagagcagacaccgcagccaccgcggatgcaaaagtaaaagccaccaccagtctgtgcgaatcggaactgcatggaaaacccaattactcagcaggaaggagcagcagagagagcggcgttttggtgctcagggaacagactgacgctggccgatgggcacaggttcccgccagggccccatgcctgtgcctccggggtggccctgaccttgtccttgaccccaaggggggctcaggggacagggaggaggagcagcacaggatgctgagcagggcctctggagtgacagggcggagggagactccaggacccacaaagcccctgccctggacagcgggaaagcacagtgaggatggtgccaggccgaggctgcagcccagcaagaatgacccgccctccctgcgccccatgccccgcggctcctgcctgccctgcccgtgtgtccagggcactttcaggaactcgcccatctctcacccgccgagcccgtcccccagtgcctactccagccggaccagcagacccatgcgggatgtcggtgaggaccaggtgcaccctcccctctgccactttccccagaggagcctgcagcaccagctccctcagcctggagctcagcgttttgccacgaggggctatcccatggaggacatgaagctgcaaggtgtaccgatgcctccgggggacctgtgtggtccgacgctgctgctagatgtgtccatcaagatggagaaggactctgggtgtgagggtgctgcagacggctgtgtgcccagccaggtgtggctgggggccagtgacaggagccacccagccaccttccctaccaggatgcacctgaaaacagagccagactctcggcaacaggtgtacatctcgcacctggggcacggcgtgcggggggctcagccccatgggagggccactgctgggcgcagcagggagctgacccctttccaccctgcacactgtgcctgcctggagcccacagacggccttccccagtcggagcctccccaccagctctgtgcacggggccgaggtgaacagtcctgcacctgcagagctgctgaggccgcccctgtggtcaagcgggagcccttggactcaccccagtgggctactcacagccagggaatggtgcccgggatgttgcccaaaagtgccttggccacgctggtcccgccccaagcttcggggtgcacattcctgccatagcgcagtgaccaccatccaagctc

SEQ ID NO: 823 - DNA, 5661 bp, Homo sapiens
  source 1..5661: mol_type = unassigned DNA
ggcacgtggactccctttaatccagtgactgtcaggtcgatcatatgccgaggacgatgatcccgccgggggagtgcacgtacgcgggccggaagcggaggaggcccctgcagaaacagaggcccgccgtgggggcagagaagtccaacccctccaagcgacaccgggaccgcctcaacgccgagttggaccacctggccagcctgctgccgttcccgcctgacatcatctccaagctggacaagctttctgtcctgcgcctcagtgtcagttacctccgggtgaagagcttcttccaagtcgtgcaggagcagagctcacggcagcctgcggccggcgccccctcgcccggagacagctgtcctcttgcagggtctgccgtgctggagggaaggctgctgttggagtctcttaatggctttgctctggtcgtgagtgcagaagggacgatattttatgcatcagcaacgatcgtggactatctgggcttccatcagacggatgtaatgcaccagaacatttatgactacatccacgtggacgaccgccaggacttctgccggcagctccactgggccatggaccctccccaggtggtgtttgggcagcccccgcccttggagacaggagatgatgctatcctggggaggctgctcagggcccaggagtggggcacaggcacgcccaccgagtactcggccttcctgacccgctgcttcatctgccgtgtgcgctgcctgctggacagcacctcgggcttcctggcccgggggtcacaggcttggcagctgcggctctgctgtcccgagccactcatgacgatgcagtttcaaggaaaactaaaattcctgtttggacagaagaagaaggcgccgtcaggagccatgctcccgccgcggctgtcgctgttctgcattgcggcacccgttctcctcccctccgcagcggagatgaaaatgaggagcgcgctcctgagggcaaaacccagagcagacaccgcagccaccgcggatgcaaaagtaaaagccaccaccagtctgtgcgaatcggaactgcatggaaaacccaattactcagcaggaaggagcagcagagagagcggcgttttggtgctcagggaacagactgacgctggccgatgggcacaggttcccgccagggccccatgcctgtgcctccggggtggccctgaccttgtccttgaccccaaggggggctcaggggacagggaggaggagcagcacaggatgctgagcagggcctctggagtgacagggcggagggagactccaggacccacaaagcccctgccctggacagcgggaaagcacagtgaggatggtgccaggccgaggctgcagcccagcaagaatgacccgccctccctgcgccccatgccccgcggctcctgcctgccctgcccgtgtgtccagggcactttcaggaactcgcccatctctcacccgccgagcccgtcccccagtgcctactccagccggaccagcagacccatgcgggatgtcggtgaggaccaggtgcaccctcccctctgccactttccccagaggagcctgcagcaccagctccctcagcctggagctcagcgttttgccacgaggggctatcccatggaggacatgaagctgcaaggtgtaccgatgcctccgggggacctgtgtggtccgacgctgctgctagatgtgtccatcaagatggagaaggactctgggtgtgagggtgctgcagacggctgtgtgcccagccaggtgtggctgggggccagtgacaggagccacccagccaccttccctaccaggatgcacctgaaaacagagccagactctcggcaacaggtgtacatctcgcacctggggcacggcgtgcggggggctcagccccatgggagggccactgctgggcgcagcagggagctgacccctttccaccctgcacactgtgcctgcctggagcccacagacggccttccccagtcggagcctccccaccagctctgtgcacggggccgaggtgaacagtcctgcacctgcagagctgctgaggccgcccctgtggtcaagcgggagcccttggactcaccccagtgggctactcacagccagggaatggtgcccgggatgttgcccaaaagtgccttggccacgctggtcccgccccaagcttcggggtgcacattcctgccatagcgcagtgaccaccatccaagctcagatctgtgtgtctacgctcagatgcgtcggtggctgggctgccctgctcctggtcaggccggagcccgtcctaagacacacgctttgcagagctgtgcatgcgcagtctgctagtgtgtgtgtgcagcatacgcaggagcctatcctgaattttgtaaaatatcccaacagttcttaaatgaaaactggccttaagtctattcaagcatgacagcatttctctttgaggaattaaaatctttaggaaagtgatcatggctggacagcttcatgccccagaggcagcgagcacccgtcccatggctgccaagtccacagtcggggatgaagcagtcgggtgatgctcccaagtccgcagtcggggatgaagcggtcgggtgatgctcccaagtccgcagtcggggatgaagcggtcgggtgacacacctagctcagccctcccaggccacctgcagctcccagcctgtgctgtgcaggcagggtcagcccatcgccacagtgcactgtagaggccagcacacggcaaattagaaatacaacacgcggagaaaggggtccgtgagcccactcatagaggaatctagaacgttccaggcagcagaggctggcagcgtgggtcccacactgccccacaccgtgcggcaggtgctccatggcgccatgacagagtctgaggccagacctggactggaattgacagcataacccctgttccttctggacatctcccgagttctcagtgggtctctgcggacggttcttcctaatctgcctcttggtacatcacgtaatacagagttcacagactccgggtttggaagtacagagaaacacacaacgtagagagaagacacaggaaactgcgctgcctgtgggggtttctctctggctggctgtacagttcactcaaatgagggttcccattgccatcctaggagaataattagggacaagacagacaagtattaatagcattaaaacagttgtaaaggcgatattttctgagagtaggaaatttggatacaaaagcataagtcagaaagtgaaggtcaccaatccaccaacccgagaacctacagctgatggtgcatttcaggcttcttccacggtctggcctggaaccccacccggctggtgcaggcatcagatcagggtgtagaagtcaccccaagcaagaggaagccaggcagtgaggccctggggtgtggctgcagctgggcccacctgtgcgggggtgggaaggccccatcctcagggagagggcatcggcgccctgacgtcagctccactgggagtggcaggagctgtgggagcccatgggtgagggacccaccaccccgctgcactgtgcattgtgcctcccgtgtggacgccctctctgttgttggcccgcgggtgagggacccaccacccctagggacccaccaccccgccgcactgtgcattctgcctcctgtgtggacgccctctctgttgtcagtggctttgaggtgtcagtgcttacttagatgctggtttaatgctggacccatttgttaaacgcaccttcactttgtcaaaacccaggtttggttggcaggactgggtcttctgcccaatgccaggtgcctgcgcctctcagtggcctggttcttggacagtttgcccccatgtggcagggatagggataaggatctcctctcagtactggaagagaacagccaaccatctgagcccagagtcacagatccatcgtggccccctatgacccccaagccctaccgagggggcactcactctctgcttagccagggggcgtctttcaaaaggtgacctccatgctgtgctgtcgtgggtgtgagacgtgctcatggccttccactgccatctctcccttatctgatgcctaaagtcacgatggggacagagctacccaggggccagccatggggtgaccagccacctgagggtcagtcacctgtggagagcaggcacctgtgaagaccaggcacctgaggactggcgcctacttcccactttggccctacactggcacagagcccctctttattcatttctcatgctgagcatggcacacttctggcctctgggcatttatggatttaagaccaggatggtatttcagaagcttcccacttccttcctattctaaccgagtgcccagctcctttgctgatcatggaaagacccttaataattaggcctgcaggccaggcgcagtggctcatgcctataatcccagcactttaggaggtcaaggtaggaggatcgcttaagcccaggagttcaagaccagcctgggcaacacaggaagaatgtgtctctacaaaaaataattaaaaatcagatctgctgtatccctgaaaaagtctcaatcaacatgcatgttccactcttggagttccctgttctgagggccagccacgtcctgtgtcctggagcttagccctcagcagctcccttcagcctgggcgccgcctgggtcccaaacgtggcagctgctcttccagtctcggggccgaggagggcagggagctcagtgactgagagtcttgtgtatcacatgtcttgagtgtcctggagccaacggctgtcactgggaaaaacaccaggccccaaagatcgaatcagagacgtggctgcgtgtttgcgattgtagccaggcccttcagtgtcatcaaaggagcactggggcctccttaagcacagacggcagcccctgcccaggaggcttcttcaccacgtcctgccctgcagcctcccagacctttagatgcgcccctgcccaaggccctcctggtgacaggtgccagattgagtggtgggttgctgccaggcaggccacgctgtgttgacgctgcactcagcacgtgggtgttggctctgccggttttgtggtgtggggaccctacaggaggctgcggccctgagagcctgggatcagcgaggtgtccgacatcccttcctcaacggcaacaaaaactccccaagtcagcactttggttattttatagccacaaccctcttggaaaacagtggggaagactatggaacatagaaagtgtggatgtatcacttctctctaaaatgtcattgttagcactaattacaggttcatgtttttctgtgtatgtagcttttccctatatagctgaaaaagtattaaagtcaaatataaggtgggaatgggatggaagggaggagatcaatacaacttatatttttgcagtttctactggaagaaaaaagttttcaatacctagaccaacttgttgaatttttaaaacttatgcactataaatgcaactttctctactgctttctcagtgcctttaggaagctttcaaatttttttgtactgtggtttgtattaaatttgcaatattgatgtaaaatacatgacatgctagtacatgtttaacaaaaatttaaa

SEQ ID NO: 824 - DNA, 1912 bp, Homo sapiens
  source 1..1912: mol_type = unassigned DNA
gactccctttaatccagtgactgtcaggtcgatcatatgccgaggacgatgatcccgccgggggagtgcacgtacgcgggccggaagcggaggaggcccctgcagaaacatctcttaatggctttgctctggtcgtgagtgcagaagggacgatattttatgcatcagcaacgatcgtggactatctgggcttccatcagacggatgtaatgcaccagaacatttatgactacatccacgtggacgaccgccaggacttctgccggcagctccactgggccatggaccctccccaggtggtgtttgggcagcccccgcccttggagacaggagatgatgctatcctggggaggctgctcagggcccaggagtggggcacaggcacgcccaccgagtactcggccttcctgacccgctgcttcatctgccgtgtgcgctgcctgctggacagcacctcgggcttcctgacgatgcagtttcaaggaaaactaaaattcctgtttggacagaagaagaaggcgccgtcaggagccatgctcccgccgcggctgtcgctgttctgcattgcggcacccgttctcctcccctccgcagcggagatgaaaatgaggagcgcgctcctgagggcaaaacccagagcagacaccgcagccaccgcggatgcaaaagtaaaagccaccaccagtctgtgcgaatcggaactgcatggaaaacccaattactcagcaggaaggagcagcagagagagcggcgttttggtgctcagggaacagactgacgctggccgatgggcacaggttcccgccagggccccatgcctgtgcctccggggtggccctgaccttgtccttgaccccaaggggggctcaggggacagggaggaggagcagcacaggatgctgagcagggcctctggagtgacagggcggagggagactccaggacccacaaagcccctgccctggacagcgggaaagcacagtgaggatggtgccaggccgaggctgcagcccagcaagaatgacccgccctccctgcgccccatgccccgcggctcctgcctgccctgcccgtgtgtccagggcactttcaggaactcgcccatctctcacccgccgagcccgtcccccagtgcctactccagccggaccagcagacccatgcgggatgtcggtgaggaccaggtgcaccctcccctctgccactttccccagaggagcctgcagcaccagctccctcagcctggagctcagcgttttgccacgaggggctatcccatggaggacatgaagctgcaaggtgtaccgatgcctccgggggacctgtgtggtccgacgctgctgctagatgtgtccatcaagatggagaaggactctgggtgtgagggtgctgcagacggctgtgtgcccagccaggtgtggctgggggccagtgacaggagccacccagccaccttccctaccaggatgcacctgaaaacagagccagactctcggcaacaggtgtacatctcgcacctggggcacggcgtgcggggggctcagccccatgggagggccactgctgggcgcagcagggagctgacccctttccaccctgcacactgtgcctgcctggagcccacagacggccttccccagtcggagcctccccaccagctctgtgcacggggccgaggtgaacagtcctgcacctgcagagctgctgaggccgcccctgtggtcaagcgggagcccttggactcaccccagtgggctactcacagccagggaatggtgcccgggatgttgcccaaaagtgccttggccacgctggtcccgccccaagcttcggggtgcacattcctgccatagcgcagtgaccaccatccaagctcagatctgtgtgtctacgctcagatgcgtcggtggct

SEQ ID NO: 825 - DNA, 563 bp, Homo sapiens
  source 1..563: mol_type = unassigned DNA
tcctggccagggcgcgctgccccgcgggtgtgcctgagcctccgcgccccgcaggccctgggccgaggacgatgatcccgccgggggagtgcacgtacgcgggccggaagcggaggaggcccctgcagaaacagtaaagaggcccgccgtgggggcagagaagtccaacccctccaagcgacaccgggaccgcctcaacgccgagttggaccacctggccagcctgctgccgttcccgcctgacatcatctccaagctggacaagctttctgtcctgcgcctcagtgtcagttacctccgggtgaagagcttcttccaagtcgtgcaggagcagagctcacggcagcctgcggccggcgccccctcgcccggagacagctgtcctcttgcagggtctgccgtgctggagggaaggctgctgttggagtctcttaatggctttgctctggtcgtgagtgcagaagggacgatattttatgcatcagcaacgatcgtggactatctgggcttccatcagacggatgtaatgcaccagaacatttatgactacatccacgtggacg

SEQ ID NO: 826 - DNA, 576 bp, Homo sapiens
  source 1..576: mol_type = unassigned DNA
gtgtgcgcgcgttctccaaacgccacccccacggggcctcacagccgccccggcctggcaaccgtcacccattttacgaacgaggacatcaaggccgaggacgatgatcccgccgggggagtgcacgtacgcgggccggaagcggaggaggcccctgcagaaacagaggcccgccgtgggggcagagaagtccaacccctccaagcgacaccgggaccgcctcaacgccgagttggaccacctggccagcctgctgccgttcccgcctgacatcatctccaagctggacaagctttctgtcctgcgcctcagtgtcagttacctccgggtgaagagcttcttccaagtcgtgcaggagcagagctcacggcagcctgcggccggcgccccctcgcccggagacagctgtcctcttgcagggtctgccgtgctggagggaaggctgctgttggagtctcttaatggctttgctctggtcgtgagtgcagaagggacgatattttatgcatcagcaacgatcgtggactatctgggcttccatcagacggatgtaatgcaccagaacatttatgacta

SEQ ID NO: 827 - DNA, 462 bp, Homo sapiens
  source 1..462: mol_type = unassigned DNA
attttacgaacgaggacatcaaggccgaggacgatgatcccgccgggggagtgcacgtacgcgggccggaagcggaggaggcccctgcagaaacagaggcccgccgtgggggcagagaagtccaacccctccaagcgacaccgggaccgcctcaacgccgagttggaccacctggccagcctgctgccgttcccgcctgacatcatctccaagctggacaagctttctgtcctgcgcctcagtgtcagttacctccgggtgaagagcttcttccaaggacaggggttggcagtggcagatgccgaagatgtggatgaccacacgggcgaacgaaggcccatgtcgttcaggaggccccgagcattggacacccaggccctgagacgtactcagttcggtctgcatctgttgatggtgaatattgcaggactgatagccactgaccgcctgtagtgatgtgtg

SEQ ID NO: 828 - DNA, 435 bp, Homo sapiens
  source 1..435: mol_type = unassigned DNA
ccttggctgcgccccgccccgcccgttcctggcttcctcgatggcttcctcctcaggacgccggtctcccgccacggcgccctgagccaggctccagagcaggcggcttctctgggggaggccgggacccgcctgacaccgaggggaggcccaggcgtgacccggccccggtggctcctcggccgaggacgatgatcccgccgggggagtgcacgtacgcgggccggaagcggaggaggcccctgcagaaacagaggcccgccgtgggggcagagaagtccaacccctccaagcgacaccgggaccgcctcaacgccgagttggaccacctggccagcctgctgccgttcccgcctgacatcatctccaagctggacaagctttctgtcctgcgcctcagtgtcagttacctccgggtgaagagcttcttccaag

SEQ ID NO: 829 - DNA, 2350 bp, Homo sapiens
  source 1..2350: mol_type = unassigned DNA
acgcacacgcagccacccacccacacaggcgcacatacgctggcaccgctgaacagccaaaatatacacgatggttcttcttatggttcaggaggtggaaagttgaaaccatagcaagaaacgtggcctatccaccgcagcgactaaaagataaagagggaaaaggacaaacattggccagaaggtgcagcggctggagcgttcgcgccttaactggaagaggagccgccccgcctgggaggccgctctggcgcccggctggtgccgggcaggaggcccttgcggacccagcggcctcctcgtcggcaacgcccaccccgcggttcagccacggagcggatgccgtgtgcaggcacggaacgggcgaggctgttgcgctgcaggtgcccccacggtcgcgatgcggggcagggggatgccgacggatgtaatgcaccagaacatttatgactacatccacgtggacgaccgccaggacttctgccggcagctccactgggccatggaccctccccaggtggtgtttgggcagcccccgcccttggagacaggagatgatgctatcctggggaggctgctcagggcccaggagtggggcacaggcacgcccaccgagtactcggccttcctgacccgctgcttcatctgccgtgtgcgctgcctgctggacagcacctcgggcttcctgacgatgcagtttcaaggaaaactaaaattcctgtttggacagaagaagaaggcgccgtcaggagccatgctcccgccgcggctgtcgctgttctgcattgcggcacccgttctcctcccctccgcagcggagatgaaaatgaggagcgcgctcctgagggcaaaacccagagcagacaccgcagccaccgcggatgcaaaagtaaaagccaccaccagtctgtgcgaatcggaactgcatggaaaacccaattactcagcaggaaggagcagcagagagagcggcgttttggtgctcagggaacagactgacgctggccgatgggcacaggttcccgccagggccccatgcctgtgcctccggggtggccctgaccttgtccttgaccccaaggggggctcaggggacagggaggaggagcagcacaggatgctgagcagggcctctggagtgacagggcggagggagactccaggacccacaaagcccctgccctggacagcgggaaagcacagtgaggatggtgccaggccgaggctgcagcccagcaagaatgacccgccctccctgcgccccatgccccgcggctcctgcctgccctgcccgtgtgtccagggcactttcaggaactcgcccatctctcacccgccgagcccgtcccccagtgcctactccagccggaccagcagacccatgcgggatgtcggtgaggaccaggtgcaccctcccctctgccactttccccagaggagcctgcagcaccagctccctcagcctggagctcagcgttttgccacgaggggctatcccatggaggacatgaagctgcaaggtgtaccgatgcctccgggggacctgtgtggtccgacgctgctgctagatgtgtccatcaagatggagaaggactctgggtgtgagggtgctgcagacggctgtgtgcccagccaggtgtggctgggggccagtgacaggagccacccagccaccttccctaccaggatgcacctgaaaacagagccagactctcggcaacaggtgtacatctcgcacctggggcacggcgtgcggggggctcagccccatgggagggccactgctgggcgcagcagggagctgacccctttccaccctgcacactgtgcctgcctggagcccacagacggccttccccagtcggagcctccccaccagctctgtgcacggggccgaggtgaacagtcctgcacctgcagagctgctgaggccgcccctgtggtcaagcgggagcccttggactcaccccagtgggctactcacagccagggaatggtgcccgggatgttgcccaaaagtgccttggccacgctggtcccgccccaagcttcggggtgcacattcctgccatagcgcagtgaccaccatccaagctcagatctgtgtgtctacgctcagatgcgtcggtggctgggctgccctgctcctggtcaggccggagcccgtcctaagacacacgctttgcagagctgtgcatgcgcagtctgctagtgtgtgtgtgcagcatacgcaggagcctatcctgaattttgtaaaatatcccaacagttcttaaatgaaaactggccttaagtctattcaagcatgacagcatttctctttgaggaattaaaatctttaggaaagtga

SEQ ID NO: 830 - DNA, 569 bp, Homo sapiens
  source 1..569: mol_type = unassigned DNA
gggaaaccgagtcacaaagagtccaagtcgacaggaaagtggatgtcttggccccagagtgtctgcggcccagaagatgcccgtctcttagcctcccgcttgccccgaaaggctggatgtgggcaccacttggcgggcagacgggtgggcgggtgctccaggcaacttagacatcttctcaggagggagtggggaaccggggccaagcgccgtctcttcggtgggattctctccctgtggctgtgacttgctttgacaagtggagtggaaatttttcggttactcgtcggtggaataaagtgtctaaagccacttggggtaaggctgaaataatcttgttgcgctatttcagacggatgtaatgcaccagaacatttatgactacatccacgtggacgaccgccaggacttctgccggcagctccactgggccatggaccctccccaggtggtgtttgggcagcccccgcccttggagacaggagatgatgctatcctggggaggctgctcagggcccaggagtggggcacaggcacgcccaccgagtactcggccttcctgacccgct

SEQ ID NO: 831 - DNA, 646 bp, Homo sapiens
  source 1..646: mol_type = unassigned DNA
ctcctcccctccgcagcggagatgaaaatgaggagcgcgctcctgagggcaaaacccagagcagacaccgcagccaccgcggatgcaaaggacagggaggaggagcagcacaggatgctgagcagggcctctggagtgacagggcggagggagactccaggacccacaaagcccctgccctggacagcgggaaagcacagtgaggatggtgccaggccgaggctgcagcccagcaagaatgacccgccctccctgcgccccatgccccgcggctcctgcctgccctgcccgtgtgtccagggcactttcaggaactcgcccatctctcacccgccgagcccgtcccccagtgcctactccagccggaccagcagacccatgcgggatgtcggtgaggaccaggtgcaccctcccctctgccactttccccagaggagcctgcagcaccagctccctcagcctggagctcagcgttttgccacgaggggctatcccatggaggacatgaagctgcaaggtgtaccgatgcctccgggggacctgtgtggtccgacgctgctgctagatgtgtccatcaagatggagaaggactctgggtgtgagggtgctgcagacggctgtgtgcccagccaggtgtggctggggg

SEQ ID NO: 832 - DNA, 2180 bp, Homo sapiens
  source 1..2180: mol_type = unassigned DNA
gatcagtgtgatgcgtgtgtgggtacacacacatgtcccgtgtgagttggtctccaactcacctcagtgttcacttcctggaacataactacctggagtcatgagaatggaccgtattttctttctggccttccaggaaaaaaatataagctctaaaaatcatcctatgattttatccttctactttctgaagcaaattcattagcccttcattggcctgaaaagtgacgtgacaatattttcagtaaacctgtaactgagaaaataactttccacactataaagaattaaacaagagtgaactattgtttctgtcttcactgctcaggtgtgacagcaatacctgtcattattaatttctaccatcaaaacatgtttcatccacatgtcatcttgttcatccgtcacatgtcacatgttcatctgtgttcttcacagagtaaaagccaccaccagtctgtgcgaatcggaactgcatggaaaacccaattactcagcaggtacttagaacatttcttatctgatcttttccacatgggtaaaatgtgtttctgcccttggagagcttccccgcccagtggagatgttggcgtattccatggaaaagccattttgcagagacttggtgtctgtcctgctgtggacaagtgccgttcctgggctctggtctgtgcatttctgaggagccgatgggtcctgccttgctgagaacaagcaaccgtcttccaggagctcctcagctcgcaccgtgacggcttcccccccctctaaaccccaacaggaaggagcagcagagagagcggcgttttggtgctcagggaacagactgacgctggccgatgggcacaggttcccgccagggccccatgcctgtgcctccggggtggccctgaccttgtccttgaccccaaggggggctcaggggacagggaggaggagcagcacaggatgctgagcagggcctctggagtgacagggcggagggagactccaggacccacaaagcccctgccctggacagcgggaaagcacagtgaggatggtgccaggccgaggctgcagcccagcaagaatgacccgccctccctgcgccccatgccccgcggctcctgcctgccctgcccgtgtgtccagggcactttcaggaactcgcccatctctcacccgccgagcccgtcccccagtgcctactccagccggaccagcagacccatgcgggatgtcggtgaggaccaggtgcaccctcccctctgccactttccccagaggagcctgcagcaccagctccctcagcctggagctcagcgttttgccacgaggggctatcccatggaggacatgaagctgcaaggtgtaccgatgcctccgggggacctgtgtggtccgacgctgctgctagatgtgtccatcaagatggagaaggactctgggtgtgagggtgctgcagacggctgtgtgcccagccaggtgtggctgggggccagtgacaggagccacccagccaccttccctaccaggatgcacctgaaaacagagccagactctcggcaacaggtgtacatctcgcacctggggcacggcgtgcggggggctcagccccatgggagggccactgctgggcgcagcagggagctgacccctttccaccctgcacactgtgcctgcctggagcccacagacggccttccccagtcggagcctccccaccagctctgtgcacggggccgaggtgaacagtcctgcacctgcagagctgctgaggccgcccctgtggtcaagcgggagcccttggactcaccccagtgggctactcacagccagggaatggtgcccgggatgttgcccaaaagtgccttggccacgctggtcccgccccaagcttcggggtgcacattcctgccatagcgcagtgaccaccatccaagctcagatctgtgtgtctacgctcagatgcgtcggtggctgggctgccctgctcctggtcaggccggagcccgtcctaagacacacgctttgcagagctgtgcatgcgcagtctgctagtgtgtgtgtgcagcatacgcaggagcctatcctgaattttgtaaaatatcccaacagttcttaaatgaaaactggccttaagtctattcaagcatgacagcatttctctttgaggaattaaaatctttaggaaagtg

SEQ ID NO: 833 - DNA, 1048 bp, Homo sapiens
  source 1..1048: mol_type = unassigned DNA
ttctttgttttcctatgggtgaggaatggttgtatgagcagttgggtttcgggacgctttttggggagaacccgatggagtctgaaggatctctaaatcaggcggaacccacggacggagagagatgcttcaaattggtccacggataagctgaaaacactgttcctggcagtgcaggttcaaaatgaagaaggcaagtgtgaggtgacggaagtgagtaagcttgatggagaggcatccattaacaatcgcaaagggaaacttatcttcttttatgaatggagcgtcaaactaaactggacaggtacttctaagtcaggagtacaatacaaaggacatgtggagatccccaatttgtctgatgaaaacagcgtggatgaagtggagattagtgtgagccttgccaaagatgagcctgacacaaatctcgtggccttaatgaaggaagaaggggtgaaacttctaagagaagcaatgggaatttacatcagcaccctcaaaacagagttcacccagggcatgatcttacctacaatgaatggagagtcagtagacccagtggggcagccagcactgaaaactgaggagcgcaaggctaagcctgctccttcaaaaacccaggccagacctgttggagtcaaaatccccacttgtaagatcactcttaaggaaaccttcctgacgtcaccagaggagctctatagagtgtttaccacccaagagctggtgcaggcctttacccatgctcctgcaacattagaagcagacagaggtggaaagttccacatggtagatggcaacgtctctggggaatttactgatctggtccctgagaaacatattgtgatgaagtggaggtttaaatcttggccagagggacactttgccaccatcaccttgaccttcatcgacaagaacggagagactgagctgtgcatggaaggtcgaggcatccctgctcctgaggaagagcggacgcgacagggctggcagcggtactactttgagggcattaaacagacctttggctatggcgcacgcttatttt

SEQ ID NO: 834 - DNA, 1402 bp, Homo sapiens
  source 1..1402: mol_type = unassigned DNA
ggaagttaaggaggggagggggtggagggaaaagcaagccaggaggtgcttgcggccgcttctagtagtttccaggcgctgccgggcggctggcactaagcggtcctgaggctgtggctacggctgctccggagctggtggcgccgcgataggagagccgatggccaagtggggtgagggagacccacgctggatcgtggaggagcgggcggacgccaccaacgtcaacaactggcactggacggagagagatgcttcaaattggtccacggataagctgaaaacactgttcctggcagtgcaggttcaaaatgaagaaggcaagtgtgaggtgacggaagtgagtaagcttgatggagaggcatccattaacaatcgcaaagggaaacttatcttcttttatgaatggagcgtcaaactaaactggacaggtacttctaagtcaggagtacaatacaaaggacatgtggagatccccaatttgtctgatgaaaacagcgtggatgaagtggagattagtgtgagccttgccaaagatgagcctgacacaaatctcgtggccttaatgaaggaagaaggggtgaaacttctaagagaagcaatgggaatttacatcagcaccctcaaaacagagttcacccagggcatgatcttacctacaatgaatggagagtcagtagacccagtggggcagccagcactgaaaactgaggagcgcaaggctaagcctgctccttcaaaaacccaggccagacctgttggagtcaaaatccccacttgtaagatcactcttaaggaaaccttcctgacgtcaccagaggagctctatagagtgtttaccacccaagagctggtgcaggcctttacccatgctcctgcaacattagaagcagacagaggtggaaagttccacatggtagatggcaacgtctctggggaatttactgatctggtccctgagaaacatattgtgatgaagtggaggtttaaatcttggccagagggacactttgccaccatcaccttgaccttcatcgacaagaacggagagactgagctgtgcatggaaggtcgaggcatccctgctcctgaggaagagcggacgcgacagggctggcagcggtactactttgagggcattaaacagacctttggctatggcgcacgcttattttagggccagcggcaggggactccagcctgctggacacttcagtccagctctctcctgactggggcttgcgactcacaggattgcatcgtcccagctgctaacttggggccggggcccctcccttccacatataccttgggtttgtgcatgttttctgctgggtgggttcagagggcaatttctcttttatgtgtacatatgctaaataaacataatttaaaaaacatg

SEQ ID NO: 835 - DNA, 1173 bp, Homo sapiens
  source 1..1173: mol_type = unassigned DNA
aagttaaggaggggagggggtggagggaaaagcaagccaggaggtgcttgcggccgcttctagtagtttccaggcgctgccgggcggctggcactaagcggtcctgaggctgtggctacggctgctccggagctggtggcgccgcgataggagagccgatggccaagtggggtgagggagacccacgctggatcgtggaggagcgggcggacgccaccaacgtcaacaactggcactggacggagagagatgcttcaaattggtccacggataagctgaaaacactgttcctggcagtgcaggttcaaaatgaagaaggcaagtgtgaggtgacggaagtgagtaagcttgatggagaggcatccattaacaatcgcaaagggaaacttatcttcttttatgaatggagcgtcaaactaaactggacaggtacttctaagtcaggagtacaatacaaaggacatgtggagatccccaatttgtctgatgaaaacagcgtggatgaagtggagattagtgtgagccttgccaaagatgagcctgacacaaatctcgtggccttaatgaaggaagaaggggtgaaacttctaagagaagcaatgggaatttacatcagcaccctcaaaacagagttcacccagggcatgatcttacctacaatgaatggagagtcagtagacccagtggggcagccagcactgaaaactgaggagcgcaaggctaagcctgctccttcaaaaacccaggccagacctgttggagtcaaaatccccacttgtaagatcactcttaaggaaaccttcctgacgtcaccagaggagctctatagagtgtttaccacccaagagctggtgcaggcctttacccatgctcctgcaacattagaagcagacagaggtggaaagttccacatggtagatggcaacgtctctggggaatttactgatctggtccctgagaaacatattgtgatgaagtggaggtttaaatcttggccagaggggtctcactgtcactcaggctagagtgcagtggcataatcacagcaaactgcagccttaacctcccagacccaaacgatcctcctgcttcagcttcccaagtagctgagactacgtgtgccaccatgccagcttttttttttttttttttttttttacttttttacttttt

SEQ ID NO: 836 - DNA, 588 bp, Homo sapiens
  source 1..588: mol_type = unassigned DNA
agttaaggaggggagggggtggagggaaaagcaagccaggaggtgcttgcggccgcttctagtagtttccaggcgctgccgggcggctggcactaagcggtcctgaggctgtggctacggctgctccggagctggtggcgccgcgataggagagccgatggccaagtggggtgagggagacccacgctggatcgtggaggagcgggcggacgccaccaacgtcaacaactggcactggacggagagagatgcttcaaattggtccacggataagctgaaaacactgttcctggcagtgcaggttcaaaatgaagaaggcaagtgtgaggtgacggaagtgagtaagcttgatggagaggcatccattaacaatcgcaaagggaaacttatcttcttttatgaatggagcgtcaaactaaactggacaggtacttctaagtcaggagtacaatacaaaggacatgtggagatccccaatttgtctgatgaaaacagcgtggatgaagtggaggtttgtgcttcataactcctaatccgagtcctctatatcctcttattctcagatgagaaaagtgacctgtcattcag

SEQ ID NO: 837 - DNA, 832 bp, Homo sapiens
  source 1..832: mol_type = unassigned DNA
aaggaggggagggggtggagggaaaagcaagccaggaggtgcttgcggccgcttctagtagtttccaggcgctgccgggcggctggcactaagcggtcctgaggctgtggctacggctgctccggagctggtggcgccgcgataggagagccgatggccaagtggggtgagggagacccacgctggatcgtggaggagcgggcggacgccaccaacgtcaacaactggcactggacggagagagatgcttcaaattggtccacggataagctgaaaacactgttcctggcagtgcaggttcaaaatgaagaaggcaagtgtgaggtgacggaagtgagtaagcttgatggagaggcatccattaacaatcgcaaagggaaacttatcttcttttatgaatggagcgtcaaactaaactggacaggtaagtctaagctgggctgtcagagagattaactgtgttttgtttaacctgttaagtagctggagagaacagttttgaggagttacagaccttgaagggagaaggcagatgttgctgctttggagtcctatgtaaagcagtatcgagtcctggaatttctttgccattgtgggatgctaaatggatttcctgtgtctgggtctcataagtcccatccatgaagtggccgggccactgcatctttgggccttggtctttgttgggacacctacgatgatatttcttcagactagctacatgtatcttgtgagtgatttaaaaggaggaaggagaggatttttttggtcttgatctttgtgcactgtcttcagtgtgaatcttaacagattaaaccactgcgctaatgaa

SEQ ID NO: 838 - DNA, 787 bp, Homo sapiens
  source 1..787: mol_type = unassigned DNA
cgctggatcgtggaggagcgggcggacgccaccaacgtcaacaactggcactggacggagagagatgcttcaaattggtccacggataagctgaaaacactgttcctggcagtgcaggttcaaaatgaagaaggcaagtgtgaggtgacggaagtgagtaagcttgatggagaggcatccattaacaatcgcaaagggaaacttatcttcttttatgaatggagcgtcaaactaaactggacaggtacttctaagtcaggagtacaatacaaaggacatgtggagatccccaatttgtctgatgaaaacagcgtggatgaagtggagattagtgtgagccttgccaaagatgagcctgacacaaatctcgtggccttaatgaaggaagaaggggtgaaacttctaagagaagcaatgggaatttacatcagcaccctcaaaacaggtatcccttgagtagttctgtatgccttaaggaggtagtttccacctgttagactctggttaagggcctggacagtcctttctttggcaaatgggtaaagatttggggggagggggcttatttcatcttaaagtcagtccataagctcggagtaagggaaagatctggagctgtgttgcctaataatgatggttgagcattttagatgtggctagaccaaactgaaatgtactgtgatggcctggcgcggtggctcacacttgtaatcccagcactgttggatgctgaggtgggctgattgcctgagctcaggaatttgagaccagcctgggcaacatggcg

SEQ ID NO: 839 - DNA, 432 bp, Homo sapiens
  source 1..432: mol_type = unassigned DNA
tggcagtgcaggttcaaaatgaagaaggcaagtgtgaggtgacggaagtgagtaagcttgatggagaggcatccattaacaatcgcaaagggaaacttatcttcttttatgaatggagcgtcaaactaaactggacaggtacttctaagtcaggagtacaatacaaaggacatgtggagatccccaatttgtctgatgaaaacagcgtggatgaagtggagattagtgtgagccttgccaaagatgagcctgacacaaatctcgtggccttaatgaaggaagaaggggtgaaacttctaagagaagcaatgggaatttacatcagcaccctcaaaacagagttcacccagggcatgatcttacctacaatgaatggagagtcagtagacccagtggggcagccagcactgaaaactgaggagcgcaaggtaa

SEQ ID NO: 840 - DNA, 763 bp, Homo sapiens
  source 1..763: mol_type = unassigned DNA
gtgtgaggtgacggaagtgagtaagcttgatggagaggcatccattaacaatcgcaaagggaaacttatcttcttttatgaatggagcgtcaaactaaactggacaggtacttctaagtcaggagtacaatacaaaggacatgtggagatccccaatttgtctgatgaaaacagcgtggatgaagtggagattagtgtgagccttgccaaagatgagcctgacacaaatctcgtggccttaatgaaggaagaaggggtgaaacttctaagagaagcaatgggaatttacatcagcaccctcaaaacagagttcacccagggcatgatcttacctacaatgaatggagagtcagtagacccagtggggcagccagcactgaaaactgaggagcgcaaggctaagcctgctccttcaaaaacccaggccagacctgttggagtcaaaatccccacttgtaagatcactcttaaggaaaccttcctgacgtcaccagaggagctctatagagtgtttaccacccaagagctggtgcaggcctttacccatgctcctgcaacattagaagcagacagaggtggaaagttccacatggtagatggcaacgtctctggggaatttactgatctggtgagtacctgccggccctagactcaggttattgcctctggtcagatgagtgacatttctctttttctgaactctataggtaaaatgtaaggctttaatctctttgttaataaaacattttgtttttcaaaaaaa

SEQ ID NO: 841 - DNA, 641 bp, Homo sapiens
  source 1..641: mol_type = unassigned DNA
taacaatcgcaaagggaaacttatcttcttttatgaatggagcgtcaaactaaactggacaggtacttctaagtcaggagtacaatacaaaggacatgtggagatccccaatttgtctgatgaaaacagcgtggatgaagtggagctggtgcaggcctttacccatgctcctgcaacattagaagcagacagaggtggaaagttccacatggtagatggcaacgtctctggggaatttactgatctggacactttgccaccatcaccttgaccttcatcgacaagaacggagagactgagctgtgcatggaaggtcgaggcatccctgctcctgaggaagagcggacgcgacagggctggcagcggtactactttgagggcattaaacagacctttggctatggcgcacgcttattttagggccagcggcaggggactccagcctgctggacacttcagtccagctctctcctgactggggcttgcgactcacaggattgcatcgtcccagctgctaacttggggccggggcccctcccttccacatataccttgggtttgtgcatgttttctgctgggtgggttcagagggcaatttctcttttatgtgtacatatgctaaataaacataatttaaaaaa

SEQ ID NO: 842 - DNA, 621 bp, Homo sapiens
  source 1..621: mol_type = unassigned DNA
atggagcgtcaaactaaactggacaggtacttctaagtcaggagtacaatacaaaggacatgtggagatccccaatttgtctgatgaaaacagcgtggatgaagtggagattagtgtgagccttgccaaagatgagcctgacacaaatctcgtggccttaatgaaggaagaaggggtgaaacttctaagagaagcaatgggaatttacatcagcaccctcaaaacaggacactttgccaccatcaccttgaccttcatcgacaagaacggagagactgagctgtgcatggaaggtcgaggcatccctgctcctgaggaagagcggacgcgacagggctggcagcggtactactttgagggcattaaacagacctttggctatggcgcacgcttattttagggccagcggcaggggactccagcctgctggacacttcagtccagctctctcctgactggggcttgcgactcacaggattgcatcgtcccagctgctaacttggggccggggcccctcccttccacatataccttgggtttgtgcatgttttctgctgggtgggttcagagggcaatttctcttttatgtgtacatatgctaaataaacataatttaaaaaa

SEQ ID NO: 843 - DNA, 561 bp, Homo sapiens
  source 1..561: mol_type = unassigned DNA
attttatcttttcagagttcacccagggcatgatcttacctacaatgaatggagagtcagtagacccagtggggcagccagcactgaaaactgaggagcgcaaggctaagcctgctccttcaaaaacccaggccagacctgttggagtcaaaatccccacttgtaagatcactcttaaggaaaccttcctgacgtcaccagaggagctctatagagtgtttaccacccaagagctggtgcaggcctttacccatgctcctgcaacattagaagcagacagaggtggaaagttccacatggtagatggcaacgtctctggggaatttactgatctggtccctgagaaacatattgtgatgaagtggaggtttaaatcttggccagagggacactttgccaccatcaccttgaccttcatcgacaagaacggagagactgagctgtgcatggaaggtcgaggcatccctgctcctgaggaagagcggacgcgacagggctggcagcggtactactttgagggcattaaacagacctttggctatggcgcacgcttattttagg

SEQ ID NO: 844 - DNA, 849 bp, Homo sapiens
  source 1..849: mol_type = unassigned DNA
tgttggagtcaaaatccccacttgtaagatcactcttaaggaaaccttcctgacgtcaccagaggagctctatagagtgtttaccacccaagagctggtgcaggcctttacccatgctcctgcaacattagaagcagacagaggtggaaagttccacatggtagatggcaacgtctctggggaatttactgatctggtccctgagaaacatattgtgatgaagtggaggtttaaatcttggccagaggggtctcactgtcactcaggctagagtgcagtggcataatcacagcaaactgcagccttaacctcccagacccaaacgatcctcctgcttcagcttcccaatgctgggattacaggtgtgagccaccacgcccagccaggttgccccagtcttaaactcagatggaaacctagatatgaaacctccgtcccctctgcctttcccaggacactttgccaccatcaccttgaccttcatcgacaagaacggagagactgagctgtgcatggaaggtcgaggcatccctgctcctgaggaagagcggacgcgacagggctggcagcggtactactttgagggcattaaacagacctttggctatggcgcacgcttattttagggccagcggcaggggactccagcctgctggacacttcagtccagctctctcctgactggggcttgcgactcacaggattgcatcgtcccagctgctaacttggggccggggcccctcccttccacatataccttgggtttgtgcatgttttctgctgggtgggttcagagggcaatttctcttttatgtgtacatatgctaaataaacataatttaaaaaaca

SEQ ID NO: 845 - DNA, 584 bp, Homo sapiens
  source 1..584: mol_type = unassigned DNA
agtctcgaactcctgggctcaagtgatcctcctgcctcagcctcccaaagtgctgggattacaggtgcatgccaccacgcccacgtaattttagtagagatggagtttcaccatgttagccaggctggtctggaactcctgacctctggtgatccgcccacctcagcctgccaaagtgctgggattacaggacactttgccaccatcaccttgaccttcatcgacaagaacggagagactgagctgtgcatggaaggtcgaggcatccctgctcctgaggaagagcggacgcgacagggctggcagcggtactactttgagggcattaaacagacctttggctatggcgcacgcttattttagggccagcggcaggggactccagcctgctggacacttcagtccagctctctcctgactggggcttgcgactcacaggattgcatcgtcccagctgctaacttggggccggggcccctcccttccacatataccttgggtttgtgcatgttttctgctgggtgggttcagagggcaatttctcttttatgtgtacatatgctaaataaacataatttaaaaaa

SEQ ID NO: 846 - DNA, 6398 bp, Homo sapiens
  source 1..6398: mol_type = unassigned DNA
gcgcaggggatcggcgggaagctctttcacccccgcttctgccgggctgtaactgcaatggagcaggttgagatgaactcagtcagatggccccacggcccgctcctttcttagcagcccactaatgctccagaaccctcaggagaagagccaggcctacccccgccgccgccggcctggctgctacgcataccgtcagaaccccgaggccatcgcagccgcagctatgtacaccttcctgcccgacaacttctcacctgccaagcccaagccttccaaagacctgaagccgctgctgggctccgcggttctggggctgctgcttgtgctggccgcggtggtggcctggtgctactacagcgtctccctacgcaaggcggagcgacttcgcgcggagctgctggacctgaaagctggcggcttctccatccgcaatcagaagggagagcaggtcttccgcctggccttccgctccggcgcgctggaccttgactcctgcagccgcgatggcgccctgctgggctgctcgctcacggccgacgggctgccgctgcacttcttcatccagactgtgcggcccaaggacacggtcatgtgctaccgcgtgcgctgggaggaggcagcgccgggccgggccgtggagcacgccatgttcttgggcgacgcggcggcccactggtatggtggcgccgagatgaggacgcaacactggcccatccgcctggatggccagcaggagccccagccgttcgtcaccagcgatgtctactcctccgacgccgcgtttgggggcatcctcgagcgctactggctatcttcgcgcgcggccgccatcaaagtcaatgactcagtgcccttccacctgggctggaacagcacggagcgctcgctgcggcttcaggcgcgctaccacgacacgccctacaagccacccgccggccgcgccgcagcgccagagctgagctaccgagtgtgcgtgggctcagacgtcacctccatccacaagtacatggtgcgtcgctacttcaacaagccgtcaagggtgccagcacccgaggccttccgagaccccatttggtccacatgggcgctgtacgggcgcgccgtggaccaggacaaggtgctgcgttttgcccaacagatccgcctgcaccacttcaacagcagccacctggaaatcgacgacatgtacacacctgcttatggcgacttcgacttcgatgaggtcaaattccccaacgccagcgacatgttccgccgcctgcgcgacgccggcttccgcgtcacgctctgggtgcacccttttgtcaactacaactcgtcgcgcttcggcgagggcgtggagcgcgagctgttcgtgcgcgaacccacgggccggttacctgcgctggtgcgctggtggaacggcatcggcgcggtgctagacttcacgcacccaaaggcccgcgactggttccagggacacctgcggcggctgcgctctcgctactccgtggcttccttcaagttcgacgcgggcgaggtcagctacctgccgcgggacttcagcacctaccggccgctgccggaccccagcgtctggagccggcgctacactgagatggcgctgcccttcttctcgctggcggaggtgcgcgtaggctaccagtcacagaacatctcctgcttcttccgcctggtggatcgcgactctgtgtggggctacgacctggggttgcgctcactcatccccgcggtgctcaccgtcagcatgctgggctacccattcatcctacccgatatggtgggcggcaacgccgtgccccagcggacagccggcggcgatgtgcccgagcgcgagctctacattcgctggctggaagtggccgcctttatgccggccatgcagttctctatcccgccctggcgctacgacgcggaagtggtggccatcgcgcagaagttcgccgccctgcgggcctcgcttgtggcaccgctgttgcttgagctggcgggcgaggtcaccgacacgggtgaccctatcgtgcgccccctttggtggattgcgcccggcgacgagacagctcaccgtatcgactcgcagttccttattggggacacgctgcttgtggccccggtgctggagccaggcaagcaggagcgcgacgtctatttgcccgccggcaagtggcgcagctacaagggtgagcttttcgacaagacgccggtgctgctcaccgattacccggtcgacctggatgagatcgcctactttacctgggcgtcctgacccagcccagggcccggtaaccgcaaagcccccagtcttcatgcagaccttgaaccctccgtcacacccgcaccatgtactcccaggaacctcccacctctataccacccattaagtggctgctgacttaaatgtgctggaaccagctgctgaaggtggggcctagggagggggcactgaagcaatctcctgctccaacgcacaatccttactgtgccctttccacccccacactcacaccaatctgcagaaacctcttccctggggtggaagccagagagcttagaggaaaaaggtcagctctcttcctgttatacatggttatacatggttggggtttaaaagcacaaagagaaacctccccctcctggctttcgtggccatctttgtccatcttaggtggggacttgatcttatttaaggtctccaaatagcccccaccacacttagaacgtgtgttttcttagtgttagaagccaggccctgagtccccagcactcacctgaactgtggctgatttggtcccagtccagctggggaggtgtttggctgacaaggaggcaagagatcccctcccagggaacaggaggactgggcttagcacagagccatcatcatgttcccaatttgtgaagagactcctaacactgcactaacccatttgtgtacatacatgggctcagccctgggccaaatgtgcctgatgggaacagacttgcagggccatgcaggccagacttcgtgccttaactgaagagtgtgcgtgtgtgtgtgtgagagagagagagagagagaaacacgcatcatgggtccctgatctatgaaatgaacacaacctctctgaggctggatgatctggaggaagggggcatggagcaaatttgaggctctgattgctgagccagcctcctcccaggcggtttccccaggactctcgtaggaaataaatagccctttcaagattcctcagctgcctcaccccctgcacatgtgcctggggtgtggcctagaagggagtgatgttcttactctggtggtctgtgcttctgaacacaggctacatgcacacactgacaactaccaataaacagacaggggaaggtctttcatctcagccattttctcttccccccgcccccccttagatggagtcttgctctgtcacccaggttggagtgcagtggcacaatcagctcactgcaacccctcctcctaggttcaagcgattgagtagctgagattacaggcatgcatcactatgcctggctttttgtattttttagtagagatggggtttaccatgttggccaggctagtctcaaactcctgacctagtgatgcacccaccttggcctcccaaagtgttgggattacaggcatgagccaccacgccagccattttctctttctaagaagagcaacctcagccggagtgagttttttctgactttgcagctgagtctggagaaaagtggcatgccagagcgggtcggtgggaaacagggtgaactttagcttccatcaacagctctggtagcaaaaccagtcccctaccccctagagaatgcatccgtttccccacctgatatggtttggctgtgtccccacctaaaactcatcttgaattgtagctcccataattgccatgtgttgtgggaaggacccagtgggagataattgaaatatgggggcagtttccgccatactgttctggtgatagtgaatagatctcatgagagctgatgattttataagaggtttccccttttgcttagttctcattctctcttgcctgccgccatgtaagacgtgcctttctgtcatgcttgtgaggcctccccagccacgtggagctgtgagttcattaaacctctttttctttataaattacccagtcttggttatgtctttatcagcactgtgaaaatgaacctatacagtaaattggtaccagtagagtggggcgctgctgtaaatacccaaaaatgtggaagcaactttggaactgggtaacaggcagaggttggaacagtttggagggatcagaagacaggaaaatgtgggaaagtttgggacttcctagagacttgttaaatggctttgaccaaaatgctgataatgattgggacatgaaatccaggctgagttggtctcagatagcgatgaggaacttgtttggtactggagtaaaggtgactcttgctatattttagcaaagagactggctgcattttgcccctgccctagagatttgtggaactttgaactcgagggagatgatttagggtatctggcagaagaaatttctaagcagcaaagcattcatgaggtgacttgggtgctgttaaaagcattcagttttaaaagggaaacagactataaaagtttggaaaatttgcagcctgatgatgagatagaaaagaaaaacccattttctgaggataaattcaagccccctgcagaaatttgcataagtaacaaggagccaaatgttaatcactaagacatggggaaaatgtctgcagggcatgtcagagacctttgcagcagtgcctcccatcacaggcctggaggcctaggagggaaaaaatggttttgtgggccaggcccaaggtccccttgctgtgtgcagcccagggacttggtaccatgcatcccagctgctctagtcatggctaaaaggggccaagatacagctcaggccttggcttcagagggtgcaagccccaagtcttggcatcttccacgtagtgttgagcctgcaggtgcacagaagtcaagaactgaggtttgggaacctctgcctagatttcagagaatgtatggaaatgcatgtatgtccaggcagaagtttgctacaggagtgaggccctcatggagaacctctgttaaggcaatgtggaaggggaagcccccacacagagaccccactgggacactgcctagtagagctgtcagaagaaggccaccgtcctccagacatcagaatggtatatccactgacagcttgcaccatgcacctggaaaagccacagacactcaacgccagcctgtaaaagcaaccgagaagtaggctgtaccctgcaatgccataggggtggagctgcccaagaccatgggaacccacctcctgcatcagtgtgacctggatgtgagacatggagtcaaaggagaccattttggagctttaagatttaactgccctgctggatttcagacttgcatggggcctttagccacttcgttttggccaacttctcccacttgaaatgggtgtatttagccaatgcctgtacctccgttgtatctaggaagtaactaactagcctttgattttacaggctcataggtggaagggacttgccttgtttcagatgagactttggagtatggacttttgagttaatgctgaaatgagttaagactttgggggactgttgggaaggcatgattgatttttaaatgagaggacatgagatttgggaggggccagggagagaatgatatggtttggctgtgtccccatccaaatatcaccttaaattgtagctcccataattgtgggagggacctggtgggagataattgaatcataggggcagtttctcccatactgttctggtggtagtgaataagtctcacgagatctgatggtttaataaggggtttccccttttgcttggctctcattctctcttgtctgctgccatgtaagatgtgccttttgccttccaccatgattgtgaggcctcccagccacatggaactgtgagttcattaaacctctttttcttcataaattacccagtctcgggtatgtctttatcagcagtgtgaaaacagactaatacaccactcctctaccttctttattttctcagtgtggaaaatgcctgatgaaagctttggggccctcacagatgcacaactcaagtgctgattctatcacttatctaccagctctgtgaccttgaacaagccgcttaaccttgctaagcctctgttttctcatatgtcaaatggtgataataatgcctacctcccgaggttgttgtaagaattataagcacaaatgtatgtaaagtgcctggcacaaagtaggtgctcaataaatggtagctattataat

SEQ ID NO: 847 - DNA, 480 bp, Homo sapiens
  source 1..480: mol_type = unassigned DNA
ttcctgcccgacaacttctcacctgccaagcccaagccttccaaagacctgaagccgctgctgggctccgcggttctggggctgctgcttgtgctggccgcggtggtggcctggtgctactacagcgtctccctacgcaaggcggagcgacttcgcgcggagctgctggacctgaaagctggcggcttctccatccgcaatcagaagggagagcaggagccccagccgttcgtcaccagcgatgtctactcctccgacgccgcgtttgggggcatcctcgagcgctactggctatcttcgcgcgcggccgccatcaaagtcaatgactcagtgcccttccacctgggctggaacagcacggagcgctcgctgcggcttcaggcgcgctaccacgacacgccctacaagccacccgccggccgcgccgcagcgccagagctgagctaccgagtgtgcgtgggctcagacgtcacctccatc

SEQ ID NO: 848 - DNA, 834 bp, Homo sapiens
  source 1..834: mol_type = unassigned DNA
ttacgtaaggcgcgagtcccgcgcggccggccggggctccgcgactgggcgggcggaggcggcgccgccctgcaggatccgggctggaagcctctcggagtgctgcctccagccaaggggcggccggcgagtcccagtgagagcggagggtgccagaggtagggggccgagaaacaaagttcccggggcttcctccggggccgcggtcggggctgcgcgtttgaccgcccccctcctcgcgaaggcaatggcttccaaactcctgcgcgcggtcatcctcgggccgcccggctcgggcaagggcaccgtgtgccagaggatcgcccagaactttggtctccagcatctctccagcggccacttcttgcgggagaacatcaaggccagcaccgaagttggtgagatggcaaagcagtatatagagaaaagtcttttggttccagaccatgtgatcacacgcctaatgatgtccgagttggagaacaggcgtggccagcactggctccttgatggttttcctaggacattaggacaagccgaagccctggacaaaatctgtgaagtggatctagtgatcagtttgaatattccatttgaaacacttaaagatcgtctcagccgccgttggattcaccctcctagcggaagggtatataacctggacttcaatccacctcatgtacatggtattgatgacgtcactggtgaaccgttagtccagcaggaggatgataaacccgaagcagttgctgccaggctaagacagtacaaagacgtggcaaagccagtcattgaattatacaagagccgaggagtgctccaccaattttccgg

SEQ ID NO: 849 - DNA, 1043 bp, Homo sapiens
  source 1..1043: mol_type = unassigned DNA
tgtgtttatttgattgcttttggtggcgaggcgcggggctcgggctcgtcgcgcgccccatggccggggagcgcatccgccaaccccgggcggaggtgggcccctccgagcgcgcgcgggcggcgggcagcggcggcagctgagactccgggggatgtgacagccgccggggaggggacgagacgcagaccacacgttgcccacgtgcgaggaccgggcaggggctcagcccctaggccgcccggtgcgtggggcggcgggggctggctttgagtcacccccgcttgtgccagcttccccggctcggcggagactggcttggggatgcctggccgcccggcccccttctcggacgcggcgtggggagcgagctggagttaaggatgaaggggcggccggcgagtcccagtgagagcggagggtgccagaggtagggggccgagaaacaaagttcccggggcttcctccggggccgcggtcggggctgcgcgtttgaccgcccccctcctcgcgaaggcaatggcttccaaactcctgcgcgcggtcatcctcgggccgcccggctcgggcaagggcaccgtgtgccagaggatcgcccagaactttggtctccagcatctctccagcggccacttcttgcgggagaacatcaaggccagcaccgaagttggtgagatggcaaagcagtatatagagaaaagtcttttggttccagaccatgtgatcacacgcctaatgatgtccgagttggagaacaggcgtggccagcactggctccttgatggttttcctaggacattaggacaagccgaagccctggacaaaatctgtgaagtggatctagtgatcagtttgaatattccatttgaaacacttaaagatcgtctcagccgccgttggattcaccctcctagcggaagggtatataacctggacttcaatccacctcatgtacatggtattgatgacgtcactggtgaaccgttagtccagcaggaggatgataaacccgaagcagttgctgccaggctaagacagtacaa

SEQ ID NO: 850 - DNA, 1335 bp, Homo sapiens
  source 1..1335: mol_type = unassigned DNA
gtgtttatttgattgcttttggtggcgaggcgcggggctcgggctcgtcgcgcgccccatggccggggagcgcatccgccaaccccgggcggagaagttggtgagatggcaaagcagtatatagagaaaagtcttttggttccagaccatgtgatcacacgcctaatgatgtccgagttggagaacaggcgtggccagcactggctccttgatggttttcctaggacattaggacaagccgaagccctggacaaaatctgtgaagtggatctagtgatcagtttgaatattccatttgaaacacttaaagatcgtctcagccgccgttggattcaccctcctagcggaagggtatataacctggacttcaatccacctcatgtacatggtattgatgacgtcactggtgaaccgttagtccagcaggaggatgataaacccgaagcagttgctgccaggctaagacagtacaaagacgtggcaaagccagtcattgaattatacaagagccgaggagtgctccaccaattttccggaacggagacgaacaaaatctggccctacgtttacacacttttctcaaacaagatcacacctattcagtccaaagaagcatattgaccctgcccaatggaagaaccaggaagatgtggtcattcattcaatagtgtgtgtagtattggtgctgtgtccaaattagaagctagctgaggtagcttgcagcatcttttctagttgaaatggtgaactgataggaaaacaaatgagtagaaagagttcatgaagaggccctcctctgcctttcaaaaggctggtcacctacacatgtttaaggtgtctctgcacatgtctcaagcccatcacaagaaagcaagtacagtgtggatttcaaatggtgtgtaacttcagctccagctggtttttgacagctgttgctgtggtaatatttttgacatgtgatggtgatagtctctggttctccccatccccacaaaggctgttgaaccacagcaccaggaagcctgagaatgaatcctgagggctctagcccaggctttgtcccaggctttctggtgtgtgccctcctggtaacagtgaaattgaagctacttactcatagtggttgtttctctggtcttgagtgactgtgtccacagttcatttttttccggtaggaataactccttttctacatccacgctccatagagtctctccttttcagacatcctgggatgaaagaatttggcttttttttttctttttttttttggacatctgttttcactcttaggcttttaaacaatagttattgcttttatccctctcagattct

SEQ ID NO: 851 - DNA, 6836 bp, Homo sapiens
  source 1..6836: mol_type = unassigned DNA
agtccgcctgctactcggtcccggcgctgggctgaggggaggggttgtcttaaaagtctctccttccccctgtaggggcggccggcgagtcccagtgagagcggagggtgccagaggtagggggccgagaaacaaagttcccggggcttcctccggggccgcggtcggggctgcgcgtttgaccgcccccctcctcgcgaaggcaatggcttccaaactcctgcgcgcggtcatcctcgggccgcccggctcgggcaagggcaccgtgtgccagaggatcgcccagaactttggtctccagcatctctccagcggccacttcttgcgggagaacatcaaggccagcaccgaagttggtgagatggcaaagcagtatatagagaaaagtcttttggttccagaccatgtgatcacacgcctaatgatgtccgagttggagaacaggcgtggccagcactggctccttgatggttttcctaggacattaggacaagccgaagccctggacaaaatctgtgaagtggatctagtgatcagtttgaatattccatttgaaacacttaaagatcgtctcagccgccgttggattcaccctcctagcggaagggtatataacctggacttcaatccacctcatgtacatggtattgatgacgtcactggtgaaccgttagtccagcaggaggatgataaacccgaagcagttgctgccaggctaagacagtacaaagacgtggcaaagccagtcattgaattatacaagagccgaggagtgctccaccaattttccggaacggagacgaacaaaatctggccctacgtttacacacttttctcaaacaagatcacacctattcagtccaaagaagcatattgaccctgcccaatggaagaaccaggaagatgtggtcattcattcaatagtgtgtgtagtattggtgctgtgtccaaattagaagctagctgaggtagcttgcagcatcttttctagttgaaatggtgaactgataggaaaacaaatgagtagaaagagttcatgaagaggccctcctctgcctttcaaaaggctggtcacctacacatgtttaaggtgtctctgcacatgtctcaagcccatcacaagaaagcaagtacagtgtggatttcaaatggtgtgtaacttcagctccagctggtttttgacagctgttgctgtggtaatatttttgacatgtgatggtgatagtctctggttctccccatccccacaaaggctgttgaaccacagcaccaggaagcctgagaatgaatcctgagggctctagcccaggctttgtcccaggctttctggtgtgtgccctcctggtaacagtgaaattgaagctacttactcatagtggttgtttctctggtcttgagtgactgtgtccacagttcatttttttccggtaggaataactccttttctacatccacgctccatagagtctctccttttcagacatcctgggatgaaagaatttggcttttttttttctttttttttttggacatctgttttcactcttaggcttttaaacaatagttattgcttttatccctctcagattctaataactgagagcgatggggctatattgaatctctgtatgcactgagaactgagctatgaagaggatcttattaaactgctggtctgactttatggattgacactgttcctttcttttattgtgaaaaaaaaaaaaaaccctgaaagtcttgggaaccccctaaagtcttttgggaatcctcaaaaagcatgggaagttaagtatttagctacataaatgttgtaagatcatatcttatgtatagaagtaataagaccatttggaattactggactaattgaatagttaaggtttctattcgggacaataaaatgtattttgaaagtgctgctaactattgatgctgacagtgtttcactcctatgagtgacccaaacatattataaatatgtggtaaagggaatggagcctgtggggttgagcagaatgttgtactagctgtgcctggactgagtataacagctttatgattatgagaaaacaaattctttattttttttttctgttccaaagattcatcctatggggtggccataaagtctagaattagatactaatattttgtcattcattataacatatcaataaaccatttgttaaaagatttgcctggtttccagacttggtggccaccttgaataattcttgctgtcttctgggaaggatgatgaaatttattcctgctgccttaaaaatatgtatcccttcttcacccatcatgactgtccccagtgagtgtcctttactattcttgggagtgactcctgtctaacttttcatactggcgagaagaaaagaagcctattttaacactttagtggtgttgaaacacattacttactttctgaagatgtcccagtgaatcctctgtcaattcactgccatatgtaatctatatgataaggaatgcatcttccttctaagtactgcccaaactcttgccagctcctctcccattgtcccttcatgtgaatatttcttggctaccttagtggaaatatagatcagttttctccccatccatcctctcaaacataatgagattgtttactttttagatttatgcagtgaaaatgcccagtcaggtctgaatcgtcagtgcattatattgactctgagcactttagaatttagagttgcaattgaatgccagctgtggagatggggtgcatatcagatatataaataaagctcaggtttgctagggaaccaggtatagagaaaaataagtctgatatgaggaaaattgcacaatttagagtagttatgccgtagagaaaatttccacaaactaggaaatgtagagagttattctatagaatactcaaaagaggaaagtatgtgatttttggaaacaggaaaatcttcaaacttctttcttcacttccctttgtgtttagctgaccctccaatgtgatcattgcctttggagtttgggagaggtacgggaagtggcctgatccctgcttccatacttcactcctccatccatccttccctccctcttcccctccagctaaatggacaattctagccaacattgagtcactcaataagtctcaacagtgggtgtgtttgctgagattgtccagcggttgagcagtttggtctcacctccctcgctagttgagaccaaaaagagacaaataactttttcatggtctttgaaacataatgcttatttcgtggtcaatggctttaaaaaaatctgtttcttgttttcttcaacaaactcactagttttcccttaaatgatattgtaaaaattaaagtaatcttgaaaatgttttgacaaaagtaaaattaaagggacatcttttcttgttttgttttttttttttctattgccacacatgaccgttccttcacctttaagcaaagagagtggttcagatggtttctaagatgccaacctgacctcgcattctgtcattctacccagctcttaattcaatttgcttccattatcctaacaggcttctttcttacttagaacttggaaaggctgctgtatttaataccctccaacactaacgcagacttaagataggtactgtttattgaaaacctactgagtgaaatgtgcggttttaggaccttcataaacatctcatttaatctttctagcatcctgtgaaacagccatgatttcacgttgataaacaaagaagacaggggtcccagggatgtgaagcatcttgcccaggcttctgctgctggtgaccagtgtagccaggactccagcccaggttttcctgactcagaagactgagctttttcctggatgttattaatagctaattgtgtccaagcaaccaagggccttgagtctgcttggttctgcttatggcctcacatcaagaaatggagctagtccatgtctgtagtcccaatgctttgggaagccatgatgggaaggttgtcggaggccaaaagttcaagaccaggctgggcaatatcacaagactccatctctacggaaaagtaaaaaattagccagtcatggtggtgtacacttatggtcctagttactcaggagacttaggcaggaggattgcttgatcctaggaattcgaggctgcagtgagctatgattgcacctctgcacccaagcctgggcgacacagcgagaccctctctcttaaaaaaaaaaaatagcagagctcaccaaagtgatgttcacctttttatgacattcctttttcttagcttaagaaaagaaagctgctagatgagagtcttagttttcctgcataagacctcctttatgaatagaataaaagactgtcaaagtaggctgggcttgggcccaggctaatctatgaaggaagcaagctcgtgttccttacctatccttttggtgtccattggattgtgccccgaagtggcctttacccttgagccgtccccagccatggtgctcacacataggcttttgagctccttggagctatccagatcctgctcacttttccttcctgagatcagaacaaatcacccccttactcccactccaaacaaggccttgatgataaactaatccttcctaaaatgctggtaggtaaacaagcaatgatgaagcattgaacacaggttaactcctgacttttgtaccattgtctattccattacacattaacatgactctgaatgccagatccaaacctttgcccaccatctgcttgtcgtgcaacagttgaggcagtaaccaggggagattcacttcctgtcttgtccttccccagggatcacccccctgctgccctctagcagccaaactcagatgagttccattgttaccctaggtgtgcccatctctttggtagggaaggagaaaggtaagaatagccatcagtgaggaaggattcttggagcgaggagccactgtggtttttcctgctatttaagatgttgagaccggataactttagaaagatacctgcacaaacccataaatagtgcttttataaagtttagttcaccggaacctgagttcagtatttgacattagctttttgtccaaagagttgaagcctgctggaggtctttgctcaaataataaataccacatatttccaagtgtgttcaggtataggcactaggtactgtctgtttacttcatgttaggcacattacatgcattggctaatcaaatcctcatcaattacatatgtaataatctaaacttgcctccttgtattataaatggaaataatcctgtttatttaaacgggttttcatgtacctgtagggattaggaaactcaaatggcctttttaatacctttccctagtttgagctccctgttctctttaacagataaaacaacatatttgcttcagcctggaatctgtttttggtgctttggtgcagagacaggaaatgggcactcagagtcacactggtagttgcacactgtatctacagagggcgtgtctcatctgtactctgctgggttacaggatttcagtaggtatttgtgtccacctgagaattctgtttattacctttcatttgacagtgtctttcctttctgcagttgattttgctagagaggcaattcataaggtgaggtcctgttcatagtatgacttgctttctcaatatctccttcaatttttagtaactcttggtctatttggtgtctttaaaaaaaataacctagtaataaagacttcttttaatgtggaaatgtggtctggtagtaagttatttctttccacatgtaactgacccaatctggtttccaaatgagaagtgtgcaggccccagaggttgagaagccatatttcaactgtgaaaaaaatctgcttcctgcatctgttgaaatatagttgttcatacttgccatcccttatctttcttgtaacaatttgcacagttcttgccagaataaatgccattatctgtatgtttcagggagttccccaatttgatcatttttgtgtgtgtgtggtgtgtgtgtgagagagagagatactgcagtaaaacatttctaaaggatgaaagctcttgtatggcatagatatgaattccttcctctggtaataattaggttattcccagaagcacagtgtcattctttaaataaaagctttcctgtttaaagcttttcaaaggagcagaccaccttgaagattccccctagggttgatatgtgtctaattcattttataaaaattattcttgtcttcattttaaagctttggctatatagtcagaaatgtcctaaataacaaactattttgtatttaatttagggaagactaaagggaagaaaaatgaaaactcagtctttatgtaagctccaaggatattagggcttaaagggcttttctagttttatgagaatttgtactactgatttttatatattcctgtttttgagatgaacagatctctggggaaattgttgagttacaatggcatttcactgtgatccctctcaagctcagatcagttctataacccaatgacaacctgtctctttggtttactgtcctgtgaaatgtcagctcaagtttcccagaagtcgtgtgtttatgatgagtcagagtgcttttcctcggtgggacagttgctggccctcttaattttggtgtatgtgcttccaagtatctaaacctccagtctgatctgtatatgctatcctaactgttaattgtattattgattatgttgattatcttgcttgaaggttcatacttttcaatttgatagaaataaagtttttttctgcttata

SEQ ID NO: 852 - DNA, 928 bp, Homo sapiens
  source 1..928: mol_type = unassigned DNA
ggggccgcgcgccggggaacctgtggcgccggggggctcgcagcctcgcgcctctccagcccctccacgcagcctcgggcctcggggcagagccctgggtggctttgaaaggcctgtctgttcgttgtcgccttctaagaagttggtgagatggcaaagcagtatatagagaaaagtcttttggttccagaccatgtgatcacacgcctaatgatgtccgagttggagaacaggcgtggccagcactggctccttgatggttttcctaggacattaggacaagccgaagccctggacaaaatctgtgaagtggatctagtgatcagtttgaatattccatttgaaacacttaaagatcgtctcagccgccgttggattcaccctcctagcggaagggtatataacctggacttcaatccacctcatgtacatggtattgatgacgtcactggtgaaccgttagtccagcaggaggatgataaacccgaagcagttgctgccaggctaagacagtacaaagacgtggcaaagccagtcattgaattatacaagagccgaggagtgctccaccaattttccggaacggagacgaacaaaatctggccctacgtttacacacttttctcaaacaagatcacacctattcagtccaaagaagcatattgaccctgcccaatggaagaaccaggaagatgtggtcattcattcaatagtgtgtgtagtattggtgctgtgtccaaattagaagctagctgaggtagcttgcagcatcttttctagttgaaatggtgaactgataggaaaacaaatgagtagaaagagttcatgaagaggccctcctctgcctttcaaaaggctggtcacctacacatgtttaaggtgtctctgcacatgtctcaagcccatcacaagaaagcaagtacagtgt

SEQ ID NO: 853 - DNA, 867 bp, Homo sapiens
  source 1..867: mol_type = unassigned DNA
cagtccaggcatgaagaggataatgagcttaacatacctgtgagaagtttcaggtggaggtatctggtggccttcggcacagcaagtgaagttggtgagatggcaaagcagtatatagagaaaagtcttttggttccagaccatgtgatcacacgcctaatgatgtccgagttggagaacaggcgtggccagcactggctccttgatggttttcctaggacattaggacaagccgaagccctggacaaaatctgtgaagtggatctagtgatcagtttgaatattccatttgaaacacttaaagatcgtctcagccgccgttggattcaccctcctagcggaagggtatataacctggacttcaatccacctcatgtacatggtattgatgacgtcactggtgaaccgttagtccagcaggaggatgataaacccgaagcagttgctgccaggctaagacagtacaaagacgtggcaaagccagtcattgaattatacaagagccgaggagtgctccaccaattttccggaacggagacgaacaaaatctggccctacgtttacacacttttctcaaacaagatcacacctattcagtccaaagaagcatattgaccctgcccaatggaagaaccaggaagatgtggtcattcattcaatagtgtgtgtagtattggtgctgtgtccaaattagaagctagctgaggtagcttgcagcatcttttctagttgaaatggtgaactgataggaaaacaaatgagtagaaagagttcatgaagaggccctcctctgcctttcaaaaggctggtcacctacacatgtttaaggtgtctctgcacatgtctcaagcccatcacaagaaagca

SEQ ID NO: 854 - DNA, 6887 bp, Homo sapiens
  source 1..6887: mol_type = unassigned DNA
ttacgtaaggcgcgagtcccgcgcggccggccggggctccgcgactgggcgggcggaggcggcgccgccctgcaggatccgggctggaagcctctcggagtgctgcctccagccaaggggcggccggcgagtcccagtgagagcggagggtgccagaggtagggggccgagaaacaaagttcccggggcttcctccggggccgcggtcggggctgcgcgtttgaccgcccccctcctcgcgaaggcaatggcttccaaactcctgcgcgcggtcatcctcgggccgcccggctcgggcaagggcaccgtgtgccagaggatcgcccagaactttggtctccagcatctctccagcggccacttcttgcgggagaacatcaaggccagcaccgaagttggtgagatggcaaagcagtatatagagaaaagtcttttggttccagaccatgtgatcacacgcctaatgatgtccgagttggagaacaggcgtggccagcactggctccttgatggttttcctaggacattaggacaagccgaagccctggacaaaatctgtgaagtggatctagtgatcagtttgaatattccatttgaaacacttaaagatcgtctcagccgccgttggattcaccctcctagcggaagggtatataacctggacttcaatccacctcatgtacatggtattgatgacgtcactggtgaaccgttagtccagcaggaggatgataaacccgaagcagttgctgccaggctaagacagtacaaagacgtggcaaagccagtcattgaattatacaagagccgaggagtgctccaccaattttccggaacggagacgaacaaaatctggccctacgtttacacacttttctcaaacaagatcacacctattcagtccaaagaagcatattgaccctgcccaatggaagaaccaggaagatgtggtcattcattcaatagtgtgtgtagtattggtgctgtgtccaaattagaagctagctgaggtagcttgcagcatcttttctagttgaaatggtgaactgataggaaaacaaatgagtagaaagagttcatgaagaggccctcctctgcctttcaaaaggctggtcacctacacatgtttaaggtgtctctgcacatgtctcaagcccatcacaagaaagcaagtacagtgtggatttcaaatggtgtgtaacttcagctccagctggtttttgacagctgttgctgtggtaatatttttgacatgtgatggtgatagtctctggttctccccatccccacaaaggctgttgaaccacagcaccaggaagcctgagaatgaatcctgagggctctagcccaggctttgtcccaggctttctggtgtgtgccctcctggtaacagtgaaattgaagctacttactcatagtggttgtttctctggtcttgagtgactgtgtccacagttcatttttttccggtaggaataactccttttctacatccacgctccatagagtctctccttttcagacatcctgggatgaaagaatttggcttttttttttctttttttttttggacatctgttttcactcttaggcttttaaacaatagttattgcttttatccctctcagattctaataactgagagcgatggggctatattgaatctctgtatgcactgagaactgagctatgaagaggatcttattaaactgctggtctgactttatggattgacactgttcctttcttttattgtgaaaaaaaaaaaaaaccctgaaagtcttgggaaccccctaaagtcttttgggaatcctcaaaaagcatgggaagttaagtatttagctacataaatgttgtaagatcatatcttatgtatagaagtaataagaccatttggaattactggactaattgaatagttaaggtttctattcgggacaataaaatgtattttgaaagtgctgctaactattgatgctgacagtgtttcactcctatgagtgacccaaacatattataaatatgtggtaaagggaatggagcctgtggggttgagcagaatgttgtactagctgtgcctggactgagtataacagctttatgattatgagaaaacaaattctttattttttttttctgttccaaagattcatcctatggggtggccataaagtctagaattagatactaatattttgtcattcattataacatatcaataaaccatttgttaaaagatttgcctggtttccagacttggtggccaccttgaataattcttgctgtcttctgggaaggatgatgaaatttattcctgctgccttaaaaatatgtatcccttcttcacccatcatgactgtccccagtgagtgtcctttactattcttgggagtgactcctgtctaacttttcatactggcgagaagaaaagaagcctattttaacactttagtggtgttgaaacacattacttactttctgaagatgtcccagtgaatcctctgtcaattcactgccatatgtaatctatatgataaggaatgcatcttccttctaagtactgcccaaactcttgccagctcctctcccattgtcccttcatgtgaatatttcttggctaccttagtggaaatatagatcagttttctccccatccatcctctcaaacataatgagattgtttactttttagatttatgcagtgaaaatgcccagtcaggtctgaatcgtcagtgcattatattgactctgagcactttagaatttagagttgcaattgaatgccagctgtggagatggggtgcatatcagatatataaataaagctcaggtttgctagggaaccaggtatagagaaaaataagtctgatatgaggaaaattgcacaatttagagtagttatgccgtagagaaaatttccacaaactaggaaatgtagagagttattctatagaatactcaaaagaggaaagtatgtgatttttggaaacaggaaaatcttcaaacttctttcttcacttccctttgtgtttagctgaccctccaatgtgatcattgcctttggagtttgggagaggtacgggaagtggcctgatccctgcttccatacttcactcctccatccatccttccctccctcttcccctccagctaaatggacaattctagccaacattgagtcactcaataagtctcaacagtgggtgtgtttgctgagattgtccagcggttgagcagtttggtctcacctccctcgctagttgagaccaaaaagagacaaataactttttcatggtctttgaaacataatgcttatttcgtggtcaatggctttaaaaaaatctgtttcttgttttcttcaacaaactcactagttttcccttaaatgatattgtaaaaattaaagtaatcttgaaaatgttttgacaaaagtaaaattaaagggacatcttttcttgttttgttttttttttttctattgccacacatgaccgttccttcacctttaagcaaagagagtggttcagatggtttctaagatgccaacctgacctcgcattctgtcattctacccagctcttaattcaatttgcttccattatcctaacaggcttctttcttacttagaacttggaaaggctgctgtatttaataccctccaacactaacgcagacttaagataggtactgtttattgaaaacctactgagtgaaatgtgcggttttaggaccttcataaacatctcatttaatctttctagcatcctgtgaaacagccatgatttcacgttgataaacaaagaagacaggggtcccagggatgtgaagcatcttgcccaggcttctgctgctggtgaccagtgtagccaggactccagcccaggttttcctgactcagaagactgagctttttcctggatgttattaatagctaattgtgtccaagcaaccaagggccttgagtctgcttggttctgcttatggcctcacatcaagaaatggagctagtccatgtctgtagtcccaatgctttgggaagccatgatgggaaggttgtcggaggccaaaagttcaagaccaggctgggcaatatcacaagactccatctctacggaaaagtaaaaaattagccagtcatggtggtgtacacttatggtcctagttactcaggagacttaggcaggaggattgcttgatcctaggaattcgaggctgcagtgagctatgattgcacctctgcacccaagcctgggcgacacagcgagaccctctctcttaaaaaaaaaaaatagcagagctcaccaaagtgatgttcacctttttatgacattcctttttcttagcttaagaaaagaaagctgctagatgagagtcttagttttcctgcataagacctcctttatgaatagaataaaagactgtcaaagtaggctgggcttgggcccaggctaatctatgaaggaagcaagctcgtgttccttacctatccttttggtgtccattggattgtgccccgaagtggcctttacccttgagccgtccccagccatggtgctcacacataggcttttgagctccttggagctatccagatcctgctcacttttccttcctgagatcagaacaaatcacccccttactcccactccaaacaaggccttgatgataaactaatccttcctaaaatgctggtaggtaaacaagcaatgatgaagcattgaacacaggttaactcctgacttttgtaccattgtctattccattacacattaacatgactctgaatgccagatccaaacctttgcccaccatctgcttgtcgtgcaacagttgaggcagtaaccaggggagattcacttcctgtcttgtccttccccagggatcacccccctgctgccctctagcagccaaactcagatgagttccattgttaccctaggtgtgcccatctctttggtagggaaggagaaaggtaagaatagccatcagtgaggaaggattcttggagcgaggagccactgtggtttttcctgctatttaagatgttgagaccggataactttagaaagatacctgcacaaacccataaatagtgcttttataaagtttagttcaccggaacctgagttcagtatttgacattagctttttgtccaaagagttgaagcctgctggaggtctttgctcaaataataaataccacatatttccaagtgtgttcaggtataggcactaggtactgtctgtttacttcatgttaggcacattacatgcattggctaatcaaatcctcatcaattacatatgtaataatctaaacttgcctccttgtattataaatggaaataatcctgtttatttaaacgggttttcatgtacctgtagggattaggaaactcaaatggcctttttaatacctttccctagtttgagctccctgttctctttaacagataaaacaacatatttgcttcagcctggaatctgtttttggtgctttggtgcagagacaggaaatgggcactcagagtcacactggtagttgcacactgtatctacagagggcgtgtctcatctgtactctgctgggttacaggatttcagtaggtatttgtgtccacctgagaattctgtttattacctttcatttgacagtgtctttcctttctgcagttgattttgctagagaggcaattcataaggtgaggtcctgttcatagtatgacttgctttctcaatatctccttcaatttttagtaactcttggtctatttggtgtctttaaaaaaaataacctagtaataaagacttcttttaatgtggaaatgtggtctggtagtaagttatttctttccacatgtaactgacccaatctggtttccaaatgagaagtgtgcaggccccagaggttgagaagccatatttcaactgtgaaaaaaatctgcttcctgcatctgttgaaatatagttgttcatacttgccatcccttatctttcttgtaacaatttgcacagttcttgccagaataaatgccattatctgtatgtttcagggagttccccaatttgatcatttttgtgtgtgtgtggtgtgtgtgtgagagagagagatactgcagtaaaacatttctaaaggatgaaagctcttgtatggcatagatatgaattccttcctctggtaataattaggttattcccagaagcacagtgtcattctttaaataaaagctttcctgtttaaagcttttcaaaggagcagaccaccttgaagattccccctagggttgatatgtgtctaattcattttataaaaattattcttgtcttcattttaaagctttggctatatagtcagaaatgtcctaaataacaaactattttgtatttaatttagggaagactaaagggaagaaaaatgaaaactcagtctttatgtaagctccaaggatattagggcttaaagggcttttctagttttatgagaatttgtactactgatttttatatattcctgtttttgagatgaacagatctctggggaaattgttgagttacaatggcatttcactgtgatccctctcaagctcagatcagttctataacccaatgacaacctgtctctttggtttactgtcctgtgaaatgtcagctcaagtttcccagaagtcgtgtgtttatgatgagtcagagtgcttttcctcggtgggacagttgctggccctcttaattttggtgtatgtgcttccaagtatctaaacctccagtctgatctgtatatgctatcctaactgttaattgtattattgattatgttgattatcttgcttgaaggttcatacttttcaatttgatagaaataaagtttttttctgcttatagctagcgaa

SEQ ID NO: 855 - DNA, 6998 bp, Homo sapiens
  source 1..6998: mol_type = unassigned DNA
agccgccggggaggggacgagacgcagaccacacgttgcccacgtgcgaggaccgggcaggggctcagcccctaggccgcccggtgcgtggggcggcgggggctggctttgagtcacccccgcttgtgccagcttccccggctcggcggagactggcttggggatgcctggccgcccggcccccttctcggacgcggcgtggggagcgagctggagttaaggatgaaggggcggccggcgagtcccagtgagagcggagggtgccagaggtagggggccgagaaacaaagttcccggggcttcctccggggccgcggtcggggctgcgcgtttgaccgcccccctcctcgcgaaggcaatggcttccaaactcctgcgcgcggtcatcctcgggccgcccggctcgggcaagggcaccgtgtgccagaggatcgcccagaactttggtctccagcatctctccagcggccacttcttgcgggagaacatcaaggccagcaccgaagttggtgagatggcaaagcagtatatagagaaaagtcttttggttccagaccatgtgatcacacgcctaatgatgtccgagttggagaacaggcgtggccagcactggctccttgatggttttcctaggacattaggacaagccgaagccctggacaaaatctgtgaagtggatctagtgatcagtttgaatattccatttgaaacacttaaagatcgtctcagccgccgttggattcaccctcctagcggaagggtatataacctggacttcaatccacctcatgtacatggtattgatgacgtcactggtgaaccgttagtccagcaggaggatgataaacccgaagcagttgctgccaggctaagacagtacaaagacgtggcaaagccagtcattgaattatacaagagccgaggagtgctccaccaattttccggaacggagacgaacaaaatctggccctacgtttacacacttttctcaaacaagatcacacctattcagtccaaagaagcatattgaccctgcccaatggaagaaccaggaagatgtggtcattcattcaatagtgtgtgtagtattggtgctgtgtccaaattagaagctagctgaggtagcttgcagcatcttttctagttgaaatggtgaactgataggaaaacaaatgagtagaaagagttcatgaagaggccctcctctgcctttcaaaaggctggtcacctacacatgtttaaggtgtctctgcacatgtctcaagcccatcacaagaaagcaagtacagtgtggatttcaaatggtgtgtaacttcagctccagctggtttttgacagctgttgctgtggtaatatttttgacatgtgatggtgatagtctctggttctccccatccccacaaaggctgttgaaccacagcaccaggaagcctgagaatgaatcctgagggctctagcccaggctttgtcccaggctttctggtgtgtgccctcctggtaacagtgaaattgaagctacttactcatagtggttgtttctctggtcttgagtgactgtgtccacagttcatttttttccggtaggaataactccttttctacatccacgctccatagagtctctccttttcagacatcctgggatgaaagaatttggcttttttttttctttttttttttggacatctgttttcactcttaggcttttaaacaatagttattgcttttatccctctcagattctaataactgagagcgatggggctatattgaatctctgtatgcactgagaactgagctatgaagaggatcttattaaactgctggtctgactttatggattgacactgttcctttcttttattgtgaaaaaaaaaaaaaaccctgaaagtcttgggaaccccctaaagtcttttgggaatcctcaaaaagcatgggaagttaagtatttagctacataaatgttgtaagatcatatcttatgtatagaagtaataagaccatttggaattactggactaattgaatagttaaggtttctattcgggacaataaaatgtattttgaaagtgctgctaactattgatgctgacagtgtttcactcctatgagtgacccaaacatattataaatatgtggtaaagggaatggagcctgtggggttgagcagaatgttgtactagctgtgcctggactgagtataacagctttatgattatgagaaaacaaattctttattttttttttctgttccaaagattcatcctatggggtggccataaagtctagaattagatactaatattttgtcattcattataacatatcaataaaccatttgttaaaagatttgcctggtttccagacttggtggccaccttgaataattcttgctgtcttctgggaaggatgatgaaatttattcctgctgccttaaaaatatgtatcccttcttcacccatcatgactgtccccagtgagtgtcctttactattcttgggagtgactcctgtctaacttttcatactggcgagaagaaaagaagcctattttaacactttagtggtgttgaaacacattacttactttctgaagatgtcccagtgaatcctctgtcaattcactgccatatgtaatctatatgataaggaatgcatcttccttctaagtactgcccaaactcttgccagctcctctcccattgtcccttcatgtgaatatttcttggctaccttagtggaaatatagatcagttttctccccatccatcctctcaaacataatgagattgtttactttttagatttatgcagtgaaaatgcccagtcaggtctgaatcgtcagtgcattatattgactctgagcactttagaatttagagttgcaattgaatgccagctgtggagatggggtgcatatcagatatataaataaagctcaggtttgctagggaaccaggtatagagaaaaataagtctgatatgaggaaaattgcacaatttagagtagttatgccgtagagaaaatttccacaaactaggaaatgtagagagttattctatagaatactcaaaagaggaaagtatgtgatttttggaaacaggaaaatcttcaaacttctttcttcacttccctttgtgtttagctgaccctccaatgtgatcattgcctttggagtttgggagaggtacgggaagtggcctgatccctgcttccatacttcactcctccatccatccttccctccctcttcccctccagctaaatggacaattctagccaacattgagtcactcaataagtctcaacagtgggtgtgtttgctgagattgtccagcggttgagcagtttggtctcacctccctcgctagttgagaccaaaaagagacaaataactttttcatggtctttgaaacataatgcttatttcgtggtcaatggctttaaaaaaatctgtttcttgttttcttcaacaaactcactagttttcccttaaatgatattgtaaaaattaaagtaatcttgaaaatgttttgacaaaagtaaaattaaagggacatcttttcttgttttgttttttttttttctattgccacacatgaccgttccttcacctttaagcaaagagagtggttcagatggtttctaagatgccaacctgacctcgcattctgtcattctacccagctcttaattcaatttgcttccattatcctaacaggcttctttcttacttagaacttggaaaggctgctgtatttaataccctccaacactaacgcagacttaagataggtactgtttattgaaaacctactgagtgaaatgtgcggttttaggaccttcataaacatctcatttaatctttctagcatcctgtgaaacagccatgatttcacgttgataaacaaagaagacaggggtcccagggatgtgaagcatcttgcccaggcttctgctgctggtgaccagtgtagccaggactccagcccaggttttcctgactcagaagactgagctttttcctggatgttattaatagctaattgtgtccaagcaaccaagggccttgagtctgcttggttctgcttatggcctcacatcaagaaatggagctagtccatgtctgtagtcccaatgctttgggaagccatgatgggaaggttgtcggaggccaaaagttcaagaccaggctgggcaatatcacaagactccatctctacggaaaagtaaaaaattagccagtcatggtggtgtacacttatggtcctagttactcaggagacttaggcaggaggattgcttgatcctaggaattcgaggctgcagtgagctatgattgcacctctgcacccaagcctgggcgacacagcgagaccctctctcttaaaaaaaaaaaatagcagagctcaccaaagtgatgttcacctttttatgacattcctttttcttagcttaagaaaagaaagctgctagatgagagtcttagttttcctgcataagacctcctttatgaatagaataaaagactgtcaaagtaggctgggcttgggcccaggctaatctatgaaggaagcaagctcgtgttccttacctatccttttggtgtccattggattgtgccccgaagtggcctttacccttgagccgtccccagccatggtgctcacacataggcttttgagctccttggagctatccagatcctgctcacttttccttcctgagatcagaacaaatcacccccttactcccactccaaacaaggccttgatgataaactaatccttcctaaaatgctggtaggtaaacaagcaatgatgaagcattgaacacaggttaactcctgacttttgtaccattgtctattccattacacattaacatgactctgaatgccagatccaaacctttgcccaccatctgcttgtcgtgcaacagttgaggcagtaaccaggggagattcacttcctgtcttgtccttccccagggatcacccccctgctgccctctagcagccaaactcagatgagttccattgttaccctaggtgtgcccatctctttggtagggaaggagaaaggtaagaatagccatcagtgaggaaggattcttggagcgaggagccactgtggtttttcctgctatttaagatgttgagaccggataactttagaaagatacctgcacaaacccataaatagtgcttttataaagtttagttcaccggaacctgagttcagtatttgacattagctttttgtccaaagagttgaagcctgctggaggtctttgctcaaataataaataccacatatttccaagtgtgttcaggtataggcactaggtactgtctgtttacttcatgttaggcacattacatgcattggctaatcaaatcctcatcaattacatatgtaataatctaaacttgcctccttgtattataaatggaaataatcctgtttatttaaacgggttttcatgtacctgtagggattaggaaactcaaatggcctttttaatacctttccctagtttgagctccctgttctctttaacagataaaacaacatatttgcttcagcctggaatctgtttttggtgctttggtgcagagacaggaaatgggcactcagagtcacactggtagttgcacactgtatctacagagggcgtgtctcatctgtactctgctgggttacaggatttcagtaggtatttgtgtccacctgagaattctgtttattacctttcatttgacagtgtctttcctttctgcagttgattttgctagagaggcaattcataaggtgaggtcctgttcatagtatgacttgctttctcaatatctccttcaatttttagtaactcttggtctatttggtgtctttaaaaaaaataacctagtaataaagacttcttttaatgtggaaatgtggtctggtagtaagttatttctttccacatgtaactgacccaatctggtttccaaatgagaagtgtgcaggccccagaggttgagaagccatatttcaactgtgaaaaaaatctgcttcctgcatctgttgaaatatagttgttcatacttgccatcccttatctttcttgtaacaatttgcacagttcttgccagaataaatgccattatctgtatgtttcagggagttccccaatttgatcatttttgtgtgtgtgtggtgtgtgtgtgagagagagagatactgcagtaaaacatttctaaaggatgaaagctcttgtatggcatagatatgaattccttcctctggtaataattaggttattcccagaagcacagtgtcattctttaaataaaagctttcctgtttaaagcttttcaaaggagcagaccaccttgaagattccccctagggttgatatgtgtctaattcattttataaaaattattcttgtcttcattttaaagctttggctatatagtcagaaatgtcctaaataacaaactattttgtatttaatttagggaagactaaagggaagaaaaatgaaaactcagtctttatgtaagctccaaggatattagggcttaaagggcttttctagttttatgagaatttgtactactgatttttatatattcctgtttttgagatgaacagatctctggggaaattgttgagttacaatggcatttcactgtgatccctctcaagctcagatcagttctataacccaatgacaacctgtctctttggtttactgtcctgtgaaatgtcagctcaagtttcccagaagtcgtgtgtttatgatgagtcagagtgcttttcctcggtgggacagttgctggccctcttaattttggtgtatgtgcttccaagtatctaaacctccagtctgatctgtatatgctatcctaactgttaattgtattattgattatgttgattatcttgcttgaaggttcatacttttcaatttgatagaaataaagtttttttctgcttatagctagcgaa

SEQ ID NO: 856 - DNA, 523 bp, Homo sapiens
  source 1..523: mol_type = unassigned DNA
acaaatctatcttaaatgtcagtccaatatccacggcgacgagccacagcaggtgagaaacctggaaatgagcctgaagaggtgaagctgcagaatgccagcaaacagattgtgcagaatgcaatcctgcaagctgtgcagcaagtctcccaggagagtcagcgcagagaagagagaatcagtgacaaccgggaccacatccaactgggcgttggggagttaaccaagaagcacgaaaagaagtaacatggtggatttggctcttgacatgtgcttggtttctagccttcctcttagtataggacgcatctccaaaatgttgccagtaaagcaaaccgaagtgtcaccggcacctagctgtagaatgaattcacactagcccctggctgagaagcactgttttgaaaaagtgcattagacgattctgttcatatttatgcagtgcctctgagacatagtggggccaaatatgacactgtaattgcaaaagtagttttgcaggccaatttatttttaaagttct

SEQ ID NO: 857 - DNA, 575 bp, Homo sapiens
  source 1..575: mol_type = unassigned DNA
agctgcggccccaggatctagcggcgggagctgtccggggtgctgaccgccccgcccgccgcccgcccagcgcgccctcctgcaccggaccccgccaagtccggccttcttcccatcctccgtctgcctgtctttctctcttaatctgggggcgtagcggctggaagaaatcatggtgttcgctccaggtgagaaacctggaaatgagcctgaagaggtgaagctgcagaatgccagcaaacagattgtgcagaatgcaatcctgcaagctgtgcagcaagtctcccaggagagtcagcgcagagaagagagaatcagtgacaaccgggaccacatccaactgggcgttggggagttaaccaagaagcacgaaaagaagtaacatggtggatttggctcttgacatgtgcttggtttctagccttcctcttagtataggacgcatctccaaaatgttgccagtaaagcaaaccgaagtgtcaccggcacctagctgtagaatgaattcacactagcccctggctgagaagcactgttttgaaaaagtgcattagacgattctgttcatatttatg

SEQ ID NO: 858 - DNA, 712 bp, Homo sapiens
  source 1..712: mol_type = unassigned DNA
agcgtctttcggcgcatgcgcggactggagctgtgtgcagggccagcgcggagcccgagcagccgcggtgaagcgcctgtgctctgccgagactgccgtgcccattgctcgcctcggtcgccgccgctttagccgcctccgggggagcggccgcctattgtctttctccgcggcgaaggtgaagagttgtcccagctcggcccgcgggggagccccgggagccgcacgatcccggaattcacaatgaaaattggattgagcggtattttggtgttcattctttgctaatgacactccttaatgaagttatttggagagtttattgcttcagtacagtaaaaaccagtgtgcctttttttttgttagtagtcccccccacaacaagtgttttatttttagaagaagcattttcttcagtttttctgaactgttggattgcgcagatgaggacaaacggtgcagttcttgaaaggtcattattggcaagtttgtgaagaagctaagatcagttgagataaatcattgttactattcttgtattctgtcgtggactcttggggatttgcaggctgcattaagtacaagttttgtcaagtttgggtgcacatattacacttaatttggtttgtgtggcttattatatgaacatgattctgtttcagttccccagatggaactagcttaaatgtctgtcattcatagtggagcaaaa

SEQ ID NO: 859 - DNA, 5459 bp, Homo sapiens
  source 1..5459: mol_type = unassigned DNA
tgcgcggactggagctgtgtgcagggccagcgcggagcccgagcagccgcggtgaagcgcctgtgctctgccgagactgccgtgcccattgctcgcctcggtcgccgccgctttagccgcctccgggggagcggccgcctattgtctttctccgcggcgaaggtgaagagttgtcccagctcggcccgcgggggagccccgggagccgcacgtgtcctgggtcatgaaacttaatccacagcaagctcccttatatggtgattgtgttgttacagtgctgcttgctgaagaggacaaagctgaagatgatgtagtgttttacttggtatttttgggttccaccctccgtcactgtacaagtactcggaaggtcagttctgatacattggagaccattgctcctggtcatgattgttgtgaaacagtgaaggtgcagctctgtgcttccaaagagggccttcccgtgtttgtggtggctgaagaagactttcatttcgtccaggatgaagcgtatgatgcagctcaattcctagcaaccagtgctggaaatcagcaggctttgaactttacccgttttcttgaccagtcaggacccccatctggggatgtgaattcccttgataagaagttggtgctggcattcaggcacctgaagctgcccacggagtggaatgtattggggacagatcagagtttgcatgatgctggcccgcgagagacattgatgcattttgctgtgcggctgggactgctgaggttgacgtggttcctgttgcagaagccaggtggccgcggagctctcagtatccacaaccaggaaggggcgacgcctgtgagcttggccttggagcgaggctatcacaagctgcaccagcttctaaccgaggagaatgctggagaaccagactcctggagcagtttatcctatgaaataccgtatggagactgttctgtgaggcatcatcgagagttggacatctatacattaacctctgagtctgattcacatcatgaacacccatttcctggagacggttgcactggaccaatttttaaacttatgaacatccaacagcaactaatgaaaacaaacctcaagcagatggacagtcttatgcccttaatgatgacagcacaggatccttccagtgccccagagacagatggccagtttcttccctgtgcaccggagcccacggaccctcagcgactttcttcttctgaagagactgagagcactcagtgctgcccagggagccctgttgcacagactgaaagtccctgtgatttgtcaagcatagttgaggaggagaatacagaccgttcctgtaggaagaaaaataaaggcgtggaaagaaaaggggaagaggtggagccagcacctattgtggactctggaactgtatctgatcaagacagctgccttcagagcttgcctgattgtggagtaaagggcacggaaggcctttcgtcctgtggaaacagaaatgaagaaactggaacaaaatcttctggaatgcccacagaccaggagtccctgagcagtggagatgctgtgcttcagagagacttggtcatggagccaggcacagcccagtattcctctggaggtgaactgggaggcatttcaacaacaaatgtcagtaccccagacactgcaggggaaatggaacatgggctcatgaacccagatgccactgtttggaagaatgtgcttcagggaggggaaagtacaaaggaaagatttgagaactctaatattggcacagctggagcctctgacgtgcacgtcacaagtaagcctgtggataaaatcagtgttccaaactgtgcccctgctgccagttccctggatggtaacaaacctgctgagtcttcacttgcatttagtaatgaagaaacctccactgaaaaaacagcagaaacggaaacttcacgaagtcgtgaggagagtgctgatgctccagtagatcagaattctgtggtgattccagctgctgcaaaagacaagatttcagatggattagaaccttatactctcttagcagcaggcataggtgaggcaatgtcaccctcagatttagcccttcttgggctggaagaagatgtaatgccacaccagaactcagaaacaaattcatctcatgctcaaagccaaaagggcaaatcctcacccatttgttctacaactggagacgataaactttgtgcagactctgcatgtcaacagaacacagtgacttctagtggcgatttggttgcaaaactgtgtgataacatagttagcgagtccgaaagcaccacagcaaggcaacccagctcacaagatccacccgatgcctcccactgtgaagacccacaggctcatacagtcacctctgaccctgtaagggatacccaggaacgtgcggatttttgtcctttcaaagtggtggataacaaaggccaacgaaaagatgtgaaactagataaacctttaacaaatatgcttgaggtggtttcacatccacatccagttgtccctaaaatggagaaagaactggtgccagaccaggcagtaatatcagacagtactttctctctggcaaacagtccaggcagtgaatcagtaaccaaggatgacgcactttcttttgtcccctcccagaaagaaaagggaacagcaactcctgaactacatacagctacagattatagagatggcccagatggaaattcgaatgagcctgatacgcggccactagaagacagggcagtaggcctgtccacatcctccactgctgcagagcttcagcacgggatggggaataccagtctcacaggacttggtggagagcatgagggtcccgcccctccagcaatcccagaagctctgaatatcaaggggaacactgactcttccctgcaaagtgtgggtaaggccactttggctttagattcagttttgactgaagaaggaaaacttctggtggtttcagaaagctctgcagctcaggaacaagataaggataaagcggtgacctgttcctctattaaggaaaatgctctctcttcaggaactttgcaggaagagcagagaacaccacctcctggacaagatactcaacaatttcatgaaaaatcaatctcagctgactgtgccaaggacaaagcacttcagctaagtaattcaccgggtgcatcctctgcctttcttaaggcagaaactgaacataacaaggaagtggccccacaagtctcactgctgactcaaggtggggctgcccagagcctggtgccaccaggagcaagtctggccacagagtcaaggcaggaagccttgggggcagagcacaacagctccgctctgttgccatgtctgttgccagatgggtctgatgggtccgatgctcttaactgcagtcagccttctcctctggatgttggagtgaagaacactcaatcccagggaaaaactagtgcctgtgaggtgagtggagatgtgacggtggatgttacaggggttaatgctctacaaggtatggctgagcccagaagagagaatatatcacacaacacccaagacatcctgattccaaacgtcttgttgagccaagagaagaatgccgttctaggtttgccagtggctctacaggacaaagctgtgactgacccacagggagttggaaccccagagatgatacctcttgattgggagaaagggaagctggagggagcagaccacagctgtaccatgggtgacgctgaggaagcccaaatagacgatgaagcacatcctgtcctactgcagcctgttgccaaggagctccccacagacatggagctctcagcccatgatgatggggccccagctggtgtgagggaagtcatgcgagccccgccttcaggcagggaaaggagcactccctctctaccttgcatggtctctgcccaggacgcacctctgcctaagggggcagacttgatagaggaggctgccagccgtatagtggatgctgtcatcgaacaagtcaaggccgctggagcactgcttactgagggggaggcctgtcacatgtcactgtccagccctgagttgggtcctctcactaaaggactagagagtgcttttacagaaaaagtgagtactttcccacctggggagagcctaccaatgggcagtactcctgaggaagccacggggagccttgcaggatgttttgctggaagggaggagccagagaagatcattttacctgtccaggggcctgagccagcagcagaaatgccagacgtgaaagctgaagatgaagtggattttagagcaagttcaatttctgaagaagtggctgtagggagcatagctgctacactgaagatgaagcaaggcccaatgacccaggcgataaaccgagaaaactggtgtacaatagagccatgccctgatgcagcatctcttctggcttccaagcagagcccagaatgtgagaacttcctggatgttggactgggcagagagtgtacctcaaaacaaggtgtacttaaaagagaatctgggagtgattctgacctctttcactcacccagtgatgacatggacagcatcatcttcccaaagccagaggaagagcatttggcctgtgatatcaccggatccagttcatccaccgatgacacggcttcactggaccgacattcttctcatggcagtgatgtgtctctctcccagattttaaagccaaacaggtcaagagatcggcaaagccttgatggattctacagccatgggatgggagctgagggtcgagaaagtgagagtgagcctgctgacccaggcgacgtggaggaggaggagatggacagtatcactgaagtgcctgcaaactgctctgtcctaaggagctccatgcgctctctttctcccttccggaggcacagctgggggcctgggaaaaatgcagccagcgatgcagaaatgaaccaccggagtttcagtctagaaggcttgacaggaggagctggtgtcggaaacaagccatcctcatctctagaagtaagctctgcaaatgccgaagagctcagacacccattcagtggtgaggaacgggttgactctttggtgtcactttcagaagaggatctggagtcagaccagagagaacataggatgtttgatcagcagatatgtcacagatctaagcagcagggatttaattactgtacatcagccatttcctctccattgacaaaatccatctcattaatgacaatcagccatcctggattggacaattcacggcccttccacagtaccttccacaataccagtgctaatctgactgagagtataacagaagagaactataatttcctgccacatagcccctccaagaaagattctgaatggaagagtggaacaaaagtcagtcgtacattcagctacatcaagaataaaatgtctagcagcaagaagagcaaag

SEQ ID NO: 860 - DNA, 3765 bp, Homo sapiens
  source 1..3765: mol_type = unassigned DNA
gaagcgcctgtgctctgccgagactgccgtgcccattgctcgcctcggtcgccgccgctttagccgcctccgggggagcggccgcctattgtctttctccgcggcgaaggtgaagagttgtcccagctcggcccgcgggggagccccgggagccgcacgtgtcctgggtcatgaaacttaatccacagcaagctcccttatatggtgattgtgttgttacagtgctgcttgctgaagaggacaaagctgaagatgatgtagtgttttacttggtatttttgggttccaccctccgtcactgtacaagtactcggaaggtcagttctgatacattggagaccattgctcctggtcatgattgttgtgaaacagtgaaggtgcagctctgtgcttccaaagagggccttcccgtgtttgtggtggctgaagaagactttcatttcgtccaggatgaagcgtatgatgcagctcaattcctagcaaccagtgctggaaatcagcaggctttgaactttacccgttttcttgaccagtcaggacccccatctggggatgtgaattcccttgataagaagttggtgctggcattcaggcacctgaagctgcccacggagtggaatgtattggggacagatcagagtttgcatggtgagaatttatatgatctacaaacacactttaagtttgtgatatttctactttttttttaatggggctacttttctatggtcatcatattcaggtcttccacagaggctgcgtaaatcttagaattactgtaggaaagtggcctcaatggcatctcttctaggttcttcaattgagctgttaagcatgttgttgcagcgaaatgaccctagggattacccaaggagagtggcacgtcaccttcctgtgggtctggatttcagatttgatctctcaagtgtagaaagtgacatgctcttcatgaggagagtagcagagttactttttggtgtttaatgatcaaagacatggttttcattattgtattctgaagttctctaaagatagcctggaagtgaaggagaggaaagattgggcagtgagtgggaggagcatgagaacagggtgtgctctgagaaaccacacacttccttaaccaggttagtgtcactcttactgactttatctgttggccctccctatgagagttcactgaagaaaggactttttgtttgttttttgtttttttttgagaacgggctttcactcttgtagtccaggctggagtgcagtggcatgatctcggctcactgcagcctccacctcctgggttcaggtgattctgctgcctcagcctcccaaatagctgggattacaggcatgtaccaccatgcctagcaaatttttttttttttttaattagagacagggtttcaccgtgttagtcaggctggtctcgaactcctgacctcaggtaatctacccacctcggcctcccaaagtgctgggattataggcatgagccactgcgcccggccagaactccactttttcaaaaatatttacatagtaagtcctcttactcaaacaagggttttcccacataattctagtagccaatgacatctacttgatgtcataattgtatagatattttttaatgaaacataatgtgtacctggagttcaataagtaacatccagtttcccttctgagttcaagtccaattgaacgatttgggagtcctgagatagaaaccaaaatgtttattactgatgaaatctagattggaagcctgatgttagagctcctgccagaagggtctgcttgtactttctatgtcttcaatgaaagagctggtcagtcacaccattgccctgtagagtccacccagccttgagtattgaattattttgggtaagcagaccacaagtcactctccccacaggtgagcagttcctgaggagaaatacccagaggggcctgagccatagcatagttagtttctacactcagatgaattttgtcttcttccatggaagaatggtaaagaggtctttgccagctttgattctcttaaatctacactaaatttaacagttaaacctgtggtcagccgtcagaacggtgtcccatactgtcaggtgcatactgtcagattctacctggatagtcctgcccaggtaaaacctgaaaggaagtatcaaatcaaggaagaaaggatttatccttttcttcttctttttttaagtatagtgtccaagaaacttctgtcttgctaatatttagagatcagaatatttgacattctgaaaaggcactcatgccttatataaacctggtgatgggccttaatacctctagctcctcctatttctgtattgatacaggaatgtttattctggctgcctttcacaaatcagtgtcaagatagtactgcattagttatttgtggggcttatggtgttttatggttttgttttgtcttgtttaaagaggggcccaggagttggatagttttatgttgccatgattaaaaacaactattagaaaaagcaaacatctgaaactttggacatatcacttcctctttctctctcttttttttttttttttttgagatagagtcttgctctgtcgcccaggctggagtgcaatggtgcaatctcggctcactgcaacctccatctcctgggttgaagcgattctcctgccttagcctcccaagtagctgggaatacaggcacatgccaccacaccctgctgcttttttgtgtgttttagtagagacggggtttcaccatgttgcccaggctggtcttgaactcctgagctcaggcaatccacccgcctcagcctcccaaagtgctaggattacaggcgtgagccactgtgcccggccacttcctctctttgggccttaacttccttgtctttaataggagggaattggccagctttaatttttttttgtactgtcagtgtactggtaaattttctgttgcacaaaattgctcaagcagtgctaacaaaggccaaaccaaatttgaacacttgaggaaggaaatacatattaaaaccacaatgagatatcattacacatttatcataatggctaagatgaagaataccaagtgctggcaaagatgaagaacatatcatatgttgcttgtaggaatgcaaaatgtataaccactctagaaatatttggcagtttcttgtaaagttaaacatacacttagcgtatgacccagtaatcccacttttgggtgtttatcctagagaaatgaaaatctgtagtcaccaaaaagtctgtgcacggacgtgctcatagtaatgttattcataatcttcaaaaactggaaataacccagatttccctcactgagtgaatacagaagcaaactataatatatccatacagtggaatactactcagcaataaaaagaagcaaactgttgacatgtgcaacaacttggatgtgttttaaatgcattatgcgggaaaatgaagtcagtttccaaaggttccatactatgtgattctatttatatgatattctggaagatgcaaaattatagaaaaagagaacagatgagtagttgctaggggctgggagtgggggaagtctgactggaaagaggtatcatgagggaattctttgggttgttggagttgttttgtcttgttcgtggtggtggctgtaagaatctatgcatgtgttaaaactcataggagtgtacatcccctaaaggtgaattttattgtacatatatttaaaataataaaataacaaa

SEQ ID NO: 861 - DNA, 13215 bp, Homo sapiens
  source 1..13215: mol_type = unassigned DNA
gagcggccgcctattgtctttctccgcggcgaaggtgaagagttgtcccagctcggcccgcgggggagccccgggagccgcacgtgtcctgggtcatgaaacttaatccacagcaagctcccttatatggtgattgtgttgttacagtgctgcttgctgaagaggacaaagctgaagatgatgtagtgttttacttggtatttttgggttccaccctccgtcactgtacaagtactcggaaggtcagttctgatacattggagaccattgctcctggtcatgattgttgtgaaacagtgaaggtgcagctctgtgcttccaaagagggccttcccgtgtttgtggtggctgaagaagactttcatttcgtccaggatgaagcgtatgatgcagctcaattcctagcaaccagtgctggaaatcagcaggctttgaactttacccgttttcttgaccagtcaggacccccatctggggatgtgaattcccttgataagaagttggtgctggcattcaggcacctgaagctgcccacggagtggaatgtattggggacagatcagagtttgcatgatgctggcccgcgagagacattgatgcattttgctgtgcggctgggactgctgaggttgacgtggttcctgttgcagaagccaggtggccgcggagctctcagtatccacaaccaggaaggggcgacgcctgtgagcttggccttggagcgaggctatcacaagctgcaccagcttctaaccgaggagaatgctggagaaccagactcctggagcagtttatcctatgaaataccgtatggagactgttctgtgaggcatcatcgagagttggacatctatacattaacctctgagtctgattcacatcatgaacacccatttcctggagacggttgcactggaccaatttttaaacttatgaacatccaacagcaactaatgaaaacaaacctcaagcagatggacagtcttatgcccttaatgatgacagcacaggatccttccagtgccccagagacagatggccagtttcttccctgtgcaccggagcccacggaccctcagcgactttcttcttctgaagagactgagagcactcagtgctgcccagggagccctgttgcacagactgaaagtccctgtgatttgtcaagcatagttgaggaggagaatacagaccgttcctgtaggaagaaaaataaaggcgtggaaagaaaaggggaagaggtggagccagcacctattgtggactctggaactgtatctgatcaagacagctgccttcagagcttgcctgattgtggagtaaagggcacggaaggcctttcgtcctgtggaaacagaaatgaagaaactggaacaaaatcttctggaatgcccacagaccaggagtccctgagcagtggagatgctgtgcttcagagagacttggtcatggagccaggcacagcccagtattcctctggaggtgaactgggaggcatttcaacaacaaatgtcagtaccccagacactgcaggggaaatggaacatgggctcatgaacccagatgccactgtttggaagaatgtgcttcagggaggggaaagtacaaaggaaagatttgagaactctaatattggcacagctggagcctctgacgtgcacgtcacaagtaagcctgtggataaaatcagtgttccaaactgtgcccctgctgccagttccctggatggtaacaaacctgctgagtcttcacttgcatttagtaatgaagaaacctccactgaaaaaacagcagaaacggaaacttcacgaagtcgtgaggagagtgctgatgctccagtagatcagaattctgtggtgattccagctgctgcaaaagacaagatttcagatggattagaaccttatactctcttagcagcaggcataggtgaggcaatgtcaccctcagatttagcccttcttgggctggaagaagatgtaatgccacaccagaactcagaaacaaattcatctcatgctcaaagccaaaagggcaaatcctcacccatttgttctacaactggagacgataaactttgtgcagactctgcatgtcaacagaacacagtgacttctagtggcgatttggttgcaaaactgtgtgataacatagttagcgagtccgaaagcaccacagcaaggcaacccagctcacaagatccacccgatgcctcccactgtgaagacccacaggctcatacagtcacctctgaccctgtaagggatacccaggaacgtgcggatttttgtcctttcaaagtggtggataacaaaggccaacgaaaagatgtgaaactagataaacctttaacaaatatgcttgaggtggtttcacatccacatccagttgtccctaaaatggagaaagaactggtgccagaccaggcagtaatatcagacagtactttctctctggcaaacagtccaggcagtgaatcagtaaccaaggatgacgcactttcttttgtcccctcccagaaagaaaagggaacagcaactcctgaactacatacagctacagattatagagatggcccagatggaaattcgaatgagcctgatacgcggccactagaagacagggcagtaggcctgtccacatcctccactgctgcagagcttcagcacgggatggggaataccagtctcacaggacttggtggagagcatgagggtcccgcccctccagcaatcccagaagctctgaatatcaaggggaacactgactcttccctgcaaagtgtgggtaaggccactttggctttagattcagttttgactgaagaaggaaaacttctggtggtttcagaaagctctgcagctcaggaacaagataaggataaagcggtgacctgttcctctattaaggaaaatgctctctcttcaggaactttgcaggaagagcagagaacaccacctcctggacaagatactcaacaatttcatgaaaaatcaatctcagctgactgtgccaaggacaaagcacttcagctaagtaattcaccgggtgcatcctctgcctttcttaaggcagaaactgaacataacaaggaagtggccccacaagtctcactgctgactcaaggtggggctgcccagagcctggtgccaccaggagcaagtctggccacagagtcaaggcaggaagccttgggggcagagcacaacagctccgctctgttgccatgtctgttgccagatgggtctgatgggtccgatgctcttaactgcagtcagccttctcctctggatgttggagtgaagaacactcaatcccagggaaaaactagtgcctgtgaggtgagtggagatgtgacggtggatgttacaggggttaatgctctacaaggtatggctgagcccagaagagagaatatatcacacaacacccaagacatcctgattccaaacgtcttgttgagccaagagaagaatgccgttctaggtttgccagtggctctacaggacaaagctgtgactgacccacagggagttggaaccccagagatgatacctcttgattgggagaaagggaagctggagggagcagaccacagctgtaccatgggtgacgctgaggaagcccaaatagacgatgaagcacatcctgtcctactgcagcctgttgccaaggagctccccacagacatggagctctcagcccatgatgatggggccccagctggtgtgagggaagtcatgcgagccccgccttcaggcagggaaaggagcactccctctctaccttgcatggtctctgcccaggacgcacctctgcctaagggggcagacttgatagaggaggctgccagccgtatagtggatgctgtcatcgaacaagtcaaggccgctggagcactgcttactgagggggaggcctgtcacatgtcactgtccagccctgagttgggtcctctcactaaaggactagagagtgcttttacagaaaaagtgagtactttcccacctggggagagcctaccaatgggcagtactcctgaggaagccacggggagccttgcaggatgttttgctggaagggaggagccagagaagatcattttacctgtccaggggcctgagccagcagcagaaatgccagacgtgaaagctgaagatgaagtggattttagagcaagttcaatttctgaagaagtggctgtagggagcatagctgctacactgaagatgaagcaaggcccaatgacccaggcgataaaccgagaaaactggtgtacaatagagccatgccctgatgcagcatctcttctggcttccaagcagagcccagaatgtgagaacttcctggatgttggactgggcagagagtgtacctcaaaacaaggtgtacttaaaagagaatctgggagtgattctgacctctttcactcacccagtgatgacatggacagcatcatcttcccaaagccagaggaagagcatttggcctgtgatatcaccggatccagttcatccaccgatgacacggcttcactggaccgacattcttctcatggcagtgatgtgtctctctcccagattttaaagccaaacaggtcaagagatcggcaaagccttgatggattctacagccatgggatgggagctgagggtcgagaaagtgagagtgagcctgctgacccaggcgacgtggaggaggaggagatggacagtatcactgaagtgcctgcaaactgctctgtcctaaggagctccatgcgctctctttctcccttccggaggcacagctgggggcctgggaaaaatgcagccagcgatgcagaaatgaaccaccggagttcaatgcgagttcttggggatgttgtcaggagacctcccattcataggagaagtttcagtctagaaggcttgacaggaggagctggtgtcggaaacaagccatcctcatctctagaagtaagctctgcaaatgccgaagagctcagacacccattcagtggtgaggaacgggttgactctttggtgtcactttcagaagaggatctggagtcagaccagagagaacataggatgtttgatcagcagatatgtcacagatctaagcagcagggatttaattactgtacatcagccatttcctctccattgacaaaatccatctcattaatgacaatcagccatcctggattggacaattcacggcccttccacagtaccttccacaataccagtgctaatctgactgagagtataacagaagagaactataatttcctgccacatagcccctccaagaaagattctgaatggaagagtggaacaaaagtcagtcgtacattcagctacatcaagaataaaatgtctagcagcaagaagagcaaagaaaaggaaaaagaaaaagataagattaaggagaaggagaaagattctaaagacaaggagaaagataagaagactgtcaacgggcacactttcagttccattcctgttgtgggtcccatcagctgtagccagtgtatgaagcccttcaccaacaaagatgcctatacttgtgcaaattgcagtgcttttgtccacaaaggctgccgagaaagtctagcctcctgtgcaaaggtcaaaatgaagcagcccaaagggagccttcaggcacatgacacatcatcactgcccacggtcattatgagaaacaagccctcacagcccaaggagcgtcctcggtccgcagtcctcctggtggatgaaaccgctaccaccccaatatttgccaatagacgatcccagcagagtgtctcgctctccaaaagtgtctccatacagaacattactggagttggcaatgatgagaacatgtcaaacacctggaaattcctgtctcattcaacagactcactaaataaaatcagcaaggtcaatgagtcaacagaatcacttactgatgagggagtaggtacagacatgaatgaaggacaactactgggagactttgagattgagtccaaacagctggaagcagagtcttggagtcggataatagacagcaagtttctaaaacagcaaaagaaagatgtggtcaaacggcaagaagtaatatatgagttgatgcagacagagtttcatcatgtccgcactctcaagatcatgagtggtgtgtacagccaggggatgatggcggatctgctttttgagcagcagatggtagaaaagctgttcccctgtttggatgagctgatcagtatccatagccaattcttccagaggattctggagcggaagaaggagtctctggtggataaaagtgaaaagaactttctcatcaagaggataggggatgtgcttgtaaatcagttttcaggtgagaatgcagaacgtttaaagaagacatatggcaagttttgtgggcaacataaccagtctgtaaactacttcaaagacctttatgccaaggataagcgttttcaagcctttgtaaagaagaagatgagcagttcagttgttagaaggcttggaattccagagtgcatattgcttgtaactcagcggattaccaagtacccagttttattccaaagaatattgcagtgtaccaaagacaatgaagtggagcaggaagatctagcacagtccttgagcctggtgaaggatgtgattggagctgtagacagcaaagtggcaagttatgaaaagaaagtgcgtctcaatgagatttatacaaagacagatagcaagtcaatcatgaggatgaagagtggtcagatgtttgccaaggaagatttgaaacggaagaagcttgtacgtgatgggagtgtgtttctgaagaatgcagcaggaaggttgaaagaggttcaagcagttcttctcactgacattttagttttccttcaagaaaaagaccagaagtacatctttgcatcattggaccagaagtcaacagtgatctctttaaagaagctgattgtgagagaagtggcacatgaggagaaaggtttattcctgatcagcatggggatgacagatccagagatggtagaagtccatgccagctccaaagaggaacgaaacagctggattcagatcattcaggacacaatcaacaccctgaacagagatgaagatgaaggaattcctagtgagaatgaggaagaaaagaaaatgttggacaccagagcccgagaattaaaagaacaacttcaccagaaggaccaaaaaatcctactcttgttggaagagaaggagatgattttccgggacatggctgagtgcagcacccctctcccagaggattgctccccaacacatagccctagagttctcttccgctccaacacagaagaggctctcaaaggaggacctttaatgaaaagtgcaataaatgaggtggagatccttcagggtttggtgagtggaaatctgggaggcacacttgggccgactgtcagcagccccattgagcaagatgtggtcggtcccgtttccctgccccggagagcagagacctttggaggatttgacagccatcagatgaatgcttcaaaaggaggcgagaaggaagagggagatgatggccaagatcttaggagaacggaatcagatagtggcctaaaaaagggtggaaatgctaacctggtatttatgcttaaaagaaacagtgagcaggttgtccagagcgttgttcatctctacgagctcctcagcgctctgcagggtgtggtgctgcagcaggacagctacattgaggaccagaaactggtgctgagcgagagggcgctcactcgcagcttgtcccgcccgagctccctcattgagcaggagaagcagcgcagcctggagaagcagcgccaggacctggccaacctgcagaagcagcaggcccagtacctcgaggagaagcgcaggcgcgagcgtgagtgggaagctcgtgagagggagctgcgggagcgggaggccctcctggcccagcgcgaggaggaggtgcagcaggggcagcaggacctggaaaaggagcgggaggagctccagcagaagaagggcacataccagtatgacctggagcgactgcgtgctgcccagaaacagcttgagagggaacaggagcagctgcgccgggaggcagagcggctcagccagcggcagacagaacgggacctgtgtcaggtttcccatccacataccaagctgatgaggatcccatcgttcttccccagtcctgaggagcccccctcgccatctgcaccttccatagccaaatcagggtcattggactcagaactttcagtgtccccaaaaaggaacagcatctctcggacacacaaagataaggggccttttcacatactgagttcaaccagccagacaaacaaaggaccagaagggcagagccaggcccctgcgtccacctctgcctctacccgcctgtttgggttaacaaagccaaaggaaaagaaggagaaaaaaaagaagaacaaaaccagccgctctcagcccggtgatggtcccgcgtcagaagtatcagcagagggtgaagagatcttctgctgaccctcttcctctctgctgaggcagctgcctcctgatcctggccagcccacctctcctgctgtccccgcgtgcacaagtctcttacactggacgcccactgctcctcagcgtccagtcctcctgggcggccccaggtcctggacaataagcaacagatgatattgagtgtcgggtggggaaggaggcccagactctgcttcggccatgatttgtgactgcccaggactctcaggttgggctggccctactcaggattacactgaaagtaatggcctcgtaagtacaggtgatggttttggacacgtcaggaattcctaaaggctgaaagagtgtatccaagtaaggtctgaacctccgaatgccttttatttgggggaacacaaaaccaaacagcagatgttttggacttgatctgtgtacgtacatggggacctgtctgcatatacacacggggaatgccagaagaaggcccagtctgcaccaggcgtctggtcaacttagcacaagggcagtgcctggacggacccggagcccccgcatatcagcagttcacccagtactcctcagagactggtttccctctaaacccatcccgggcacataccacccgtgttttgcatgtatttctcatttcattttagggatgacaaacatttgtgaaaccagtgagagaaggcttgatgtgtataaaagacgtgatgtgcaccacctcgatctcggtgtttcaggcactaaagcaacaaaacaacccatagtatctcattctgtcatcagatccagaagaaatatcctggttttccagcatgtttacccacatgttttggccatggataaagtgaagaggcctactcaccattatccctgcagcgtgacaccttttgattgtcactgaccactcagaaggggccacggcctcctggctgtgttcctgagcccccgtcgtgcctctcccagacagcagctgtctggcccttgctgggtgagggcacaccactgccaggggtcagcctcgcacccaggccaggcagaagctgtgctctgaagctaggacagctggctgagaagtgggttcaggcgaagggtgaagccatgtgtagcagttcctgccagtgcagatctggagaggagctggcccggaaggcgtggttgtgaaagcgcccttcttatgttaggaggccttggcaaaattggatttcttcaaaaatacatgtaaaggtctgttgttgaattgtactctgcccctggaagcagatacagatggctgcctgctgctcggctttgcttttgcttttcccaccgtgttttcatctttgttcacttgaggctttccccagctggtgtgtgcaggacagttcatggtaatgttgccctctgaggccccgtacaccagaagggaggccctggaaaattttgtgcttccaacgtggccttcaattcttgcttttttgcccctcggaagcatggggcttttgagcacacttaaaaaaagaaaaatctgtaacttggtgcttattgatgaattgcaagctggccttgcagatggagatatttatctttcagtttatttgaaagaggtctggtttaaaatttgtagcctacatttgttttatttattgtatttgtgtgtttgtgtttgtttttttttaagggtgagccaggtctagcccaacagtctaaactatccagtcaataccgagtgaagtggcagccagcactgttcactctgtgtcttttgaagtgccttgaaggcccagatgaaattttaaagggagggggtccatgtccttccctcccccaccccgcctcattctttaatcaaaggatgtcttctcccttgtttgagaatgaagaaactcgccacctctgacctacctttgcctttttctgtcatggagaatactcacccttcagaaacagaccaaaggccaaaacctgctgatttttctattgaaaatatgtccccttgcaaagaccctaaacaaaaagttaagtttctttctttcacctatttgtacaactccaagttacagctgaatctgtcgtgactttcctgagatctacccggggcttggctgtctgttctgggcactggctccgagttcccctcctgggatttgcaggagggcagtactgaacctgcattcttctccttgtaaatgtaggccgggtgcccctgttctccgggtttggaacaatacgaggttggtgctgatgggatttacttgcgtacgtgctcttcacaaaaacaccgtggatgctgaagttagagcacgtcgccacagagcttgacatcaatgttagagggtctcttactccccgcccagctgtgatgtttcatctgctttggttgttttggtggtcttttttaaaaatagagatttcacatctgcccagaccccactcaaaacgatttggtcaggttctggttggacaagtttaaaatcaaagtagtgcccggaattccctcaaaccacccaacttcatccaggaatacagtctgcagtgcagcaacagaaccgcttaccaagaactgtgcttacatacctttgtcatctctcttccccccttggaagttgtcctcagggggatttgttcctgtcctggggatttacctgggatggtggctgcctgtgcttttgctcatggccttgacagtgctctagttgctggatctaatggcctgtcttggtttctatcacatgagaaggggttgtttttttggggtgactcggactgaattccccatactgtttccacgccgggacaccatgttctccatcaagctaaagaaatcacgtgcctgaaactgtgcttaagttttgggggaaagatggagttcctatccagagcccccagatttccagaatcgagtgagcttcctggaaggagactgcgtcttctctcaattccagtcatctcagtcgttgtcgttaggtgacatgtgcactttaaatgctctcatcggttggcttcattttcaagacaatcaaatgtattgactgtgttttcttcttagaaaatggagagggttaaaaacatgcaaactgccactttcaacctttgccagtattccctctacccccgtgagagctatctggggggaagaatccttaccaaggtttttttggaaaggtacgaatcttaacttttttccccttctgtgtctcagggtaatactattcagagtcgcccctttgctcattttctcccgtatttgttaccttcctgaggcctcagtattagtcgtgagcacaaagttttgagacctttggcgttgtttcttgatgtgggaggggaggtgttagtgcatgcaagggttgaactagatagaccctgccttagtagagggtgggactataaccttagaggccagaacttgatccagaagttgctgtccacagaagtgctttctatttcatcatttttgtttctagggctctttttctgtagccaggtcttcccaaggattttagtatttgcattggagttgaggtttactctaatgatggtggcccagctgtgcccagaggacagccaggcaggccctgggagggagtttagaaagacagtcctggtgaatgggcttcaagtggtcacaaagagggtggctgtgaggtgaccccagacactgcagaacgatgtgcaccctctgcgttttggatgtccttggaatgtgggagcctagaaataaccctgtggatggaattggggcagcggctgctggagatctgtgtgccttgccttccttcagcaggaccgtctaggtgcgcagccacctatggatgcgtcccagccagccccgtcgctctcgtccatcctcagagacaaagaagagggcagggagtttgggcttggttttgaactttcctttcaatgtagcaaagcattcctagttaaccagagccttggaatctactgcctgctggccaggctttaaaatgaaaagtgttttaatgctgccataaaagggaggcgggggggaggaagggaaaataaaggcatctttccaagtactcatctaatttaattgtcaaaagattgataggccatgaattacttctccatctcactaagggttaaaggcgtgcaaccccccactggctgtgtcccctgccaccgaagtgagtgacctgccctacaaccaggtgggaccacctgtgctgcagtccggaggggcttctgcaggaagcactcaccccccacaccttccccggcctgagcttcccctacctttcgtcaccacctgagggcatgagcacaggccatggggcgtgcctggtgagtctgcctgtggttcaggcttagcctgtggtctcctgtgtgctgctgcccgcatgggatgcgcaggggaggcgtggggatccgcaggagggtggttgggatacaccggatacctctgctctcattgcttgtttgcaaatgctctatggacatttgtgtgctaaatcctattaaataaaaaagacgggttaaaacccagatgctgtatattcatttgtaattatgtataaagtgaagcagttttaaactgtaaagatttttttcagtgtgttttctcgaattttgccacaacatactggcttcgtattttatttatctttctttctagttaccagcttcagacccttgtaaagtctccctcagccctttcaaaaaataataaatttcctgtgaagtt

SEQ ID NO: 862 - DNA, 9468 bp, Homo sapiens
  source 1..9468: mol_type = unassigned DNA
tgtctttctccgcggcgaaggtgaagagttgtcccagctcggcccgcgggggagccccgggagccgcacgtgtcctgggtcatgaaacttaatccacagcaagctcccttatatggtgattgtgttgttacagtgctgcttgctgaagaggacaaagctgaagatgatgtagtgttttacttggtatttttgggttccaccctccgtcactgtacaagtactcggaaggtcagttctgatacattggagaccattgctcctggtcatgattgttgtgaaacagtgaaggtgcagctctgtgcttccaaagagggccttcccgtgtttgtggtggctgaagaagactttcatttcgtccaggatgaagcgtatgatgcagctcaattcctagcaaccagtgctggaaatcagcaggctttgaactttacccgttttcttgaccagtcaggacccccatctggggatgtgaattcccttgataagaagttggtgctggcattcaggcacctgaagctgcccacggagtggaatgtattggggacagatcagagtttgcatgatgctggcccgcgagagacattgatgcattttgctgtgcggctgggactgctgaggttgacgtggttcctgttgcagaagccaggtggccgcggagctctcagtatccacaaccaggaaggggcgacgcctgtgagcttggccttggagcgaggctatcacaagctgcaccagcttctaaccgaggagaatgctggagaaccagactcctggagcagtttatcctatgaaataccgtatggagactgttctgtgaggcatcatcgagagttggacatctatacattaacctctgagtctgattcacatcatgaacacccatttcctggagacggttgcactggaccaatttttaaacttatgaacatccaacagcaactaatgaaaacaaacctcaagcagatggacagtcttatgcccttaatgatgacagcacaggatccttccagtgccccagagacagatggccagtttcttccctgtgcaccggagcccacggaccctcagcgactttcttcttctgaagagactgagagcactcagtgctgcccagggagccctgttgcacagactgaaagtccctgtgatttgtcaagcatagttgaggaggagaatacagaccgttcctgtaggaagaaaaataaaggcgtggaaagaaaaggggaagaggtggagccagcacctattgtggactctggaactgtatctgatcaagacagctgccttcagagcttgcctgattgtggagtaaagggcacggaaggcctttcgtcctgtggaaacagaaatgaagaaactggaacaaaatcttctggaatgcccacagaccaggagtccctgagcagtggagatgctgtgcttcagagagacttggtcatggagccaggcacagcccagtattcctctggaggtgaactgggaggcatttcaacaacaaatgtcagtaccccagacactgcaggggaaatggaacatgggctcatgaacccagatgccactgtttggaagaatgtgcttcagggaggggaaagtacaaaggaaagatttgagaactctaatattggcacagctggagcctctgacgtgcacgtcacaagtaagcctgtggataaaatcagtgttccaaactgtgcccctgctgccagttccctggatggtaacaaacctgctgagtcttcacttgcatttagtaatgaagaaacctccactgaaaaaacagcagaaacggaaacttcacgaagtcgtgaggagagtgctgatgctccagtagatcagaattctgtggtgattccagctgctgcaaaagacaagatttcagatggattagaaccttatactctcttagcagcaggcataggtgaggcaatgtcaccctcagatttagcccttcttgggctggaagaagatgtaatgccacaccagaactcagaaacaaattcatctcatgctcaaagccaaaagggcaaatcctcacccatttgttctacaactggagacgataaactttgtgcagactctgcatgtcaacagaacacagtgacttctagtggcgatttggttgcaaaactgtgtgataacatagttagcgagtccgaaagcaccacagcaaggcaacccagctcacaagatccacccgatgcctcccactgtgaagacccacaggctcatacagtcacctctgaccctgtaagggatacccaggaacgtgcggatttttgtcctttcaaagtggtggataacaaaggccaacgaaaagatgtgaaactagataaacctttaacaaatatgcttgaggtggtttcacatccacatccagttgtccctaaaatggagaaagaactggtgccagaccaggcagtaatatcagacagtactttctctctggcaaacagtccaggcagtgaatcagtaaccaaggatgacgcactttcttttgtcccctcccagaaagaaaagggaacagcaactcctgaactacatacagctacagattatagagatggcccagatggaaattcgaatgagcctgatacgcggccactagaagacagggcagtaggcctgtccacatcctccactgctgcagagcttcagcacgggatggggaataccagtctcacaggacttggtggagagcatgagggtcccgcccctccagcaatcccagaagctctgaatatcaaggggaacactgactcttccctgcaaagtgtgggtaaggccactttggctttagattcagttttgactgaagaaggaaaacttctggtggtttcagaaagctctgcagctcaggaacaagataaggataaagcggtgacctgttcctctattaaggaaaatgctctctcttcaggaactttgcaggaagagcagagaacaccacctcctggacaagatactcaacaatttcatgaaaaatcaatctcagctgactgtgccaaggacaaagcacttcagctaagtaattcaccgggtgcatcctctgcctttcttaaggcagaaactgaacataacaaggaagtggccccacaagtctcactgctgactcaaggtggggctgcccagagcctggtgccaccaggagcaagtctggccacagagtcaaggcaggaagccttgggggcagagcacaacagctccgctctgttgccatgtctgttgccagatgggtctgatgggtccgatgctcttaactgcagtcagccttctcctctggatgttggagtgaagaacactcaatcccagggaaaaactagtgcctgtgaggtgagtggagatgtgacggtggatgttacaggggttaatgctctacaaggtatggctgagcccagaagagagaatatatcacacaacacccaagacatcctgattccaaacgtcttgttgagccaagagaagaatgccgttctaggtttgccagtggctctacaggacaaagctgtgactgacccacagggagttggaaccccagagatgatacctcttgattgggagaaagggaagctggagggagcagaccacagctgtaccatgggtgacgctgaggaagcccaaatagacgatgaagcacatcctgtcctactgcagcctgttgccaaggagctccccacagacatggagctctcagcccatgatgatggggccccagctggtgtgagggaagtcatgcgagccccgccttcaggcagggaaaggagcactccctctctaccttgcatggtctctgcccaggacgcacctctgcctaagggggcagacttgatagaggaggctgccagccgtatagtggatgctgtcatcgaacaagtcaaggccgctggagcactgcttactgagggggaggcctgtcacatgtcactgtccagccctgagttgggtcctctcactaaaggactagagagtgcttttacagaaaaagtgagtactttcccacctggggagagcctaccaatgggcagtactcctgaggaagccacggggagccttgcaggatgttttgctggaagggaggagccagagaagatcattttacctgtccaggggcctgagccagcagcagaaatgccagacgtgaaagctgaagatgaagtggattttagagcaagttcaatttctgaagaagtggctgtagggagcatagctgctacactgaagatgaagcaaggcccaatgacccaggcgataaaccgagaaaactggtgtacaatagagccatgccctgatgcagcatctcttctggcttccaagcagagcccagaatgtgagaacttcctggatgttggactgggcagagagtgtacctcaaaacaaggtgtacttaaaagagaatctgggagtgattctgacctctttcactcacccagtgatgacatggacagcatcatcttcccaaagccagaggaagagcatttggcctgtgatatcaccggatccagttcatccaccgatgacacggcttcactggaccgacattcttctcatggcagtgatgtgtctctctcccagattttaaagccaaacaggtcaagagatcggcaaagccttgatggattctacagccatgggatgggagctgagggtcgagaaagtgagagtgagcctgctgacccaggcgacgtggaggaggaggagatggacagtatcactgaagtgcctgcaaactgctctgtcctaaggagctccatgcgctctctttctcccttccggaggcacagctgggggcctgggaaaaatgcagccagcgatgcagaaatgaaccaccggagtatgagctggtgcccctctggtgtgcagtactctgctggcctgagtgctgactttaattacagaagtttcagtctagaaggcttgacaggaggagctggtgtcggaaacaagccatcctcatctctagaagtaagctctgcaaatgccgaagagctcagacacccattcagtggtgaggaacgggttgactctttggtgtcactttcagaagaggatctggagtcagaccagagagaacataggatgtttgatcagcagatatgtcacagatctaagcagcagggatttaattactgtacatcagccatttcctctccattgacaaaatccatctcattaatgacaatcagccatcctggattggacaattcacggcccttccacagtaccttccacaataccagtgctaatctgactgagagtataacagaagagaactataatttcctgccacatagcccctccaagaaagattctgaatggaagagtggaacaaaagtcagtcgtacattcagctacatcaagaataaaatgtctagcagcaagaagagcaaagaaaaggaaaaagaaaaagataagattaaggagaaggagaaagattctaaagacaaggagaaagataagaagactgtcaacgggcacactttcagttccattcctgttgtgggtcccatcagctgtagccagtgtatgaagcccttcaccaacaaagatgcctatacttgtgcaaattgcagtgcttttgtccacaaaggctgccgagaaagtctagcctcctgtgcaaaggtcaaaatgaagcagcccaaagggagccttcaggcacatgacacatcatcactgcccacggtcattatgagaaacaagccctcacagcccaaggagcgtcctcggtccgcagtcctcctggtggatgaaaccgctaccaccccaatatttgccaatagacgatcccagcagagtgtctcgctctccaaaagtgtctccatacagaacattactggagttggcaatgatgagaacatgtcaaacacctggaaattcctgtctcattcaacagactcactaaataaaatcagcaaggtcaatgagtcaacagaatcacttactgatgagggagtaggtacagacatgaatgaaggacaactactgggagactttgagattgagtccaaacagctggaagcagagtcttggagtcggataatagacagcaagtttctaaaacagcaaaagaaagatgtggtcaaacggcaagaagtaatatatgagttgatgcagacagagtttcatcatgtccgcactctcaagatcatgagtggtgtgtacagccaggggatgatggcggatctgctttttgagcagcagatggtagaaaagctgttcccctgtttggatgagctgatcagtatccatagccaattcttccagaggattctggagcggaagaaggagtctctggtggataaaagtgaaaagaactttctcatcaagaggataggggatgtgcttgtaaatcagttttcaggtgagaatgcagaacgtttaaagaagacatatggcaagttttgtgggcaacataaccagtctgtaaactacttcaaagacctttatgccaaggataagcgttttcaagcctttgtaaagaagaagatgagcagttcagttgttagaaggcttggaattccagagtgcatattgcttgtaactcagcggattaccaagtacccagttttattccaaagaatattgcagtgtaccaaagacaatgaagtggagcaggaagatctagcacagtccttgagcctggtgaaggatgtgattggagctgtagacagcaaagtggcaagttatgaaaagaaagtgcgtctcaatgagatttatacaaagacagatagcaagtcaatcatgaggatgaagagtggtcagatgtttgccaaggaagatttgaaacggaagaagcttgtacgtgatgggagtgtgtttctgaagaatgcagcaggaaggttgaaagaggttcaagcagttcttctcactgacattttagttttccttcaagaaaaagaccagaagtacatctttgcatcattggaccagaagtcaacagtgatctctttaaagaagctgattgtgagagaagtggcacatgaggagaaaggtttattcctgatcagcatggggatgacagatccagagatggtagaagtccatgccagctccaaagaggaacgaaacagctggattcagatcattcaggacacaatcaacaccctgaacagagatgaagatgaaggaattcctagtgagaatgaggaagaaaagaaaatgttggacaccagagcccgagaattaaaagaacaacttcaccagaaggaccaaaaaatcctactcttgttggaagagaaggagatgattttccgggacatggctgagtgcagcacccctctcccagaggattgctccccaacacatagccctagagttctcttccgctccaacacagaagaggctctcaaaggaggacctttaatgaaaagtgcaataaatgaggtggagatccttcagggtttggtgagtggaaatctgggaggcacacttgggccgactgtcagcagccccattgagcaagatgtggtcggtcccgtttccctgccccggagagcagagacctttggaggatttgacagccatcagatgaatgcttcaaaaggaggcgagaaggaagagggagatgatggccaagatcttaggagaacggaatcagatagtggcctaaaaaagggtggaaatgctaacctggtatttatgcttaaaagaaacagtgagcaggttgtccagagcgttgttcatctctacgagctcctcagcgctctgcagggtgtggtgctgcagcaggacagctacattgaggaccagaaactggtgctgagcgagagggcgctcactcgcagcttgtcccgcccgagctccctcattgagcaggagaagcagcgcagcctggagaagcagcgccaggacctggccaacctgcagaagcagcaggcccagtacctcgaggagaagcgcaggcgcgagcgtgagtgggaagctcgtgagagggagctgcgggagcgggaggccctcctggcccagcgcgaggaggaggtgcagcaggggcagcaggacctggaaaaggagcgggaggagctccagcagaagaagggcacataccagtatgacctggagcgactgcgtgctgcccagaaacagcttgagagggaacaggagcagctgcgccgggaggcagagcggctcagccagcggcagacagaacgggacctgtgtcaggtttcccatccacataccaagctgatgaggatcccatcgttcttccccagtcctgaggagcccccctcgccatctgcaccttccatagccaaatcagggtcattggactcagaactttcagtgtccccaaaaaggaacagcatctctcggacacacaaagataaggggccttttcacatactgagttcaaccagccagacaaacaaaggaccagaagggcagagccaggcccctgcgtccacctctgcctctacccgcctgtttgggttaacaaagccaaaggaaaagaaggagaaaaaaaagaagaacaaaaccagccgctctcagcccggtgatggtcccgcgtcagaagtatcagcagagggtgaagagatcttctgctgaccctcttcctctctgctgaggcagctgcctcctgatcctggccagcccacctctcctgctgtccccgcgtgcacaagtctcttacactggacgcccactgctcctcagcgtccagtcctcctgggcggccccaggtcctggacaataagcaacagatgatattgagtgtcgggtggggaaggaggcccagactctgcttcggccatgatttgtgactgcccaggactctcaggttgggctggccctactcaggattacactgaaagtaatggcctcgtaagtacaggtgatggttttggacacgtcaggaattcctaaaggctgaaagagtgtatccaagtaaggtctgaacctccgaatgccttttatttgggggaacacaaaaccaaacagcagatgttttggacttgatctgtgtacgtacatggggacctgtctgcatatacacacggggaatgccagaagaaggcccagtctgcaccaggcgtctggtcaacttagcacaagggcagtgcctggacggacccggagcccccgcatatcagcagttcacccagtactcctcagagactggtttccctctaaacccatcccgggcacataccacccgtgttttgcatgtatttctcatttcattttagggatgacaaacatttgtgaaaccagtgagagaaggcttgatgtgtataaaagacgtgatgtgcaccacctcgatctcggtgtttcaggcactaaagcaacaaaacaacccatagtatctcattctgtcatcagatccagaagaaatatcctggttttccagcatgtttacccacatgttttggccatggataaagtgaagaggcctactcaccattatccctgcagcgtgacaccttttgattgtcactgaccactcagaaggggccacggcctcctggctgtgttcctgag

SEQ ID NO: 863 - DNA, 322 bp, Homo sapiens
  source 1..322: mol_type = unassigned DNA
gttgtcccagctcggcccgcgggggagccccgggagccgcacgggacatgtatagtttcaccatgttggccaggatggtctgaaactccttatctgaagtgatcagcctgccttgacctcccaaaattctgggattacaggcgtgtgccaccgcgtctgtcctaaggagacacactgtttctctggcttattaagagtgtcctgggtcatgaaacttaatccacagcaagctcccttatatggtgattgtgttgttacagtgctgcttgctgaagaggacaaagctgaagatgatgtagtgttttacttggtatttttgggt

SEQ ID NO: 864 - DNA, 558 bp, Homo sapiens
  source 1..558: mol_type = unassigned DNA
attgtgtgtttgccgcaaattaaaacctcagctctgtatcttgccttctgctggaggtttgtaagcttgctcctgctaaccacttcattgtctgagagagaaacggagaatgctggagaaccagactcctggagcagtttatcctatgaaataccgtatggagactgttctgtgaggcatcatcgagagttggacatctatacattaacctctgagtctgattcacatcatgaacacccatttcctggagacggttgcactggaccaatttttaaacttatgaacatccaacagcaactaatgaaaacaaacctcaagcagatggacagtcttatgcccttaatgatgacagcacaggatccttccagtgccccagagacagatggccagtttcttccctgtgcaccggagcccacggaccctcagcgactttcttcttctgaagagactgagagcactcagtgctgcccagggagccctgttgcacagactgaaagtccctgtgatttgtcaagcatagttgaggaggagaatacagaccgttcctgtaggaagaaa

SEQ ID NO: 865 - DNA, 447 bp, Homo sapiens
  source 1..447: mol_type = unassigned DNA
aaaagaggatgggcttgcgatattcggggtgcttgggcagccatgtggagaatgctggagaaccagactcctggagcagtttatcctatgaaataccgtatggagactgttctgtgaggcatcatcgagagttggacatctatacattaacctctgagtctgattcacatcatgaacacccatttcctggagacggttgcactggaccaatttttaaacttatgaacatccaacagcaactaatgaaaacaaacctcaagcagatggacagtcttatgcccttaatgatgacagcacaggatccttccagtgccccagagacagatggccagtttcttccctgtgcaccggagcccacggaccctcagcgactttcttcttctgaagagactgagagcactcagtgctgcccagggagccctgttgcacagactgaaagtccctgtg

SEQ ID NO: 866 - DNA, 553 bp, Homo sapiens
  source 1..553: mol_type = unassigned DNA
tcacacagcagcctgttccatctgtgggtaaccatgttccgaggcagcaaagagaaaccgctattgctccgtggaaataaactatctgaataaaacttcttaacgggggttgaggctgaagctgaaacgggagtcggacacgatcttggctcctgaagtctttaaaggtcagtttgatgcacacttctataccaccacctgttaccagctgtagacagaagacctatctccatgcttgcccctaggcttttgtagaaatgccagacgtgaaagctgaagatgaagtggattttagagcaagttcaatttctgaagaagtggctgtagggagcatagctgctacactgaagatgaagcaaggcccaatgacccaggcgataaaccgagaaaactggtgtacaatagagccatgccctgatgcagcatctcttctggcttccaagcagagcccagaatgtgagaacttcctggatgttggactgggcagagagtgtacctcaaaacaaggtgtacttaaaagagaatctgggagtgattctgacctctttcactc

SEQ ID NO: 867 - DNA, 3297 bp, Homo sapiens
  source 1..3297: mol_type = unassigned DNA
atcggccgttatgcttagccagtttattctttatttttttactggagtcattgccagtgatggaaacggtgtttgcttctctttcagtcaagatctgcacaaagtatagcattaggtggtatttattgtttatattatgagttctacattcatctttccagcactctgaagttatcagcaagttctcagtcagttcaaggcattggattctgcttgatttctttttaattcattgtttttgacccctttgagagttttaatagagaggagtctggaaggcagagatctccaccacctaaccgtgagaaatttggaactaaggacttgcactggtccccaagttaacagtggatatacttcctgcattttctctgttctttcttgcatttgggcaaaatgtatgaacggcacaagaggcgctacagcctctgtgacatctccaaggtggacaggactgtggacgtggtattgctgaagataaaccgagaaaactggtgtacaatagagccatgccctgatgcagcatctcttctggcttccaagcagagcccagaatgtgagaacttcctggatgttggactgggcagagagtgtacctcaaaacaaggtgtacttaaaagagaatctgggagtgattctgacctctttcactcacccagtgatgacatggacagcatcatcttcccaaagccagaggaagagcatttggcctgtgatatcaccggatccagttcatccaccgatgacacggcttcactggaccgacattcttctcatggcagtgatgtgtctctctcccagattttaaagccaaacaggtcaagagatcggcaaagccttgatggattctacagccatgggatgggagctgagggtcgagaaagtgagagtgagcctgctgacccaggcgacgtggaggaggaggagatggacagtatcactgaagtgcctgcaaactgctctgtcctaaggagctccatgcgctctctttctcccttccggaggcacagctgggggcctgggaaaaatgcagccagcgatgcagaaatgaaccaccggagtttcagtctagaaggcttgacaggaggagctggtgtcggaaacaagccatcctcatctctagaagtaagctctgcaaatgccgaagagctcagacacccattcagtggtgaggaacgggttgactctttggtgtcactttcagaagaggatctggagtcagaccagagagaacataggatgtttgatcagcagatatgtcacagatctaagcagcagggatttaattactgtacatcagccatttcctctccattgacaaaatccatctcattaatgacaatcagccatcctggattggacaattcacggcccttccacagtaccttccacaataccagtgctaatctgactgagagtataacagaagagaactataatttcctgccacatagcccctccaagaaagattctgaatggaagagtggaacaaaagtcagtcgtacattcagctacatcaagaataaaatgtctagcagcaagaagagcaaagaaaaggaaaaagaaaaagataagattaaggagaaggagaaagattctaaagacaaggagaaagataagaagactgtcaacgggcacactttcagttccattcctgttgtgggtcccatcagctgtagccagtgtatgaagcccttcaccaacaaagatgcctatacttgtgcaaattgcagtgcttttgtccacaaaggctgccgagaaagtctagcctcctgtgcaaaggtcaaaatgaagcccaaagggagccttcaggcacatgacacatcatcactgcccacggtcattatgagaaacaagccctcacagcccaaggagcgtcctcggtccgcagtcctcctggtggatgaaaccgctaccaccccaatatttgccaatagacgatcccagcagagtgtctcgctctccaaaagtgtctccatacagaacattactggagttggcaatgatgagaacatgtcaaacacctggaaattcctgtctcattcaacagactcactaaataaaatcagcaaggtcaatgagtcaacagaatcacttactgatgagggagtaggtacagacatgaatgaaggacaactactgggagactttgagattgagtccaaacagctggaagcagagtcttggagtcggataatagacagcaagtttctaaaacagcaaaagaaagatgtggtcaaacggcaagaagtaatatatgagttgatgcagacagagtttcatcatgtccgcactctcaagatcatgagtggtgtgtacagccaggggatgatggcggatctgctttttgagcagcagatggtagaaaagctgttcccctgtttggatgagctgatcagtatccatagccaattcttccagaggattctggagcggaagaaggagtctctggtggataaaagtgaaaagaactttctcatcaagaggataggggatgtgcttgtaaatcagttttcaggtgagaatgcagaacgtttaaagaagacatatggcaagttttgtgggcaacataaccagtctgtaaactacttcaaagacctttatgccaaggataagcgttttcaagcctttgtaaagaagaagatgagcagttcagttgttagaaggcttggaattccagagtgcatattgcttgtaactcagcggattaccaagtacccagttttattccaaagaatattgcagtgtaccaaagacaatgaagtggagcaggaagatctagcacagtccttgagcctggtgaaggatgtgattggagctgtagacagcaaagtggcaagttatgaaaagaaagtgcgtctcaatgagatttatacaaagacagatagcaagtcaatcatgaggatgaagagtggtcagatgtttgccaaggaagatttgaaacggaagaagcttgtacgtgatgggagtgtgtttctgaagaatgcagcaggaaggttgaaagaggttcaagcagttcttctcactgacattttagttttccttcaagaaaaagaccagaagtacatctttgcatcattggaccagaagtcaacagtgatctctttaaagaagctgattgtgagagaagtggcacatgaggagaaaggtttattcctgatcagcatggggatgacagatccagagatggtagaagtccatgccagctccaaagaggaacgaaacagctggattcagatcattcaggacacaatcaacaccctgaacagagatgaagatgaaggaattcctagtgag

SEQ ID NO: 868 - DNA, 4290 bp, Homo sapiens
  source 1..4290: mol_type = unassigned DNA
atgttgtatataaaccgagaaaactggtgtacaatagagccatgccctgatgcagcatctcttctggcttccaagcagagcccagaatgtgagaacttcctggatgttggactgggcagagagtgtacctcaaaacaaggtgtacttaaaagagaatctgggagtgattctgacctctttcactcacccagtgatgacatggacagcatcatcttcccaaagccagaggaagagcatttggcctgtgatatcaccggatccagttcatccaccgatgacacggcttcactggaccgacattcttctcatggcagtgatgtgtctctctcccagattttaaagccaaacaggtcaagagatcggcaaagccttgatggattctacagccatgggatgggagctgagggtcgagaaagtgagagtgagcctgctgacccaggcgacgtggaggaggaggagatggacagtatcactgaagtgcctgcaaactgctctgtcctaaggagctccatgcgctctctttctcccttccggaggcacagctgggggcctgggaaaaatgcagccagcgatgcagaaatgaaccaccggagttcaatgcgagttcttggggatgttgtcaggagacctcccattcataggagaagtttcagtctagaaggcttgacaggaggagctggtgtcggaaacaagccatcctcatctctagaagtaagctctgcaaatgccgaagagctcagacacccattcagtggtgaggaacgggttgactctttggtgtcactttcagaagaggatctggagtcagaccagagagaacataggatgtttgatcagcagatatgtcacagatctaagcagcagggatttaattactgtacatcagccatttcctctccattgacaaaatccatctcattaatgacaatcagccatcctggattggacaattcacggcccttccacagtaccttccacaataccagtgctaatctgactgagagtataacagaagagaactataatttcctgccacatagcccctccaagaaagattctgaatggaagagtggaacaaaagtcagtcgtacattcagctacatcaagaataaaatgtctagcagcaagaagagcaaagaaaaggaaaaagaaaaagataagattaaggagaaggagaaagattctaaagacaaggagaaagataagaagactgtcaacgggcacactttcagttccattcctgttgtgggtcccatcagctgtagccagtgtatgaagcccttcaccaacaaagatgcctatacttgtgcaaattgcagtgcttttgtccacaaaggctgccgagaaagtctagcctcctgtgcaaaggtcaaaatgaagcagcccaaagggagccttcaggcacatgacacatcatcactgcccacggtcattatgagaaacaagccctcacagcccaaggagcgtcctcggtccgcagtcctcctggtggatgaaaccgctaccaccccaatatttgccaatagacgatcccagcagagtgtctcgctctccaaaagtgtctccatacagaacattactggagttggcaatgatgagaacatgtcaaacacctggaaattcctgtctcattcaacagactcactaaataaaatcagcaaggtcaatgagtcaacagaatcacttactgatgagggagtaggtacagacatgaatgaaggacaactactgggagactttgagattgagtccaaacagctggaagcagagtcttggagtcggataatagacagcaagtttctaaaacagcaaaagaaagatgtggtcaaacggcaagaagtaatatatgagttgatgcagacagagtttcatcatgtccgcactctcaagatcatgagtggtgtgtacagccaggggatgatggcggatctgctttttgagcagcagatggtagaaaagctgttcccctgtttggatgagctgatcagtatccatagccaattcttccagaggattctggagcggaagaaggagtctctggtggataaaagtgaaaagaactttctcatcaagaggataggggatgtgcttgtaaatcagttttcaggtgagaatgcagaacgtttaaagaagacatatggcaagttttgtgggcaacataaccagtctgtaaactacttcaaagacctttatgccaaggataagcgttttcaagcctttgtaaagaagaagatgagcagttcagttgttagaaggcttggaattccagagtgcatattgcttgtaactcagcggattaccaagtacccagttttattccaaagaatattgcagtgtaccaaagacaatgaagtggagcaggaagatctagcacagtccttgagcctggtgaaggatgtgattggagctgtagacagcaaagtggcaagttatgaaaagaaagtgcgtctcaatgagatttatacaaagacagatagcaagtcaatcatgaggatgaagagtggtcagatgtttgccaaggaagatttgaaacggaagaagcttgtacgtgatgggagtgtgtttctgaagaatgcagcaggaaggttgaaagaggttcaagcagttcttctcactgacattttagttttccttcaagaaaaagaccagaagtacatctttgcatcattggaccagaagtcaacagtgatctctttaaagaagctgattgtgagagaagtggcacatgaggagaaaggtttattcctgatcagcatggggatgacagatccagagatggtagaagtccatgccagctccaaagaggaacgaaacagctggattcagatcattcaggacacaatcaacaccctgaacagagatgaagatgaaggaattcctagtgagaatgaggaagaaaagaaaatgttggacaccagagcccgagaattaaaagaacaacttcaccagaaggaccaaaaaatcctactcttgttggaagagaaggagatgattttccgggacatggctgagtgcagcacccctctcccagaggattgctccccaacacatagccctagagttctcttccgctccaacacagaagaggctctcaaaggaggacctttaatgaaaagtgcaataaatgaggtggagatccttcagggtttggtgagtggaaatctgggaggcacacttgggccgactgtcagcagccccattgagcaagatgtggtcggtcccgtttccctgccccggagagcagagacctttggaggatttgacagccatcagatgaatgcttcaaaaggaggcgagaaggaagagggagatgatggccaagatcttaggagaacggaatcagatagtggcctaaaaaagggtggaaatgctaacctggtatttatgcttaaaagaaacagtgagcaggttgtccagagcgttgttcatctctacgagctcctcagcgctctgcagggtgtggtgctgcagcaggacagctacattgaggaccagaaactggtgctgagcgagagggcgctcactcgcagcttgtcccgcccgagctccctcattgagcaggagaagcagcgcagcctggagaagcagcgccaggacctggccaacctgcagaagcagcaggcccagtacctcgaggagaagcgcaggcgcgagcgtgagtgggaagctcgtgagagggagctgcgggagcgggaggccctcctggcccagcgcgaggaggaggtgcagcaggggcagcaggacctggaaaaggagcgggaggagctccagcagaagaagggcacataccagtatgacctggagcgactgcgtgctgcccagaaacagcttgagagggaacaggagcagctgcgccgggaggcagagcggctcagccagcggcagacagaacgggacctgtgtcaggtttcccatccacataccaagctgatgaggatcccatcgttcttccccagtcctgaggagcccccctcgccatctgcaccttccatagccaaatcagggtcattggactcagaactttcagtgtccccaaaaaggaacagcatctctcggacacacaaagataaggggccttttcacatactgagttcaaccagccagacaaacaaaggaccagaagggcagagccaggcccctgcgtccacctctgcctctacccgcctgtttgggttaacaaagccaaaggaaaagaaggagaaaaaaaagaagaacaaaaccagccgctctcagcccggtgatggtcccgcgtcagaagtatcagcagagggtgaagagatcttctgctga

SEQ ID NO: 869 - DNA, 827 bp, Homo sapiens
  source 1..827: mol_type = unassigned DNA
cccagtgatgacatggacagcatcatcttcccaaagccagaggaagagcatttggcctgtgatatcaccggatccagttcatccaccgatgacacggcttcactggaccgacattcttctcatggcagtgatgtgtctctctcccagattttaaagccaaacaggtcaagagatcggcaaagccttgatggattctacagccatgggatgggagctgagggtcgagaaagtgagagtgagcctgctgacccaggcgacgtggaggaggaggagatggacagtatcactgaagtgcctgcaaactgctctgtcctaaggagctccatgcgctctctttctcccttccggaggcacagctgggggcctgggaaaaatgcagccagcgatgcagaaatgaaccaccggagttcaatgcgagttcttggggatgttgtcaggagacctcccattcataggagaagtatgagctggtgcccctctggtgtgcagtactctgctggcctgagtgctgactttaattacagaagtttcagtctagaaggcttgacaggaggagctggtgtcggaaacaagccatcctcatctctagaagtaagctctgcaaatgccgaagagctcagacacccattcagtggtgaggaacgggttgactctttggtgtcactttcagaagaggatctggagtcagaccagagagaacataggatgtttgatcagcagatatgtcacagatctaagcagcagggatttaattactgtacatcagccatttcctctccattgacaaaatccatctcattaatgacaatcagccatcctggattgga

SEQ ID NO: 870 - DNA, 425 bp, Homo sapiens
  source 1..425: mol_type = unassigned DNA
gtctaaaactctcttttctcttggctcttcttattcgagtgatgaggaggaggagttgcataattcacggcccttccacagtaccttccacaataccagtgctaatctgactgagagtataacagaagagaactataatttcctgccacatagcccctccaagaaagattctgaatggaagagtggaacaaaagtcagtcgtacattcagctacatcaagaataaaatgtctagcagcaagaagagcaaagaaaaggaaaaagaaaaagataagattaaggagaaggagaaagattctaaagacaaggagaaagataagaagactgtcaacgggcacactttcagttccattcctgttgtgggtcccatcagctgtagccagtgtatgaagcccttcaccaacaaagatgcctatacttgtgcaa

SEQ ID NO: 871 - DNA, 751 bp, Homo sapiens
  source 1..751: mol_type = unassigned DNA
cttccacagtaccttccacaataccagtgctaatctgactgagagtataacagaagagaactataatttcctgccacatagcccctccaagaaagattctgaatggaagagtggaacaaaagtcagtcgtacattcagctacatcaagaataaaatgtctagcagcaagaagagcaaagtgagtatcactgtgggcattgcttgtgatcacctcagtaggatcctgtcacagcctgcattcacaccaaaactggttaaatcatggggacataaatggaaataaattcaggattactctccgaaatcgcctaatatttaaaggaaaataataagaagaaaaatagcaagaagtggaactaccagttactgagttttcactatatgctaagtgctttccatatattatttaaccctttcaacaaccctgtcaggtaggtgttatctctcttttctaaaagtgatgtaccttaccgaggatactcctctaatgtgaagaagtagttcaaaccagatctctttggtttcaaatcccatactcttaaaccacagtgcttaaatctgtaatatcagtttaaatgcaacagaaggattttatgcaaagatcaaaggattgaaaatatttatatttggctttagagggaaggattatcccacagaagattacaagaacttttaagactaatatgatttcttagatctatttctaattaggagcatttggaatatattctcttagtgattaagagattaa

SEQ ID NO: 872 - DNA, 620 bp, Homo sapiens
  source 1..620: mol_type = unassigned DNA
acaaacaatctcggctcactgcaccctccacctcccgggttcaagcgattttcctgcctcagcttcccgggtagctgggactacaggcgtggtggcatgtgcctttagtcccagcttactctagaggctgaggcaggaagattgcgtgagctcaggagttcaaggctgcagtgagctatcatcacaccactcagagcaagactgtctccaaaacagacaagtgaacaagaaaacattagtgacggatctaaggaaacttagccaagttttgataacagaacctgggcgttgtggcatactctataaaaagccattcagcagccttcatctaccttttattctgcttcacttttatttaacttctgtagccctttaaaaaaaatcaatcttcttgtttttatttagtataacagaagagaactataatttcctgccacatagcccctccaagaaagattctgaatggaagagtggaacaaaagtcagtcgtacattcagctacatcaagaataaaatgtctagcagcaagaagagcaaagtgagtatcactgtgggcattgcttgtgatcacctcagtaggatcctgtcacagcctgcattcacaccaaaactggttaaat

SEQ ID NO: 873 - DNA, 660 bp, Homo sapiens
  source 1..660: mol_type = unassigned DNA
aggaaacaagcagcctcagccctccctccttccctttctcagccagtctctggcttcctcttacgatttcactaatggcagctcaaagctgctgagctctgccctgacggcatgcgcccccgcttctgtgagagcacgcttcctggcatgggggtcgaatcatgtcgataaaatgggctcggtttcatgaagtaccccacataacagtgagattcataggaccaaagcatggggaggaaaaggaaaaagaaaaagataagattaaggagaaggagaaagattctaaagacaaggagaaagataagaagactgtcaacgggcacactttcagttccattcctgttgtgggtcccatcagctgtagccagtgtatgaagcccttcaccaacaaagatgcctatacttgtgcaaattgcagtgcttttgtccacaaaggctgccgagaaagtctagcctcctgtgcaaaggtcaaaatgaagcagcccaaagggagccttcaggcacatgacacatcatcactgcccacggtcattatgagaaacaagccctcacagcccaaggagcgtcctcggtccgcagtcctcctggtggatgaaaccgctaccaccccaatatttgccaatagacgatcccagcagagtgtctcgctctccaaaagtg

SEQ ID NO: 874 - DNA, 683 bp, Homo sapiens
  source 1..683: mol_type = unassigned DNA
gcgtgccaacgccttaatttaaaaaaacaaaacaaaacactttgcccagaactttgtttctcactcctttccaaaatagtcaccagctgttgttaaccacatgccatctgggtgcccaggtaaggagaaagccctccagtgttcaattaactgtggattattttcttttcttcggcaggaaaaggaaaaagaaaaagataagattaaggagaaggagaaagattctaaagacaaggagaaagataagaagactgtcaacgggcacactttcagttccattcctgttgtgggtcccatcagctgtagccagtgtatgaagcccttcaccaacaaagatgcctatacttgtgcaaattgcagtgcttttgtccacaaaggctgccgagaaagtctagcctcctgtgcaaaggtcaaaatgaagcagcccaaagggagccttcaggcacatgacacatcatcactgcccacggtcattatgagaaacaagccctcacagcccaaggagcgtcctcggtccgcagtcctcctggtggatgaaaccgctaccaccccaatatttgccaatagacgatcccagcagagtgtctcgctctccaaaagtgtctccatacagaacattactggagttggcaatgatgagaacatgtcaaacacctggaaattcctgtctcattcaacagact

SEQ ID NO: 875 - DNA, 441 bp, Homo sapiens
  source 1..441: mol_type = unassigned DNA
gctgggacacagggtgcttagggcagtgcaaaaagcagagtgggaaaggaagctgaactgcttgctcccttcctactcggcttctcagggcttgtcagaggtgaattgtcaatggacttactttctttctctttagcagcccaaagggagccttcaggcacatgacacatcatcactgcccacggtcattatgagaaacaagccctcacagcccaaggagcgtcctcggtccgcagtcctcctggtggatgaaaccgctaccaccccaatatttgccaatagacgatcccagcagagtgtctcgctctccaaaagtgtctccatacagaacattactggagttggcaatgatgagaacatgtcaaacacctggaaattcctgtctcattcaacagactcactaaataaaatcagcaaggtcaatgagtcaacagaatcact

SEQ ID NO: 876 - DNA, 1401 bp, Homo sapiens
  source 1..1401: mol_type = unassigned DNA
gacataagcaatttgtcttcagtcactgtagtacttccagccagttgtcattctagagtcttcaggtactcatttaagaatgcaagccataggttatcagaatgtatttgacagtatgtatttttcttttgtccccagagttggcaatgatgagaacatgtcaaacacctggaaattcctgtctcattcaacagactcactaaataaaatcagcaaggtcaatgagtcaacagaatcacttactgatgagggtacagacatgaatgaaggacaactactgggagactttgagattgagtccaaacagctggaagcagagtcttggagtcggataatagacagcaagtttctaaaacagcaaaagaaagatgtggtcaaacggcaagaagtaatatatgagttgatgcagacagagtttcatcatgtccgcactctcaagatcatgagtggtgtgtacagccaggggatgatggcggatctgctttttgagcagcagatggtagaaaagctgttcccctgtttggatgagctgatcagtatccatagccaattcttccagaggattctggagcggaagaaggagtctctggtggataaaagtgaaaagaactttctcatcaagaggataggggatgtgcttgtaaatcagttttcaggtgagaatgcagaacgtttaaagaagacatatggcaagttttgtgggcaacataaccagtctgtaaactacttcaaagacctttatgccaaggataagcgttttcaagcctttgtaaagaagaagatgagcagttcagttgttagaaggcttggaattccagagtgcatattgcttgtaactcagcggattaccaagtacccagttttattccaaagaatattgcagtgtaccaaagacaatgaagtggagcaggaagatctagcacagtccttgagcctggtgaaggatgtgattggagctgtagacagcaaagtggcaagttatgaaaagaaagtgcgtctcaatgagatttatacaaagacagatagcaagtcaatcatgaggatgaagagtggtcagatgtttgccaaggaagatttgaaacggaagaagcttgtacgtgatgggagtgtgtttctgaagaatgcagcaggaaggttgaaagaggttcaagcagttcttctcactgacattttagttttccttcaagaaaaagaccagaagtacatctttgcatcattggaccagaagtcaacagtgatctctttaaagaagctgattgtgagagaagtggcacatgaggagaaaggtttattcctgatcagcatggggatgacagatccagagatggtagaagtccatgccagctccaaagaggaacgaaacagctggattcagatcattcaggacacaatcaacaccct

SEQ ID NO: 877 - DNA, 322 bp, Homo sapiens
  source 1..322: mol_type = unassigned DNA
aaagcagaaagatcgcttgagcccaggaggttgaggctgcaatgagccatgacttcagcctgcacttcagcctggagttgatgcagacagagtttcatcatgtccgcactctcaagatcatgagtggtgtgtacagccaggggatgatggcggatctgctttttgagcagcagatggtagaaaagctgttcccctgtttggatgagctgatcagtatccatagccaattcttccagaggattctggagcggaagaaggagtctctggtggataaaagtgaaaagaactttctcatcaagaggataggggatgtgcttgtaaa

SEQ ID NO: 878 - DNA, 427 bp, Homo sapiens
  source 1..427: mol_type = unassigned DNA
cagtatccatagccaattcttccagaggattctggagcggaagaaggagtctctggtggataaaagtgaaaagaactttctcatcaagaggataggggatgtgcttgtaaatcagttttcaggtgagaatgcagaacgtttaaagaagacatatggcaagttttgtgggcaacataaccagtctgtaaactacttcaaagacctttatgccaaggataagcgttttcaagcctttgtaaaggtattgataagaaacatgaaaatccccgttattgttgagagccatgtgtccctgtcggctttcactagagcctttttcatgtgattcctcacagtctgtttactcccttgcagaagaagatgagcagttcagttgttagaaggcttggaattccagagtgcatattgcttgtaactcagcggatta

SEQ ID NO: 879 - DNA, 418 bp, Homo sapiens
  source 1..418: mol_type = unassigned DNA
ggagaacggaatcagatagtggcctaaaaaagggtggaaatgctaacctggtatttatgcttaaaagaaacagtgagcaggttgtccagagcgttgttcatctctacgagctcctcagcgctctgcaggtgcgtgccttcatcttccatccctgcgtttatttgtctagagaacagcagcttggggctgttgttgacttggatctttgaggtttgcaggatgtttaatggataaatggggccctcagtctagggaagactggctctcgtggtgagaaagttacagaatgcatcgaccttccaggactagaattagtgaagagctggtgtgccgtaggcatggcttgataaccatgctacaaatcacatagcatgctaacatgcatctgggagattacttcactttagaaagccttaag

SEQ ID NO: 880 - DNA, 611 bp, Homo sapiens
  source 1..611: mol_type = unassigned DNA
gtcgttaggtgacatgtgcactttaaatgctctcatcggttggcttcattttcaagacaatcaaatgtattgactgtgttttcttcttagaaaatggagagggttaaaaacatgcaaactgccactttcaacctttgccagtattccctctacccccgtgagagctatctggggggaagaatccttaccaaggtttttttggaaagggttaaaggcgtgcaaccccccactggctgtgtcccctgccaccgaagtgagtgacctgccctacaaccaggtgggaccacctgtgctgcagtccggaggggcttctgcaggaagcactcaccccccacaccttccccggcctgagcttcccctacctttcgtcaccacctgagggcatgagcacaggccatggggcgtgcctggtgagtctgcctgtggttcaggcttagcctgtggtctcctgtgtgctgctgcccgcatgggatgcgcaggggaggcgtggggatccgcaggagggtggttgggatacaccggatacctctgctctcattgcttgtttgcaaatgctctatggacatttgtgtgctaaatcctattaaataaaaaagacgggttaaaaccca

SEQ ID NO: 881 - DNA, 9128 bp, Homo sapiens
  source 1..9128: mol_type = unassigned DNA
ttttaatagagaggagtctggaaggcagagatctccaccacctaaccgtgagaaatttggaactaaggacttgcactggtccccaagttaacagtggatatacttcctgcattttctctgttctttcttgcatttgggcaaaatgtatgaacggcacaagaggcgctacagcctctgtgacatctccaaggtggacaggactgtggacgtggtattgctgaagataaaccgagaaaactggtgtacaatagagccatgccctgatgcagcatctcttctggcttccaagcagagcccagaatgtgagaacttcctggatgttggactgggcagagagtgtacctcaaaacaaggtgtacttaaaagagaatctgggagtgattctgacctctttcactcacccagtgatgacatggacagcatcatcttcccaaagccagaggaagagcatttggcctgtgatatcaccggatccagttcatccaccgatgacacggcttcactggaccgacattcttctcatggcagtgatgtgtctctctcccagattttaaagccaaacaggtcaagagatcggcaaagccttgatggattctacagccatgggatgggagctgagggtcgagaaagtgagagtgagcctgctgacccaggcgacgtggaggaggaggagatggacagtatcactgaagtgcctgcaaactgctctgtcctaaggagctccatgcgctctctttctcccttccggaggcacagctgggggcctgggaaaaatgcagccagcgatgcagaaatgaaccaccggagtttcagtctagaaggcttgacaggaggagctggtgtcggaaacaagccatcctcatctctagaagtaagctctgcaaatgccgaagagctcagacacccattcagtggtgaggaacgggttgactctttggtgtcactttcagaagaggatctggagtcagaccagagagaacataggatgtttgatcagcagatatgtcacagatctaagcagcagggatttaattactgtacatcagccatttcctctccattgacaaaatccatctcattaatgacaatcagccatcctggattggacaattcacggcccttccacagtaccttccacaataccagtgctaatctgactgagagtataacagaagagaactataatttcctgccacatagcccctccaagaaagattctgaatggaagagtggaacaaaagtcagtcgtacattcagctacatcaagaataaaatgtctagcagcaagaagagcaaagaaaaggaaaaagaaaaagataagattaaggagaaggagaaagattctaaagacaaggagaaagataagaagactgtcaacgggcacactttcagttccattcctgttgtgggtcccatcagctgtagccagtgtatgaagcccttcaccaacaaagatgcctatacttgtgcaaattgcagtgcttttgtccacaaaggctgccgagaaagtctagcctcctgtgcaaaggtcaaaatgaagcccaaagggagccttcaggcacatgacacatcatcactgcccacggtcattatgagaaacaagccctcacagcccaaggagcgtcctcggtccgcagtcctcctggtggatgaaaccgctaccaccccaatatttgccaatagacgatcccagcagagtgtctcgctctccaaaagtgtctccatacagaacattactggagttggcaatgatgagaacatgtcaaacacctggaaattcctgtctcattcaacagactcactaaataaaatcagcaaggtcaatgagtcaacagaatcacttactgatgagggagtaggtacagacatgaatgaaggacaactactgggagactttgagattgagtccaaacagctggaagcagagtcttggagtcggataatagacagcaagtttctaaaacagcaaaagaaagatgtggtcaaacggcaagaagtaatatatgagttgatgcagacagagtttcatcatgtccgcactctcaagatcatgagtggtgtgtacagccaggggatgatggcggatctgctttttgagcagcagatggtagaaaagctgttcccctgtttggatgagctgatcagtatccatagccaattcttccagaggattctggagcggaagaaggagtctctggtggataaaagtgaaaagaactttctcatcaagaggataggggatgtgcttgtaaatcagttttcaggtgagaatgcagaacgtttaaagaagacatatggcaagttttgtgggcaacataaccagtctgtaaactacttcaaagacctttatgccaaggataagcgttttcaagcctttgtaaagaagaagatgagcagttcagttgttagaaggcttggaattccagagtgcatattgcttgtaactcagcggattaccaagtacccagttttattccaaagaatattgcagtgtaccaaagacaatgaagtggagcaggaagatctagcacagtccttgagcctggtgaaggatgtgattggagctgtagacagcaaagtggcaagttatgaaaagaaagtgcgtctcaatgagatttatacaaagacagatagcaagtcaatcatgaggatgaagagtggtcagatgtttgccaaggaagatttgaaacggaagaagcttgtacgtgatgggagtgtgtttctgaagaatgcagcaggaaggttgaaagaggttcaagcagttcttctcactgacattttagttttccttcaagaaaaagaccagaagtacatctttgcatcattggaccagaagtcaacagtgatctctttaaagaagctgattgtgagagaagtggcacatgaggagaaaggtttattcctgatcagcatggggatgacagatccagagatggtagaagtccatgccagctccaaagaggaacgaaacagctggattcagatcattcaggacacaatcaacaccctgaacagagatgaagatgaaggaattcctagtgagaatgaggaagaaaagaaaatgttggacaccagagcccgagaattaaaagaacaacttcaccagaaggaccaaaaaatcctactcttgttggaagagaaggagatgattttccgggacatggctgagtgcagcacccctctcccagaggattgctccccaacacatagccctagagttctcttccgctccaacacagaagaggctctcaaaggaggacctttaatgaaaagtgcaataaatgaggtggagatccttcagggtttggtgagtggaaatctgggaggcacacttgggccgactgtcagcagccccattgagcaagatgtggtcggtcccgtttccctgccccggagagcagagacctttggaggatttgacagccatcagatgaatgcttcaaaaggaggcgagaaggaagagggagatgatggccaagatcttaggagaacggaatcagatagtggcctaaaaaagggtggaaatgctaacctggtatttatgcttaaaagaaacagtgagcaggttgtccagagcgttgttcatctctacgagctcctcagcgctctgcagggtgtggtgctgcagcaggacagctacattgaggaccagaaactggtgctgagcgagagggcgctcactcgcagcttgtcccgcccgagctccctcattgagcaggagaagcagcgcagcctggagaagcagcgccaggacctggccaacctgcagaagcagcaggcccagtacctcgaggagaagcgcaggcgcgagcgtgagtgggaagctcgtgagagggagctgcgggagcgggaggccctcctggcccagcgcgaggaggaggtgcagcaggggcagcaggacctggaaaaggagcgggaggagctccagcagaagaagggcacataccagtatgacctggagcgactgcgtgctgcccagaaacagcttgagagggaacaggagcagctgcgccgggaggcagagcggctcagccagcggcagacagaacgggacctgtgtcaggtttcccatccacataccaagctgatgaggatcccatcgttcttccccagtcctgaggagcccccctcgccatctgcaccttccatagccaaatcagggtcattggactcagaactttcagtgtccccaaaaaggaacagcatctctcggacacacaaagataaggggccttttcacatactgagttcaaccagccagacaaacaaaggaccagaagggcagagccaggcccctgcgtccacctctgcctctacccgcctgtttgggttaacaaagccaaaggaaaagaaggagaaaaaaaagaagaacaaaaccagccgctctcagcccggtgatggtcccgcgtcagaagtatcagcagagggtgaagagatcttctgctgaccctcttcctctctgctgaggcagctgcctcctgatcctggccagcccacctctcctgctgtccccgcgtgcacaagtctcttacactggacgcccactgctcctcagcgtccagtcctcctgggcggccccaggtcctggacaataagcaacagatgatattgagtgtcgggtggggaaggaggcccagactctgcttcggccatgatttgtgactgcccaggactctcaggttgggctggccctactcaggattacactgaaagtaatggcctcgtaagtacaggtgatggttttggacacgtcaggaattcctaaaggctgaaagagtgtatccaagtaaggtctgaacctccgaatgccttttatttgggggaacacaaaaccaaacagcagatgttttggacttgatctgtgtacgtacatggggacctgtctgcatatacacacggggaatgccagaagaaggcccagtctgcaccaggcgtctggtcaacttagcacaagggcagtgcctggacggacccggagcccccgcatatcagcagttcacccagtactcctcagagactggtttccctctaaacccatcccgggcacataccacccgtgttttgcatgtatttctcatttcattttagggatgacaaacatttgtgaaaccagtgagagaaggcttgatgtgtataaaagacgtgatgtgcaccacctcgatctcggtgtttcaggcactaaagcaacaaaacaacccatagtatctcattctgtcatcagatccagaagaaatatcctggttttccagcatgtttacccacatgttttggccatggataaagtgaagaggcctactcaccattatccctgcagcgtgacaccttttgattgtcactgaccactcagaaggggccacggcctcctggctgtgttcctgagcccccgtcgtgcctctcccagacagcagctgtctggcccttgctgggtgagggcacaccactgccaggggtcagcctcgcacccaggccaggcagaagctgtgctctgaagctaggacagctggctgagaagtgggttcaggcgaagggtgaagccatgtgtagcagttcctgccagtgcagatctggagaggagctggcccggaaggcgtggttgtgaaagcgcccttcttatgttaggaggccttggcaaaattggatttcttcaaaaatacatgtaaaggtctgttgttgaattgtactctgcccctggaagcagatacagatggctgcctgctgctcggctttgcttttgcttttcccaccgtgttttcatctttgttcacttgaggctttccccagctggtgtgtgcaggacagttcatggtaatgttgccctctgaggccccgtacaccagaagggaggccctggaaaattttgtgcttccaacgtggccttcaattcttgcttttttgcccctcggaagcatggggcttttgagcacacttaaaaaaagaaaaatctgtaacttggtgcttattgatgaattgcaagctggccttgcagatggagatatttatctttcagtttatttgaaagaggtctggtttaaaatttgtagcctacatttgttttatttattgtatttgtgtgtttgtgtttgtttttttttaagggtgagccaggtctagcccaacagtctaaactatccagtcaataccgagtgaagtggcagccagcactgttcactctgtgtcttttgaagtgccttgaaggcccagatgaaattttaaagggagggggtccatgtccttccctcccccaccccgcctcattctttaatcaaaggatgtcttctcccttgtttgagaatgaagaaactcgccacctctgacctacctttgcctttttctgtcatggagaatactcacccttcagaaacagaccaaaggccaaaacctgctgatttttctattgaaaatatgtccccttgcaaagaccctaaacaaaaagttaagtttctttctttcacctatttgtacaactccaagttacagctgaatctgtcgtgactttcctgagatctacccggggcttggctgtctgttctgggcactggctccgagttcccctcctgggatttgcaggagggcagtactgaacctgcattcttctccttgtaaatgtaggccgggtgcccctgttctccgggtttggaacaatacgaggttggtgctgatgggatttacttgcgtacgtgctcttcacaaaaacaccgtggatgctgaagttagagcacgtcgccacagagcttgacatcaatgttagagggtctcttactccccgcccagctgtgatgtttcatctgctttggttgttttggtggtcttttttaaaaatagagatttcacatctgcccagaccccactcaaaacgatttggtcaggttctggttggacaagtttaaaatcaaagtagtgcccggaattccctcaaaccacccaacttcatccaggaatacagtctgcagtgcagcaacagaaccgcttaccaagaactgtgcttacatacctttgtcatctctcttccccccttggaagttgtcctcagggggatttgttcctgtcctggggatttacctgggatggtggctgcctgtgcttttgctcatggccttgacagtgctctagttgctggatctaatggcctgtcttggtttctatcacatgagaaggggttgtttttttggggtgactcggactgaattccccatactgtttccacgccgggacaccatgttctccatcaagctaaagaaatcacgtgcctgaaactgtgcttaagttttgggggaaagatggagttcctatccagagcccccagatttccagaatcgagtgagcttcctggaaggagactgcgtcttctctcaattccagtcatctcagtcgttgtcgttaggtgacatgtgcactttaaatgctctcatcggttggcttcattttcaagacaatcaaatgtattgactgtgttttcttcttagaaaatggagagggttaaaaacatgcaaactgccactttcaacctttgccagtattccctctacccccgtgagagctatctggggggaagaatccttaccaaggtttttttggaaaggtacgaatcttaacttttttccccttctgtgtctcagggtaatactattcagagtcgcccctttgctcattttctcccgtatttgttaccttcctgaggcctcagtattagtcgtgagcacaaagttttgagacctttggcgttgtttcttgatgtgggaggggaggtgttagtgcatgcaagggttgaactagatagaccctgccttagtagagggtgggactataaccttagaggccagaacttgatccagaagttgctgtccacagaagtgctttctatttcatcatttttgtttctagggctctttttctgtagccaggtcttcccaaggattttagtatttgcattggagttgaggtttactctaatgatggtggcccagctgtgcccagaggacagccaggcaggccctgggagggagtttagaaagacagtcctggtgaatgggcttcaagtggtcacaaagagggtggctgtgaggtgaccccagacactgcagaacgatgtgcaccctctgcgttttggatgtccttggaatgtgggagcctagaaataaccctgtggatggaattggggcagcggctgctggagatctgtgtgccttgccttccttcagcaggaccgtctaggtgcgcagccacctatggatgcgtcccagccagccccgtcgctctcgtccatcctcagagacaaagaagagggcagggagtttgggcttggttttgaactttcctttcaatgtagcaaagcattcctagttaaccagagccttggaatctactgcctgctggccaggctttaaaatgaaaagtgttttaatgctgccataaaagggaggcgggggggaggaagggaaaataaaggcatctttccaagtactcatctaatttaattgtcaaaagattgataggccatgaattacttctccatctcactaagggttaaaggcgtgcaaccccccactggctgtgtcccctgccaccgaagtgagtgacctgccctacaaccaggtgggaccacctgtgctgcagtccggaggggcttctgcaggaagcactcaccccccacaccttccccggcctgagcttcccctacctttcgtcaccacctgagggcatgagcacaggccatggggcgtgcctggtgagtctgcctgtggttcaggcttagcctgtggtctcctgtgtgctgctgcccgcatgggatgcgcaggggaggcgtggggatccgcaggagggtggttgggatacaccggatacctctgctctcattgcttgtttgcaaatgctctatggacatttgtgtgctaaatcctattaaataaaaaagacgggttaaaacccagatgctgtatattcatttgtaattatgtataaagtgaagcagttttaaactgtaaagatttttttcagtgtgttttctcgaattttgccacaacatactggcttcgtattttatttatctttctttctagttaccagcttcagacccttgtaaagtctccctcagccctttcaaaaaataataaatttcctgtgaagttctg

SEQ ID NO: 882 - DNA, 5464 bp, Homo sapiens
  source 1..5464: mol_type = unassigned DNA
ccagggcgcaatggagacagggggctccctgggtttggaacaaagaattcacaggcaggtcccctgaaactgggtcggcaggacggtggtggagcccgagagagggcacaggcaggatggccgatgctgacaggaaccagcggtgactctggggcccctggcagcagctctgtctcctgaagatgaagtggcccaggtgaagcccaggccagccccaatggccagctcggagactgagatccgctgggctgagcctggcctggggaagggcccccagcggcggcgctgggcctgggccgaggacaagagggatgtggatagaagtagttcacaaagctgggaagaagagagactctttcccaatgccaccagccccgagctcctagaggacttccgcctggcccagcagcacctgccgcccctggagtgggacccacacccgcagcccgatgggcatcaggattccgagtcaggagagacttcgggagaagaggctgaagcagaggatgtggacagcccagcaagttcccatgagcctcttgcctggctcccccagcagggccgtcagctggacatgactgaagaggagccagatgggaccctcggaagtctggaggttgaggaggctggagagagctcctcaaggttggggtatgaggctggtctcagcttggaaggccatggaaacaccagccccatggctcttgggcatggtcaggccaggggctgggtggcttctggcgaacaagccagtggggacaaactttctgaacattccgaggtcaacccatccgttgaactcagcccggcaaggtcctggagcagtgggacagtgagcctcgaccaccctagtgacagccttgattctacctgggaaggagagaccgatggcccccagcccactgccctggcagaaaccttgccagagggccccagccaccacctcctaagcccagatggcagaactggaggcagtgttgctcgggcaacccccatggaattccaggactcctcagctcccccagcccagagtccgcagcatgccacagatagatggaggagagaaacgaccagattcttctgccctcagcccaaggaacacatctggaagcagacaaagacgtcacctaagccactcccttcccgattcattggctccatcagccccctgaatccccagcccaggccaacgcggcagggcaggccgctgcccagacagggagccactctggctggccgctcctcttctaatgcccccaagtatggccgggggcagttgaactacccactccctgatttctccaaggtagggccccgggtgagattccccaaagatgagagctaccgtccccccaagtccagaagccacaacaggaagcctcaggcccctgccaggcccctcatcttcaagtctccagctgagattgtgcaggaggtgctgttgagcagtggagaagcagccctggcaaaggacacgcctcctgcccaccctatcaccagggtaccccaagaatttcagacgcctgagcaagccactgagctggtccatcagctccaggaagactaccacaggctcctcaccaagtacgctgaggccgagaacaccattgaccagctacgcctcggggccaaggtgaacctgttctctgacccaccccagcccaaccacagcatccacacgggaatggtgccccaggggaccaaggtcttgtccttcaccatcccacagccccgctctgcagagtggtggccgggcccggccgaggacccccaggcctctgcggcctcagggtggccatcagctcgaggagacttgagcccctcctcgcttaccagcatgcccaccctggggtggcttccggagaaccgggacatctctgaggaccagtcctcagcagagcagacccaggcactggcttctcaggccagccagttcctggccaaggtggagtcctttgaaagactgatacaggcaggacgtctcatgccccaggaccaagtcaagggcttccagcggctgaaggctgcccacgcggccctagaggaggagtacctgaaggcttgtcgggagcaacaccctgcccagccgcttgccggctccaaggggacgcctggaagatttgatcctcgcagggagctggaggcagagatataccgtctgggaagctgcctggaagagctgaaggaacacatagaccagacccagcaagagcctgagccgcccgggtcagactcagctctggacagcaccccagccctgccctgcctccatcagccaacgcacctgcctgctccttctggacaagcccccatgccagccatcaagacctcctgccctgagcctgctaccaccactgccgccgccagcactggcccctgcccattgcacgtaaatgtggaggtgagctctggcaacagtgaggtggaggacaggccacaggaccccctggcccgactcaggcacaaggagctgcagatggagcaagtttaccatggcctcatggagcggtacctcagtgtgaagtctctcccagaagccatgagaatggaggaggaggaagaaggagaggaggaggaggaggaagaggggggaggtgactccctggaagttgatggggtggctgcaactccagggaaagcagaggccaccagggtcctcccaaggcagtgcccggtgcaggctgagaaaagtcatggggctcccctggaggaggccacggagaagatggtatctatgaagccaccaggtttccaggcatccctggctagagacgggcacatgtcaggcctgggcaaggctgaggcagcccctccaggccctggcgtgccaccccaccctccaggcaccaagtccgcagcatcccaccaaagtagtatgaccagcctggagggaagcggcatctctgagcgccttccacagaagcctttgcaccgaggcggtgggccccacctggaggagacctggatggcgtccccagagacagacagtggctttgtgggctcagaaacaagcagagtttcacccctcacccagactccagagcaccggctctcccacatcagcacagcaggaacattagcccagccctttgctgcatctgtgcccagggatggagcttcctaccccaaggccaggggttctctgattcccagaagagccacagagcccagcacaccccggagccaagcacagaggtacctctccagcccaagtgggcctctccggcagagggcacccaacttcagcctggagcggacactggcagccgagatggcggttcctggctcagagtttgaggggcacaaacggatttctgaacagccccttcccaacaagacaatcagcccacccccagcccccgcccctgccgctgcgcctctaccctgtggaccaacagagaccatccccagcttcctgctcaccagggcagggcgagaccaggccatctgtgagctgcaagaagaggtgtcccggcttcgtctgcggctggaagacagcctgcaccagccactccagggcagcccgacacgcccagcatctgcctttgaccgccccgcccggacccgcggccggccagcagactccccagccacctggggctcccattatggcagtaaatccacagagagattgcctggtgagcctagaggtgaagagcagattgtccctccaggaaggcagcgagccaggtcttcctcagtgcctcgggaggtgctccgactgtccctgagttcagaatctgagctgccctccctaccactgttctctgagaagagcaagaccaccaaggacagtccacaggcagctcgggatggaaagagaggggtgggcagtgctggatggccagacagggtcaccttccggggccaatacacaggccacgaataccatgttctgtcccctaaggcggtcccaaaaggcaatggcacagtctcctgtccccactgccggcccattaggacccaggatgcgggtggtgctgtcacaggggacccactgggaccgcctcccgctgatacccttcagtgtcccctgtgtggtcaagttgggtctcccccagaggcagatggtccaggctcagccacctctggggcagagaaggccaccacgaggagaaaagcatcttcaactcccagccccaagcagaggagcaagcaggcggggtcgtcgccacgcccaccccccggactgtggtatctggcaacagcgcccccagcaccagcccctccagcctttgcctacatctcctcggttcccatcatgccttatccacctgccgctgtgtactatgcgcctgcaggacctacctcagcccaaccagctgccaagtggccgcccacagcctctcccccaccagcccggagacaccggcactccatccagctcgacctgggcgacctagaggagctcaacaaggccctgagccgggccgtgcaggctgccgagagcgtccgctctaccaccaggcagatgagaagctcgctgtcagccgacctgcgccaggctcacagcctgcggggctcctgcctcttctgacttcactgggggcccagaggcagatgggtgggtgggtgggcaggtggcctgccaggccaggagtgggctggagctgctgaggcccagaaggcccgcatagttcctcaccaggagggtctccctccagcacaggtcccgcctgctcagtccctgtgctttccaagtggagggggtgtcagctcggtcaccaagagaagtgacttcccaggagcaccagtcccctcacagaggtgctgtgagcgaggcctccttcggtccaggcagaacctcaggcagtctctcctggtcctgcatgtgtgcaactccagctaataataggtattttatatacagatggacagatatttttttaaactggggagttttcctgatcttgggtcctctttagggggccagacaagaaaggcctacggtttctggagcaaacctgtcccccacctgtgaccagtcactctggggcaagcatcactgggaagggcatagccggagacctttctcctagtgactggtagtcagtggggcattttaggatgtcagggccccagggtgacatgtgtccagcttttctatggcagcagaggcctttccctcagacaagctacaaagtgcccaggatgccatccaccatggtccccttcagtacctcacgcatggtccccagcttctcctaggatcccagtggcgtttatcagtggccagctacctgccaggcccgggctggggcacggtctgcggccatgaggccaggccgcctcccgcacccctaccccgtggcagcagcatacctctgcatttctggaatgtgtgtgcatcaatgatgtttgtatatttgaggcatttaaaaatctattttcgttacgagggcaaatgaagaatgaatattgatcttaaaaaaagaaaagaagacaaaaaaaatacccaaagcca

SEQ ID NO: 883 - DNA, 3894 bp, Homo sapiens
  source 1..3894: mol_type = unassigned DNA
gagagattgcctggtgagcctagaggtgaagagcagattgtccctccaggaaggcagcgagccaggtcttcctcagtgcctcgggaggtgctccgactgtccctgagttcagaatctgagctgccctccctaccactgttctctgagaagagcaagaccaccaaggacagtccacaggcagctcgggatggaaagagaggggtgggcagtgctggatggccagacagggtcaccttccggggccaatacacaggtaggtcaggagggagggccgggatgggtgcagctcctggtgtcagcgggggctcctctgttatgagaagccctttccatatacccagtgggccattcaaatatcattttctatcagttctgtgatatgaaaaccagcagggagcattgcctccatgaatctcggtgcacttgttcattcattcattcattcattcattcagcaaacactttctgatgcttcccctttgccagggcccatgcttggttctgggaagtctgttcagctggtcaatcctaaagaagttctgatcacctgtgcttttccggctcggagcatacagggtggacactgaattggatgtcccatttgcacctggcttccttcaggttctcatttccagagggcccctgtgtctcaggaaacaggacctggcacagagtaaagacttgagatgacacatggtagcatttcaagtgcttataacattaacacaaaaatatgggttgggtgtggtggctcacacctctaatcccagcactttgggaggccgaggtgggagaatcacctgagatcagtagttcaagaccagcctggccaatgtgacaaaaccccgtttctactaaacatgcaaaaaaaattagctgggtgtggtggcgggtgcctgtaatcccagctatttgggaggctgaggcacaagaatctcttgaacccaggaggcagaggttgcagtgagccaagatcatgccattgcactccagcctgggtgacagtgagactccgtctcaaaaatacataaatatatatatatatatatatatatggatatggttctcaccttcatgaatctgactgtagcagagaagatgataaccaataggtaattatagtaaaggcatcatctctcacagacaccttgcagaagagggagggctgctgacctcagattctggggacaaggcaagaggccagaggcacattctgctccatggaccataacgagggagtggacagaggccaaggagttagaaacgacagtagcaggaacacctccaagctcaccggacaatctctctgtggacttactagcaaaaggaaagagatgatatcattggatgaggttttctgtagcctttaaaggtgatcttaacccttaatagtgagcttaacctggagaaatgcttccaacacaatgagaggaagagagtatagaagtcaaaaccaaagactctgaagtcagtctcacagaaaatggctctgagcctctctgaccctcagattcctcatctgtcgcgtcgggaaaataagagcaattacgttcagctccacatacacaaagccagaacagcacaggagggaaatgagatgatgagaccgctccacagtggcttcaggtgtcacccagaaggccttatttgaaactcaggggtgggtaaggcaggaggtggtggggctgggtgaggaggccacagtccgcccagctttctcataacatcaactgctttccatctgccaggcactgggcggagcacgacacggatacggccccgttcagttctcccaacaagcctgtgaaatgggcgctatgtttatccccatgttacagccgctcagagcatggggagaaaacaccactgaccctgtgcccgagccattcagaaccaaaccagcaagtcggggtgtggggaatagcatcacttgttcatttcttattgttgctttgcttatcatttcttcctggcctgctttcaaatcctgacttagcctgggtgtgttggttgctactggatgtcagctggttctaggatctgagatgaaacagaataggagtctggagaaagcttacaataaacagacacaaagatgttcggtgacgtatatgtgtgtatgtgtgtcatacttaaatatgtacatattttacacatgatgtgtgtatgcacactcaccgtgtgcacacgtgagagagagacagagactattaaaaccatttggaggaagaggagatcattattccagaatcttcctctattttgcatccatccacagggctgatactgacagttctggtttctttccccaggccacgaataccatgttctgtcccctaaggcggtcccaaaaggcaatggcacagtctcctgtccccactgccggcccattaggacccaggatgcgggtggtgctgtcacaggggacccactgggaccgcctcccgctgatacccttcagtgtcccctgtgtggtcaagttgggtctcccccagaggcagatggtccaggctcagccacctctggggcagagaaggccaccacgaggagaaaagcatcttcaactcccagccccaagcagaggagcaagcaggcggggtcgtcgccacgcccaccccccggactgtggtatctggcaacagcgcccccagcaccagcccctccagcctttgcctacatctcctcggttcccatcatgccttatccacctgccgctgtgtactatgcgcctgcaggacctacctcagcccaaccagctgccaagtggccgcccacagcctctcccccaccagcccggagacaccggcactccatccagctcgacctgggcgacctagaggagctcaacaaggccctgagccgggccgtgcaggctgccgagagcgtccgctctaccaccaggcagatgagaagctcgctgtcagccgacctgcgccaggctcacagcctgcggggctcctgcctcttctgacttcactgggggcccagaggcagatgggtgggtgggtgggcaggtggcctgccaggccaggagtgggctggagctgctgaggcccagaaggcccgcatagttcctcaccaggagggtctccctccagcacaggtcccgcctgctcagtccctgtgctttccaagtggagggggtgtcagctcggtcaccaagagaagtgacttcccaggagcaccagtcccctcacagaggtgctgtgagcgaggcctccttcggtccaggcagaacctcaggcagtctctcctggtcctgcatgtgtgcaactccagctaataataggtattttatatacagatggacagatatttttttaaactggggagttttcctgatcttgggtcctctttagggggccagacaagaaaggcctacggtttctggagcaaacctgtcccccacctgtgaccagtcactctggggcaagcatcactgggaagggcatagccggagacctttctcctagtgactggtagtcagtggggcattttaggatgtcagggccccagggtgacatgtgtccagcttttctatggcagcagaggcctttccctcagacaagctacaaagtgcccaggatgccatccaccatggtccccttcagtacctcacgcatggtccccagcttctcctaggatcccagtggcgtttatcagtggccagctacctgccaggcccgggctggggcacggtctgcggccatgaggccaggccgcctcccgcacccctaccccgtggcagcagcatacctctgcatttctggaatgtgtgtgcatcaatgatgtttgtatatttgaggcatttaaaaatctattttcgttacgagggcaaatgaagaatgaatattgatcttaaaaaaagaaaagaagacaaaaaaaatacccaaa

SEQ ID NO: 884 - DNA, 4414 bp, Homo sapiens
  source 1..4414: mol_type = unassigned DNA
gagagaaacgaccagattcttctgccctcagcccaaggaacacatctggaagcagacaaagacgtcacctaagccactcccttcccgattcattggctccatcagccccctgaatccccagcccaggccaacgcggcagggcaggccgctgcccagacagggagccactctggctggccgctcctcttctaatgcccccaagtatggccgggggcagttgaactacccactccctgatttctccaaggtagggccccgggtgagattccccaaagatgagagctaccgtccccccaagtccagaagccacaacaggaagcctcaggcccctgccaggcccctcatcttcaagtctccagctgagattgtgcaggaggtgctgttgagcagtggagaagcagccctggcaaaggacacgcctcctgcccaccctatcaccagggtaccccaagaatttcagacgcctgagcaagccactgagctggtccatcagctccaggaagactaccacaggctcctcaccaagtacgctgaggccgagaacaccattgaccagctacgcctcggggccaaggtgaacctgttctctgacccaccccagcccaaccacagcatccacacgggaatggtgccccaggggaccaaggtcttgtccttcaccatcccacagccccgctctgcagagtggtggccgggcccggccgaggacccccaggcctctgcggcctcagcctgggggcagccctggccctgccacttggcatcttggtgaccctggggtggccatcagctcgaggagacttgagcccctcctcgcttaccagcatgcccaccctggggtggcttccggagaaccgggacatctctgaggaccagtcctcagcagagcagacccaggcactggcttctcaggccagccagttcctggccaaggtggagtcctttgaaagactgatacaggcaggacgtctcatgccccaggaccaagtcaagggcttccagcggctgaaggctgcccacgcggccctagaggaggagtacctgaaggcttgtcgggagcaacaccctgcccagccgcttgccggctccaaggggacgcctggaagatttgatcctcgcagggagctggaggcagagatataccgtctgggaagctgcctggaagagctgaaggaacacatagaccagacccagcaagagcctgagccgcccgggtcagactcagctctggacagcaccccagccctgccctgcctccatcagccaacgcacctgcctgctccttctggacaagcccccatgccagccatcaagacctcctgccctgagcctgctaccaccactgccgccgccagcactggcccctgcccattgcacgtaaatgtggaggtgagctctggcaacagtgaggtggaggacaggccacaggaccccctggcccgactcaggcacaaggagctgcagatggagcaagtttaccatggcctcatggagcggtacctcagtgtgaagtctctcccagaagccatgagaatggaggaggaggaagaaggagaggaggaggaggaggaagaggggggaggtgactccctggaagttgatggggtggctgcaactccagggaaagcagaggccaccagggtcctcccaaggcagtgcccggtgcaggctgagaaaagtcatggggctcccctggaggaggccacggagaagatggtatctatgaagccaccaggtttccaggcatccctggctagagacgggcacatgtcaggcctgggcaaggctgaggcagcccctccaggccctggcgtgccaccccaccctccaggcaccaagtccgcagcatcccaccaaagtagtatgaccagcctggagggaagcggcatctctgagcgccttccacagaagcctttgcaccgaggcggtgggccccacctggaggagacctggatggcgtccccagagacagacagtggctttgtgggctcagaaacaagcagagtttcacccctcacccagactccagagcaccggctctcccacatcagcacagcaggaacattagcccagccctttgctgcatctgtgcccagggatggagcttcctaccccaaggccaggggttctctgattcccagaagagccacagagcccagcacaccccggagccaagcacagaggtacctctccagcccaagtgggcctctccggcagagggcacccaacttcagcctggagcggacactggcagccgagatggcggttcctggctcagagtttgaggggcacaaacggatttctgaacagccccttcccaacaagacaatcagcccacccccagcccccgcccctgccgctgcgcctctaccctgtggaccaacagagaccatccccagcttcctgctcaccagggcagggcgagaccaggccatctgtgagctgcaagaagaggtgtcccggcttcgtctgcggctggaagacagcctgcaccagccactccagggcagcccgacacgcccagcatctgcctttgaccgccccgcccggacccgcggccggccagcagactccccagccacctggggctcccattatggcagtaaatccacagagagattgcctggtgagcctagaggtgaagagcagattgtccctccaggaaggcagcgagccaggtcttcctcagtgcctcgggaggtgctccgactgtccctgagttcagaatctgagctgccctccctaccactgttctctgagaagagcaagaccaccaaggacagtccacaggcagctcgggatggaaagagaggggtgggcagtgctggatggccagacagggtcaccttccggggccaatacacaggccacgaataccatgttctgtcccctaaggcggtcccaaaaggcaatggcacagtctcctgtccccactgccggcccattaggacccaggatgcgggtggtgctgtcacaggggacccactgggaccgcctcccgctgatacccttcagtgtcccctgtgtggtcaagttgggtctcccccagaggcagatggtccaggctcagccacctctggggcagagaaggccaccacgaggagaaaagcatcttcaactcccagccccaagcagaggagcaagcaggcggggtcgtcgccacgcccaccccccggactgtggtatctggcaacagcgcccccagcaccagcccctccagcctttgcctacatctcctcggttcccatcatgccttatccacctgccgctgtgtactatgcgcctgcaggacctacctcagcccaaccagctgccaagtggccgcccacagcctctcccccaccagcccggagacaccggcactccatccagctcgacctgggcgacctagaggagctcaacaaggccctgagccgggccgtgcaggctgccgagagcgtccgctctaccaccaggcagatgagaagctcgctgtcagccgacctgcgccaggctcacagcctgcggggctcctgcctcttctgacttcactgggggcccagaggcagatgggtgggtgggtgggcaggtggcctgccaggccaggagtgggctggagctgctgaggcccagaaggcccgcatagttcctcaccaggagggtctccctccagcacaggtcccgcctgctcagtccctgtgctttccaagtggagggggtgtcagctcggtcaccaagagaagtgacttcccaggagcaccagtcccctcacagaggtgctgtgagcgaggcctccttcggtccaggcagaacctcaggcagtctctcctggtcctgcatgtgtgcaactccagctaataataggtattttatatacagatggacagatatttttttaaactggggagttttcctgatcttgggtcctctttagggggccagacaagaaaggcctacggtttctggagcaaacctgtcccccacctgtgaccagtcactctggggcaagcatcactgggaagggcatagccggagacctttctcctagtgactggtagtcagtggggcattttaggatgtcagggccccagggtgacatgtgtccagcttttctatggcagcagaggcctttccctcagacaagctacaaagtgcccaggatgccatccaccatggtccccttcagtacctcacgcatggtccccagcttctcctaggatcccagtggcgtttatcagtggccagctacctgccaggcccgggctggggcacggtctgcggccatgaggccaggccgcctcccgcacccctaccccgtggcagcagcatacctctgcatttctggaatgtgtgtgcatcaatgatgtttgtatatttgaggcatttaaaaatctattttcgttacgagggcaaatgaagaatgaatattgatctt

SEQ ID NO: 885 - DNA, 5038 bp, Homo sapiens
  source 1..5038: mol_type = unassigned DNA
gtgatgaggaaatggaagccagagagttgaagtgacttagggtaagttacaaggtgggtgcagagctggtatatgctaagaagtgaatggcctgtctttccagaggctgaagcagaggatgtggacagcccagcaagttcccatgagcctcttgcctggctcccccagcagggccgtcagctggacatgactgaagaggagccagatgggaccctcggaagtctggaggttgaggaggctggagagagctcctcaaggttggggtatgaggctggtctcagcttggaaggccatggaaacaccagccccatggctcttgggcatggtcaggccaggggctgggtggcttctggcgaacaagccagtggggacaaactttctgaacattccgaggtcaacccatccgttgaactcagcccggcaaggtcctggagcagtgggacagtgagcctcgaccaccctagtgacagccttgattctacctgggaaggagagaccgatggcccccagcccactgccctggcagaaaccttgccagagggccccagccaccacctcctaagcccagatggcagaactggaggcagtgttgctcgggcaacccccatggaattccaggactcctcagctcccccagcccagagtccgcagcatgccacagatagatggaggagagaaacgaccagattcttctgccctcagcccaaggaacacatctggaagcagacaaagacgtcacctaagccactcccttcccgattcattggctccatcagccccctgaatccccagcccaggccaacgcggcagggcaggccgctgcccagacagggagccactctggctggccgctcctcttctaatgcccccaagtatggccgggggcagttgaactacccactccctgatttctccaaggtagggccccgggtgagattccccaaagatgagagctaccgtccccccaagtccagaagccacaacaggaagcctcaggcccctgccaggcccctcatcttcaagtctccagctgagattgtgcaggaggtgctgttgagcagtggagaagcagccctggcaaaggacacgcctcctgcccaccctatcaccagggtaccccaagaatttcagacgcctgagcaagccactgagctggtccatcagctccaggaagactaccacaggctcctcaccaagtacgctgaggccgagaacaccattgaccagctacgcctcggggccaaggtgaacctgttctctgacccaccccagcccaaccacagcatccacacgggaatggtgccccaggggaccaaggtcttgtccttcaccatcccacagccccgctctgcagagtggtggccgggcccggccgaggacccccaggcctctgcggcctcagggtggccatcagctcgaggagacttgagcccctcctcgcttaccagcatgcccaccctggggtggcttccggagaaccgggacatctctgaggaccagtcctcagcagagcagacccaggcactggcttctcaggccagccagttcctggccaaggtggagtcctttgaaagactgatacaggcaggacgtctcatgccccaggaccaagtcaagggcttccagcggctgaaggctgcccacgcggccctagaggaggagtacctgaaggcttgtcgggagcaacaccctgcccagccgcttgccggctccaaggggacgcctggaagatttgatcctcgcagggagctggaggcagagatataccgtctgggaagctgcctggaagagctgaaggaacacatagaccagacccagcaagagcctgagccgcccgggtcagactcagctctggacagcaccccagccctgccctgcctccatcagccaacgcacctgcctgctccttctggacaagcccccatgccagccatcaagacctcctgccctgagcctgctaccaccactgccgccgccagcactggcccctgcccattgcacgtaaatgtggaggtgagctctggcaacagtgaggtggaggacaggccacaggaccccctggcccgactcaggcacaaggagctgcagatggagcaagtttaccatggcctcatggagcggtacctcagtgtgaagtctctcccagaagccatgagaatggaggaggaggaagaaggagaggaggaggaggaggaagaggggggaggtgactccctggaagttgatggggtggctgcaactccagggaaagcagaggccaccagggtcctcccaaggcagtgcccggtgcaggctgagaaaagtcatggggctcccctggaggaggccacggagaagatggtatctatgaagccaccaggtttccaggcatccctggctagagacgggcacatgtcaggcctgggcaaggctgaggcagcccctccaggccctggcgtgccaccccaccctccaggcaccaagtccgcagcatcccaccaaagtagtatgaccagcctggagggaagcggcatctctgagcgccttccacagaagcctttgcaccgaggcggtgggccccacctggaggagacctggatggcgtccccagagacagacagtggctttgtgggctcagaaacaagcagagtttcacccctcacccagactccagagcaccggctctcccacatcagcacagcaggaacattagcccagccctttgctgcatctgtgcccagggatggagcttcctaccccaaggccaggggttctctgattcccagaagagccacagagcccagcacaccccggagccaagcacagaggtacctctccagcccaagtgggcctctccggcagagggcacccaacttcagcctggagcggacactggcagccgagatggcggttcctggctcagagtttgaggggcacaaacggatttctgaacagccccttcccaacaagacaatcagcccacccccagcccccgcccctgccgctgcgcctctaccctgtggaccaacagagaccatccccagcttcctgctcaccagggcagggcgagaccaggccatctgtgagctgcaagaagaggtgtcccggcttcgtctgcggctggaagacagcctgcaccagccactccagggcagcccgacacgcccagcatctgcctttgaccgccccgcccggacccgcggccggccagcagactccccagccacctggggctcccattatggcagtaaatccacagagagattgcctggtgagcctagaggtgaagagcagattgtccctccaggaaggcagcgagccaggtcttcctcagtgcctcgggaggtgctccgactgtccctgagttcagaatctgagctgccctccctaccactgttctctgagaagagcaagaccaccaaggacagtccacaggcagctcgggatggaaagagaggggtgggcagtgctggatggccagacagggtcaccttccggggccaatacacaggccacgaataccatgttctgtcccctaaggcggtcccaaaaggcaatggcacagtctcctgtccccactgccggcccattaggacccaggatgcgggtggtgctgtcacaggggacccactgggaccgcctcccgctgatacccttcagtgtcccctgtgtggtcaagttgggtctcccccagaggcagatggtccaggctcagccacctctggggcagagaaggccaccacgaggagaaaagcatcttcaactcccagccccaagcagaggagcaagcaggcggggtcgtcgccacgcccaccccccggactgtggtatctggcaacagcgcccccagcaccagcccctccagcctttgcctacatctcctcggttcccatcatgccttatccacctgccgctgtgtactatgcgcctgcaggacctacctcagcccaaccagctgccaagtggccgcccacagcctctcccccaccagcccggagacaccggcactccatccagctcgacctgggcgacctagaggagctcaacaaggccctgagccgggccgtgcaggctgccgagagcgtccgctctaccaccaggcagatgagaagctcgctgtcagccgacctgcgccaggctcacagcctgcggggctcctgcctcttctgacttcactgggggcccagaggcagatgggtgggtgggtgggcaggtggcctgccaggccaggagtgggctggagctgctgaggcccagaaggcccgcatagttcctcaccaggagggtctccctccagcacaggtcccgcctgctcagtccctgtgctttccaagtggagggggtgtcagctcggtcaccaagagaagtgacttcccaggagcaccagtcccctcacagaggtgctgtgagcgaggcctccttcggtccaggcagaacctcaggcagtctctcctggtcctgcatgtgtgcaactccagctaataataggtattttatatacagatggacagatatttttttaaactggggagttttcctgatcttgggtcctctttagggggccagacaagaaaggcctacggtttctggagcaaacctgtcccccacctgtgaccagtcactctggggcaagcatcactgggaagggcatagccggagacctttctcctagtgactggtagtcagtggggcattttaggatgtcagggccccagggtgacatgtgtccagcttttctatggcagcagaggcctttccctcagacaagctacaaagtgcccaggatgccatccaccatggtccccttcagtacctcacgcatggtccccagcttctcctaggatcccagtggcgtttatcagtggccagctacctgccaggcccgggctggggcacggtctgcggccatgaggccaggccgcctcccgcacccctaccccgtggcagcagcatacctctgcatttctggaatgtgtgtgcatcaatgatgtttgtatatttgaggcatttaaaaatctattttcgttacgagggcaaatgaagaatgaatattgatctt

SEQ ID NO: 886 - DNA, 241 bp, Homo sapiens
  source 1..241: mol_type = unassigned DNA
ctggggcacagccaggaagaggcctccactccttctgacacagtcatctgagcgctcatgtctgctggaggcggcaccaggggatactcacccaggagtccaggggccaccagccaggccatctgtgagctgcaagaagaggtgtcccggcttcgtctgcggctggaagacagcctgcaccagccactccagggcagcccgacacgcccagcatctgcctttgaccgccccgcccggaccc

SEQ ID NO: 887 - DNA, 535 bp, Homo sapiens
  source 1..535: mol_type = unassigned DNA
agtgccttgccctaggtcacacagctagaaggtggcagaaccaggctgggcagccagggatgtctgactccagagcttgtgccctgggctgcttggctcccaggacaggccaacccctgcgtcagggctgcctggcagaactcaaggatggtcttctcttcccatgccagggaggccacggagaagatggtatctatgaagccaccaggtttccaggcatccctggctagagacgggcacatgtcaggcctgggcaaggctgaggcagcccctccaggccctggcgtgccaccccaccctccaggcaccaagtccgcagcatcccaccaaagtagtatgaccagcctggagggaagcggcatctctgagcgccttccacagaagcctttgcaccgaggcggtgggccccacctggaggagacctggatggcgtccccagagacagacagtggctttgtgggctcagaaacaagcagagtttcacccctcacccagactccagagcaccggctctcccacatcagcacagcaggaa

SEQ ID NO: 888 - DNA, 3334 bp, Homo sapiens
  source 1..3334: mol_type = unassigned DNA
ggctgggcgcttcctgccgaggcgaggcggcctcaaccacggcaggggcggggagaggtggggagcgatgctggtctgtgagcagcagcttgggctggcagaacggcctggaggtgggccagggcgcaatggagacagggggctccctgggtttggaacaaagaattcacaggcaggtcccctgaaactgggtcggcaggacggtggtggagcccgagagagggcacaggcaggatggccgatgctgacaggaaccagcggtgactctggggcccctggcagcagctctgtctcctgaagatgaagtggcccaggtgaagcccaggccagccccaatggccagctcggagactgagatccgctgggctgagcctggcctggggaagggcccccagcggcggcgctgggcctgggccgaggacaagagggatgtggatagaagtagttcacaaagctgggaagaagagagactctttcccaatgccaccagccccgagctcctagaggacttccgcctggcccagcagcacctgccgcccctggagtgggacccacacccgcagcccgatgggcatcaggattccgagtcaggagagacttcgggagaagaggctgaagcagaggatgtggacagcccagcaagttcccatgagcctcttgcctggctcccccagcagggccgtcagctggacatgactgaagaggagccagatgggaccctcggaagtctggaggttgaggaggctggagagagctcctcaaggttggggtatgaggctggtctcagcttggaaggccatggaaacaccagccccatggctcttgggcatggtcaggccaggggctgggtggcttctggcgaacaagccagtggggacaaactttctgaacattccgaggtcaacccatccgttgaactcagcccggcaaggtcctggagcagtgggacagtgagcctcgaccaccctagtgacagccttgattctacctgggaaggagagaccgatggcccccagcccactgccctggcagaaaccttgccagagggccccagccaccacctcctaagcccagatggcagaactggaggcagtgttgctcgggcaacccccatggaattccaggactcctcagctcccccagcccagagtccgcagcatgccacagatagatggaggagagaaacgaccagattcttctgccctcagcccaaggaacacatctggaagcagacaaagacgtcacctaagccactcccttcccgattcattggctccatcagccccctgaatccccagcccaggccaacgcggcagggcaggccgctgcccagacagggagccactctggctggccgctcctcttctaatgcccccaagtatggccgggggcagttgaactacccactccctgatttctccaaggtagggccccgggtgagattccccaaagatgagagctaccgtccccccaagtccagaagccacaacaggaagcctcaggcccctgccaggcccctcatcttcaagtctccagctgagattgtgcaggaggtgctgttgagcagtggagaagcagccctggcaaaggacacgcctcctgcccaccctatcaccagggtaccccaagaatttcagacgcctgagcaagccactgagctggtccatcagctccaggaagactaccacaggctcctcaccaagtacgctgaggccgagaacaccattgaccagctacgcctcggggccaaggtgaacctgttctctgacccaccccagcccaaccacagcatccacacgggaatggtgccccaggggaccaaggtcttgtccttcaccatcccacagccccgctctgcagagtggtggccgggcccggccgaggacccccaggcctctgcggcctcagggtggccatcagctcgaggagacttgagcccctcctcgcttaccagcatgcccaccctggggtggcttccggagaaccgggacatctctgaggaccagtcctcagcagagcagacccaggcactggcttctcaggccagccagttcctggccaaggtggagtcctttgaaagactgatacaggcaggacgtctcatgccccaggaccaagtcaagggcttccagcggctgaaggctgcccacgcggccctagaggaggagtacctgaaggcttgtcgggagcaacaccctgcccagccgcttgccggctccaaggggacgcctggaagatttgatcctcgcagggagctggaggcagagatataccgtctgggaagctgcctggaagagctgaaggaacacatagaccagacccagcaagagcctgagccgcccgggtcagactcagctctggacagcaccccagccctgccctgcctccatcagccaacgcacctgcctgctccttctggacaagcccccatgccagccatcaagacctcctgccctgagcctgctaccaccactgccgccgccagcactggcccctgcccattgcacgtaaatgtggaggtgagctctggcaacagtgaggtggaggacaggccacaggaccccctggcccgactcaggcacaaggagctgcagatggagcaagtttaccatggcctcatggagcggtacctcagtgtgaagtctctcccagaagccatgagaatggaggaggaggaagaaggagaggaggaggaggaggaagaggggggaggtgactccctggaagttgatggggtggctgcaactccagggaaagcagaggccaccagggtcctcccaaggcagtgcccggtgcaggctgagaaaagtcatggggctcccctggagtaagtcactgagcctttcctgcagaatgtttgtttccaccctaaaaccacagggatgatcactgtcagagtgaataagacagcgcttcacagtttagacatggcttacctgtcctgcctcttcaagtgtggaatgtataccactgatagcccttgaaatgattttgggtagtgtgggacatgattttcagtaggacacatgcagtattaaagaacattattctcagctgggcacagtggctcatgcctgtaatcccagcattgagggaggccaaggcaggtggatcacttgagtccaggagttcaagactagcctgagcaaaacggcaaagccccatctcaacaagaaatacaaaaattagccaggcatggtggtacacgcctatagccctagctatttgggaggctgaagcaggtgaatctcttgagcccaggaggcggaggttgcagtgagctgagatcgggccactgcactccagcctgggtgatagtgtgagaccctgtctc

SEQ ID NO: 889 - DNA, 7380 bp, Homo sapiens
  source 1..7380: mol_type = unassigned DNA
gcaactgaagacggaggtgcccaaggtcagaaggaagcaccacacagagggcacaggcaggatggccgatgctgacaggaaccagcggtgactctggggcccctggcagcagctctgtctcctgaagatgaagtggcccaggtgaagcccaggccagccccaatggccagctcggagactgagatccgctgggctgagcctggcctggggaagggcccccagcggcggcgctgggcctgggccgaggacaagagggatgtggatagaagtagttcacaaagctgggaagaagagagactctttcccaatgccaccagccccgagctcctagaggacttccgcctggcccagcagcacctgccgcccctggagtgggacccacacccgcagcccgatgggcatcaggattccgagtcaggagagacttcgggagaagaggctgaagcagaggatgtggacagcccagcaagttcccatgagcctcttgcctggctcccccagcagggccgtcagctggacatgactgaagaggagccagatgggaccctcggaagtctggaggttgaggaggctggagagagctcctcaaggttggggtatgaggctggtctcagcttggaaggccatggaaacaccagccccatggctcttgggcatggtcaggccaggggctgggtggcttctggcgaacaagccagtggggacaaactttctgaacattccgaggtcaacccatccgttgaactcagcccggcaaggtcctggagcagtgggacagtgagcctcgaccaccctagtgacagccttgattctacctgggaaggagagaccgatggcccccagcccactgccctggcagaaaccttgccagagggccccagccaccacctcctaagcccagatggcagaactggaggcagtgttgctcgggcaacccccatggaattccaggactcctcagctcccccagcccagagtccgcagcatgccacagatagatggaggagagaaacgaccagattcttctgccctcagcccaaggaacacatctggaagcagacaaagacgtcacctaagccactcccttcccgattcattggctccatcagccccctgaatccccagcccaggccaacgcggcagggcaggccgctgcccagacagggagccactctggctggccgctcctcttctaatgcccccaagtatggccgggggcagttgaactacccactccctgatttctccaaggtagggccccgggtgagattccccaaagatgagagctaccgtccccccaagtccagaagccacaacaggaagcctcaggcccctgccaggcccctcatcttcaagtctccagctgagattgtgcaggaggtgctgttgagcagtggagaagcagccctggcaaaggacacgcctcctgcccaccctatcaccagggtaccccaagaatttcagacgcctgagcaagccactgagctggtccatcagctccaggaagactaccacaggctcctcaccaagtacgctgaggccgagaacaccattgaccagctacgcctcggggccaaggtgaacctgttctctgacccaccccagcccaaccacagcatccacacgggaatggtgccccaggggaccaaggtcttgtccttcaccatcccacagccccgctctgcagagtggtggccgggcccggccgaggacccccaggcctctgcggcctcagggtggccatcagctcgaggagacttgagcccctcctcgcttaccagcatgcccaccctggggtggcttccggagaaccgggacatctctgaggaccagtcctcagcagagcagacccaggcactggcttctcaggccagccagttcctggccaaggtggagtcctttgaaagactgatacaggcaggacgtctcatgccccaggaccaagtcaagggcttccagcggctgaaggctgcccacgcggccctagaggaggagtacctgaaggcttgtcgggagcaacaccctgcccagccgcttgccggctccaaggggacgcctggaagatttgatcctcgcagggagctggaggcagagatataccgtctgggaagctgcctggaagagctgaaggaacacatagaccagacccagcaagagcctgagccgcccgggtcagactcagctctggacagcaccccagccctgccctgcctccatcagccaacgcacctgcctgctccttctggacaagcccccatgccagccatcaagacctcctgccctgagcctgctaccaccactgccgccgccagcactggcccctgcccattgcacgtaaatgtggaggtgagctctggcaacagtgaggtggaggacaggccacaggaccccctggcccgactcaggcacaaggagctgcagatggagcaagtttaccatggcctcatggagcggtacctcagtgtgaagtctctcccagaagccatgagaatggaggaggaggaagaaggagaggaggaggaggaggaagaggggggaggtgactccctggaagttgatggggtggctgcaactccagggaaagcagaggccaccagggtcctcccaaggcagtgcccggtgcaggctgagaaaagtcatggggctcccctggaggaggccacggagaagatggtatctatgaagccaccaggtttccaggcatccctggctagagacgggcacatgtcaggcctgggcaaggctgaggcagcccctccaggccctggcgtgccaccccaccctccaggcaccaagtccgcagcatcccaccaaagtagtatgaccagcctggagggaagcggcatctctgagcgccttccacagaagcctttgcaccgaggcggtgggccccacctggaggagacctggatggcgtccccagagacagacagtggctttgtgggctcagaaacaagcagagtttcacccctcacccagactccagagcaccggctctcccacatcagcacagcaggaacattagcccagccctttgctgcatctgtgcccagggatggagcttcctaccccaaggccaggggttctctgattcccagaagagccacagagcccagcacaccccggagccaagcacagaggtacctctccagcccaagtgggcctctccggcagagggcacccaacttcagcctggagcggacactggcagccgagatggcggttcctggctcagagtttgaggggcacaaacggatttctgaacagccccttcccaacaagacaatcagcccacccccagcccccgcccctgccgctgcgcctctaccctgtggaccaacagagaccatccccagcttcctgctcaccagggcagggcgagaccaggccatctgtgagctgcaagaagaggtgtcccggcttcgtctgcggctggaagacagcctgcaccagccactccagggcagcccgacacgcccagcatctgcctttgaccgccccgcccggacccgcggccggccagcagactccccagccacctggggctcccattatggcagtaaatccacagagagattgcctggtgagcctagaggtgaagagcagattgtccctccaggaaggcagcgagccaggtcttcctcagtgcctcgggaggtgctccgactgtccctgagttcagaatctgagctgccctccctaccactgttctctgagaagagcaagaccaccaaggacagtccacaggcagctcgggatggaaagagaggggtgggcagtgctggatggccagacagggtcaccttccggggccaatacacaggccacgaataccatgttctgtcccctaaggcggtcccaaaaggcaatggcacagtctcctgtccccactgccggcccattaggacccaggatgcgggtggtgctgtcacaggggacccactgggaccgcctcccgctgatacccttcagtgtcccctgtgtggtcaagttgggtctcccccagaggcagatggtccaggctcagccacctctggggcagagaaggccaccacgaggagaaaagcatcttcaactcccagccccaagcagaggagcaagcaggcggggtcgtcgccacgcccaccccccggactgtggtatctggcaacagcgcccccagcaccagcccctccagcctttgcctacatctcctcggttcccatcatgccttatccacctgccgctgtgtactatgcgcctgcaggacctacctcagcccaaccagctgccaagtggccgcccacagcctctcccccaccagcccggagacaccggcactccatccagctcgacctgggcgacctagaggagctcaacaaggccctgagccgggccgtgcaggctgccgagagcgtccgctctaccaccaggcagatgagaagctcgctgtcagccgacctgcgccaggctcacagcctgcggggctcctgcctcttctgacttcactgggggcccagaggcagatgggtgggtgggtgggcaggtggcctgccaggccaggagtgggctggagctgctgaggcccagaaggcccgcatagttcctcaccaggagggtctccctccagcacaggtcccgcctgctcagtccctgtgctttccaagtggagggggtgtcagctcggtcaccaagagaagtgacttcccaggagcaccagtcccctcacagaggtgctgtgagcgaggcctccttcggtccaggcagaacctcaggcagtctctcctggtcctgcatgtgtgcaactccagctaataataggtattttatatacagatggacagatatttttttaaactggggagttttcctgatcttgggtcctctttagggggccagacaagaaaggcctacggtttctggagcaaacctgtcccccacctgtgaccagtcactctggggcaagcatcactgggaagggcatagccggagacctttctcctagtgactggtagtcagtggggcattttaggatgtcagggccccagggtgacatgtgtccagcttttctatggcagcagaggcctttccctcagacaagctacaaagtgcccaggatgccatccaccatggtccccttcagtacctcacgcatggtccccagcttctcctaggatcccagtggcgtttatcagtggccagctacctgccaggcccgggctggggcacggtctgcggccatgaggccaggccgcctcccgcacccctaccccgtggcagcagcatacctctgcatttctggaatgtgtgtgcatcaatgatgtttgtatatttgaggcatttaaaaatctattttcgttacgagggcaaatgaagaatgaatattgatcttaaaaaaagaaaagaagacaaaaaaaatacccaaagccatccgtgtctctgctgtatgtcattaacttttgccttcaatgtcaagtttatggggtggtaggtttgatgcccagccaagccctttcccaggggacctgttgggtgctctgcctgcctccctctggtggcttctgtttctccagttttccccctttgcctatctcagaaccataaatctttcaactgcggagggccttgaggtggggctgcctagccaagtcccttttgactgaggccagagatgtaaatgaggcacacagcaagttgctgtctacaagagtatgcacctggactctccagtgctcctttctttcttttttttttcttttttctttttctttttttttttttttttgagactgagttttgctctggttgcccaggctggggtacagtggtggaatctcggctcactgcaacctccgcctcccgggttcaagtgattctcttgcctcagcctcccgagtagctgggattacaggcatgcaccaccacgtctggctaattttgtatttttagtagagacagggtttctccatgttggtcgggctgatcttgcactcccagcctcaggtgatccacccacctcagcctcccaaattgctgggattacaggcgtgagccatggcgcccagccttccagtactttcagtagcaaacagcacctgccatttagggagcacctgctagaccctgattccggtgctaagcactgggcattgtctgcttcacacagtccatgtgctaaccctcaggaccctcactctgccccccttttactgatgaggagagtggggttccaatgggccatctgcccaaactggtttgggagagaacctggatttaaactcacattggtctgacccaaagtccacattctttgttatgtgtgttttttgcttcctctacctccatgattctttttctcttgacctctggtttcttcctcacgtggctttttcttccatgttccccacttctcgtctcccttgcttctccctgctctgcccatcatgactcatttctgtttcatttttcagcggatcctcctgagtatggttgaaaatggtgtctcactgaaagtaacactgaaatggacaaacttcctgtaggttctgagccttcagttccaggacattgtgggaccccagaggctgtcctgtccacttgccttctgaggacatcagctcggtgtccccagcctccgtgctgtgggcacagctgtggtttgggtgctgagcaaaggatgctgtagtcttggccctgtggagcttggctgttgggacaggaggtacaaaggggagtggtgcctgtggacacaggactagaccccaggacatcagggcctcgggctcatggtcctatcaccctggatggtatacgcagctgcacacgtggaattgctcaaacaattcaggcccaacttttctgccacggaaggggtgctgcttccctcacgtaacaagaggctgtcaatcacgagcacccaggttggggtgaggccggccctttgtggcttgtgccactgagtgggctgtgcctcgggcttggctccacctcagggctccacatttgcaggatgtcagctgatttccagggaccagcctcacccttacgtgttatctccttcttctgggtctcccaggtgagcaccctaagaacacatccatggagacacccagcccctctggcctgggccccaagccctctgcatcaccccagcccttccctgccctgccctgtcctggcccaggcaaccgcctcttgcctagttgcccacagcagccttcactcaggccttcctgcctccagcctggtccccacaacgtgcctcccccgatggccatggtaatactggaataaggtccttgtgataggcaccacatgcctgaactctccccaccccatccaccttgtatttgtctgttctcacattgctataaagaactacctgagactgggtagtttatg

SEQ ID NO: 890 - DNA, 2138 bp, Homo sapiens
  source 1..2138: mol_type = unassigned DNA
ctggggcacagccaggaagaggcctccactccttctgacacagtcatctgagcgctcatgtctgctggaggcggcaccaggggatactcacccaggagtccaggggccaccagccaggccatctgtgagctgcaagaagaggtgtcccggcttcgtctgcggctggaagacagcctgcaccagccactccagggcagcccgacacgcccagcatctgcctttgaccgccccgcccggacccgcggccggccagcagactccccagccacctggggctcccattatggcagtaaatccacagagagattgcctggtgagcctagaggtgaagagcagattgtccctccaggaaggcagcgagccaggtcttcctcagtgcctcgggaggtgctccgactgtccctgagttcagaatctgagctgccctccctaccactgttctctgagaagagcaagaccaccaaggacagtccacaggcagctcgggatggaaagagaggggtgggcagtgctggatggccagacagggtcaccttccggggccaatacacaggccacgaataccatgttctgtcccctaaggcggtcccaaaaggcaatggcacagtctcctgtccccactgccggcccattaggacccaggatgcgggtggtgctgtcacaggggacccactgggaccgcctcccgctgatacccttcagtgtcccctgtgtggtcaagttgggtctcccccagaggcagatggtccaggctcagccacctctggggcagagaaggccaccacgaggagaaaagcatcttcaactcccagccccaagcagaggagcaagcaggcggggtcgtcgccacgcccaccccccggactgtggtatctggcaacagcgcccccagcaccagcccctccagcctttgcctacatctcctcggttcccatcatgccttatccacctgccgctgtgtactatgcgcctgcaggacctacctcagcccaaccagctgccaagtggccgcccacagcctctcccccaccagcccggagacaccggcactccatccagctcgacctgggcgacctagaggagctcaacaaggccctgagccgggccgtgcaggctgccgagagcgtccgctctaccaccaggcagatgagaagctcgctgtcagccgacctgcgccaggctcacagcctgcggggctcctgcctcttctgacttcactgggggcccagaggcagatgggtgggtgggtgggcaggtggcctgccaggccaggagtgggctggagctgctgaggcccagaaggcccgcatagttcctcaccaggagggtctccctccagcacaggtcccgcctgctcagtccctgtgctttccaagtggagggggtgtcagctcggtcaccaagagaagtgacttcccaggagcaccagtcccctcacagaggtgctgtgagcgaggcctccttcggtccaggcagaacctcaggcagtctctcctggtcctgcatgtgtgcaactccagctaataataggtattttatatacagatggacagatatttttttaaactggggagttttcctgatcttgggtcctctttagggggccagacaagaaaggcctacggtttctggagcaaacctgtcccccacctgtgaccagtcactctggggcaagcatcactgggaagggcatagccggagacctttctcctagtgactggtagtcagtggggcattttaggatgtcagggccccagggtgacatgtgtccagcttttctatggcagcagaggcctttccctcagacaagctacaaagtgcccaggatgccatccaccatggtccccttcagtacctcacgcatggtccccagcttctcctaggatcccagtggcgtttatcagtggccagctacctgccaggcccgggctggggcacggtctgcggccatgaggccaggccgcctcccgcacccctaccccgtggcagcagcatacctctgcatttctggaatgtgtgtgcatcaatgatgtttgtatatttgaggcatttaaaaatctattttcgttacgagggcaaatgaagaatgaatattgatcttaaaaaaagaaaagaagacaaaaaaaatacccaaagcc

SEQ ID NO: 891 - DNA, 2637 bp, Homo sapiens
  source 1..2637: mol_type = unassigned DNA
ttttcttaggtaagaaacggttgaactggatgcaatttttatcacagcttgtgtaagactgcctctgtccctcctctcacatgccattggttaaccagcagacagtgtgctcaggggcgttgccagctcattgctcttatagcctgtgagggaggaagaaagaaacatttgccagccaggctagtgacagaaatggattcgaaatatcagtgtgtgaagctgaatgatggtcacttcatgcctgtcctgggatttggcacctatgcgcctgcagaggttcctaaaagtaaagctttagaggccaccaaattggcaattgaagctggcttccgccatattgattctgctcatttatacaataatgaggagcaggttggactggccatccgaagcaagattgcagatggcagtgtgaagagagaagacatattctacacttcaaagctttggtgcaattcccatcgaccagagttggtccgaccagccttggaaaggtcactgaaaaatcttcaattggattatgttgacctctaccttattcattttccagtgtctgtaaaggtaggcagcttgtgtgatcaaattaatttcacttttgttctcagcataaatattgtttttatggatatttgaactaagcattttcttaggaggacatagggattataacatagaagaagaatcctaaatctaactcctaattcctttctatgggatacattttgaatccatacttccgtgattgcatgtctataagaaaagaaagtgcagaactctcaaagcctctgcctcaaaaacttgaggaaatgatagtcatctccttgaaggcacaaggtcttagttatgattcctgatttcacctcttgggatgttcacagacacagagtttcatgaagctgtggtgtccagaaaacctgctgcacatagggtgcacaatgagtttccatcttcttgcctctttttaaggggcgagaactcagtccgggagtgtcttaaactacagaccttcatgggaaaccttgttgcttctgcttcctctcttttcacactggaggttttatttttgcttagccatgaattcttgggtcattcataacttttgtcttaaggtactgaaaactagtcaggctagttaatgcaaaagggtatattagatatgataatgggaaatcaaagccagggctacattaagaatttgataaaaactctaaaaatatatcctttctccacccttatctctgctttattacaaaaggctttttaagtatttgttccaacctttttcgttggtggcatttatggctttggagcactgtcaggcccatgttcattaccgtgagctcctgtgcatctcctaatttccaaactagccttgaaaacacctccattgaccatgattggttcatggtcctgtgcatggaacatcatatgttcagggagataaagaactctgatagtggcacctgggtaaaaagtacaatccattatatctggatatcaagatcttttgcagttgaagagaggtattgccacagagaaaattataggagcagaagaaagtcaatgaaagtcaatgatgacactccattaggaaccagaaagaggtatttatttatacatgtaatagttgtaagagattagagggagcctgtcacctgaagacattccttataccttcatatgtagtacactctgtacataccactctctggagcactgcatcacctacctcatggaggattagtgtccttaaatgtacctcagagcatggctatgtgtggagaaattgacttgtgacatcactaaactgactgcttctacttcagccaggtgaggaagtgatcccaaaagatgaaaatggaaaaatactatttgacacagtggatctctgtgccacatgggaggccgtggagaagtgtaaagatgcaggattggccaagtccatcggggtgtccaacttcaaccgcaggcagctggagatgatcctcaacaagccagggctcaagtacaagcctgtctgcaaccaggtggaatgtcatccttacttcaaccagagaaaactgctggatttctgcaagtcaaaagacattgttctggttgcctatagtgctctgggatcccaccgagaagaaccatgggtggacccgaactccccggtgctcttggaggacccagtcctttgtgccttggcaaaaaagcacaagcgaaccccagccctgattgccctgcgctaccagctacagcgtggggttgtggtcctggccaagagctacaatgagcagcgcatcagacagaacgtgcaggtgtttgaattccagttgacttcagaggagatgaaagccatagatggcctaaacagaaatgtgcgatatttgacccttgatatttttgctggcccccctaattatccattttctgatgaatattaacatggagggcattgcatgaggtctgccagaaggccctgcgtgtggatggtgacacagaggatggctctatgctggtgactggacacatcgcctctggttaaatctctcctgcttggtgatttcagcaagctacagcaaagcccattggccagaaaggaaagacaataattttgttttttcattttgaaaaaattaaatgctctctcct

SEQ ID NO: 892 - DNA, 6705 bp, Homo sapiens
  source 1..6705: mol_type = unassigned DNA
ttttcttaggtaagaaacggttgaactggatgcaatttttatcacagcttgtgtaagactgcctctgtccctcctctcacatgccattggttaaccagcagacagtgtgctcaggggcgttgccagctcattgctcttatagcctgtgagggaggaagaaagaaacatttgccagccaggctagtgacagaaatggattcgaaatatcagtgtgtgaagctgaatgatggtcacttcatgcctgtcctgggatttggcacctatgcgcctgcagaggttcctaaaagtaaagctttagaggccaccaaattggcaattgaagctggcttccgccatattgattctgctcatttatacaataatgaggagcaggttggactggccatccgaagcaagattgcagatggcagtgtgaagagagaagacatattctacacttcaaagctttggtgcaattcccatcgaccagagttggtccgaccagccttggaaaggtcactgaaaaatcttcaattggattatgttgacctctaccttattcattttccagtgtctgtaaagccaggtgaggaagtgatcccaaaagatgaaaatggaaaaatactatttgacacagtggatctctgtgccacatgggaggccgtggagaagtgtaaagatgcaggattggccaagtccatcggggtgtccaacttcaaccgcaggcagctggagatgatcctcaacaagccagggctcaagtacaagcctgtctgcaaccaggtggaatgtcatccttacttcaaccagagaaaactgctggatttctgcaagtcaaaagacattgttctggttgcctatagtgctctgggatcccaccgagaagaaccatgggtggacccgaactccccggtgctcttggaggacccagtcctttgtgccttggcaaaaaagcacaagcgaaccccagccctgattgccctgcgctaccagctacagcgtggggttgtggtcctggccaagagctacaatgagcagcgcatcagacagaacgtgcaggtgtttgaattccagttgacttcagaggagatgaaagccatagatggcctaaacagaaatgtgcgatatttgacccttgatatttttgctggcccccctaattatccattttctgatgaatattaacatggagggcattgcatgaggtctgccagaaggccctgcgtgtggatggtgacacagaggatggctctatgctggtgactggacacatcgcctctggttaaatctctcctgcttggtgatttcagcaagctacagcaaagcccattggccagaaaggaaagacaataattttgttttttcattttgaaaaaattaaatgctctctcctaaagattcttcacctactttggtctccataacttctatgttttctttccttctgacacactagtgcccctaaattgtgatttgcctatacgtttagggccggggttggaagatgttaacaaccatttaagattcatttctgcagtgggagtgggtggagtttcaccctctgggaaaggggcaggtgacaggtatttatcagtcagtgcctctctagctcttgtaggaagaagcacacgcaggatggagtctagaggatgagcgatattgactagcaattcatgggctccctccagcagtgcgagggtcagagtttctggagccttgggaggaggcatccctgtgagggggggttagggagatgggagggcaccaggaaaagtgattagaagtcaggtatgggaaggctaaataggacagagtcgagtacatctctgcttggaaaaacatatcaacacccttttttttgaacattatatcttgctcataaaagaaaactttccacattgttttaacaaaccccacagctgagagtcaggcctgaatctttgatgtgtgcccattcacaacgttgaccctattggtttgtggtggggcagggcatcaaagacatcattgactaatcacattcccctgaatagctcatatttagaaaatattcttagattctaaaaatgtactattaatttgtgatattcagtcttttaaatattttatacattaaacaggcatagttacaaatataaaacaaaaatatcccaaagccattatgcatggcactcaagattaaaatgggaaataatacatctaataaatcaaatgttccaagacttcaaaggtcttttggaaacaggctatgtaaaacagcacactggtttcaaactttggtaaattttaagaacaactcttacaaaggcatttaattcttatacataattttcaggggacctaagttaatcagctaatcatgaagacatgattttcattttagaaaacacttttgaaaacttgggataatctcatgccttaatgatcaaagcattatgagaaggacagtggtttttaacctgggcatatgttctaacacatttactctccactattcgtactctggtagccatgttaaccccatcagagattccttctcaagccatgtctcagagctgagaggcatcccagcaagttttgcagctcacagttttttccgtaaattacttattctataaaattggagtaggccataaactttggagggccctagaccaattttttggattatttttcgtcttctatcattccgctgatcttagatattctctgcattaaatattaaatatcacttctaggctgaaaaatccccctaaaaatatttctagctcagatttttcctccaaattctgcaatagaagatcacaatgtgaactctgcatctccatgttaaagtctaatggacattcacacttagcatgtctcaaagaaatctcatgtaaaccatggccatcctgttctaccttaactttctgagtctatggaatgataatttcacatctcataaacttgactgatgtaagtgtcaagaaaagattgacattttgttaaaagttagtagtgaagtgtgtaacgcttaagcaaactttcatatttcaaatctctttagcaagtgtaactcttttttcaagatgtgaaataatcattaggtcagtcatttgtaaatagtacatctgctatggactttttccagttcttcaccatccatttttataaaactcttattgttaaaaaaaaagttactcagaatttcataaagccaaacacctgatttcaggaacacttgagatgtaagaaaattttatagggacctccaatcactaattttcctattttttctctcaaagaaatgctgaagggaggaattcaggttgaatgaaaggaaatagtaacttacagccatatagagttataaagacttcttgtaaatgtgaacatatggtaaaatataaaaacatgtatttttgaaattttggattctactcattattttacttcaatttaagatataaatgtatagaaataagtataattctaagctaatacgtatgcaatgtaggaagctgtaattactgaccaaaactatgtgaagtggagaaaacctggggaagtggatggttttagatgaaactgaagttaaattcatattgatttaaagtaaattgttataactttataaagtttttcatcatcaccacagcaatcacaaagagaataattatgaatatacgcaagaggaaatgagaagggaatccaaatgtcattaaaaaaaaatcacgccacctcacaaaatggtaacagtggatataaaggatagaaagctataaacctggtaggaaaacattgaaaatggcacaagtgactccttccctgtcaccaatgacagtcatgtgttgcataatgcctgggctatcttctgagaatggctttgttaggcaactgtgtcatggtggggacatgatagcattagagagaattctctcaaacactgtcatggccttatcaactatgcttctgtaatattctgaatccttcgctgcctttccaacagtgtttacaacggtttcctaagaaatgaaatccatttcaccaaaccacttttcttgctcatccataagaaacacttctcctttgttaaaattacatcatgagattgcaagcattcagtaacttgcaagctccaatttgaattctagttgtcttgctatttccaccacatctgcaattactttctccactgaaatcttgcattcctccaagtcatccaggagggttgaattcacttctttcaaactcctgttcaagtaaatgttttgccctcctgtcacgaatcatgaatgtttttaatggcatctagaatagtaaatctttttcagaagattttcaattttcttttcccaggttcttcagacaagtcaccatggtagctgtagacttatgaaatgtatttcctgaaccataaaacaagaacatcaaaattactctatgatccatgggaaacagaatgcatgttgtgttagcaggcatggaaagaacagtaatctctttcaacctctgtaagagagttcttggttgattaggtaccttgtcgataggcagttctaatttcaaagaactttttcttttgctgagcagtaagtcttaacagtgggcttaaaatattcagtaaaccattatttaaggagatgtggcttaaatatctaggctttcttgctttatttatagaacacttacagagtagatatagattaaatcttaaggaccctaggattgttagaatagtaaatgaacatcatatgttgtaatatagttagccagggaggggaaagatctctacaagaaataattttaaaaactactcaaagaaatcagagatatcacaaaatgacaaaacaagtacaggggcagcaaaaggtaacagatgtcaactatgagatctcatcaagaactaagaaaatggagaaaagtaccagatggcagatgggaggcagtgtgagcatgcctctcccacttggagattagtgtgtagagatttacattgtgaatttcttttcaagaaccaatgcagagacttaacagatatatgaaaaaatttcacatacactctgaagaagtctcaggcacaatcctactccatgaaataagaaaaaaccatcacatccccagattctgaggggagagagttcactccagagcatacatccccactggggatctggaaattcaggccacaagagaaggctttgatcctgtgcggacaagtgccttgagcagaatccacaggggagagctggaagtgcatggcagatatgagcacagaagctgggtgtccagccttgtgggcagaccgggagggatgtggcctgaaagccatggttattatctcagcgtgtaagctgatgatctgaggctggtcagagttctgtgcgcagactgcctggatgtaaacctggcactgttagcagagcactgcatgaatgaaaggaatgaaaatagccttgccaactgcataggtgctgggtgaggctcactgtggggggcgcacggcaagctattcaacattacgtacaggcatttgaggtcggggcatggaaaaatactgaggcagtgtgtgtatgttatttgtgctgagaatgaaactccttgaccttgaaaacaggacagggagtggtgtgtgtgctgtgataaggaatgctgaaaacggtctcctgagaatgcggtttgagtgcttttacaaggccacaggtgtctcacgacctgacctcataaagccatctagtggatgtttgtggcttaacaagccccttcaataagtacttggcggagggatgctggggggaccttcttagaagagctgcgccccacccccctccctggacagcccagctacaattgtctgagaactcactgcaagctgtaagcggcccactacttcccactcccttttttgaactcttctgtgcagcagaggcaattaaactctcctctggaacattaccccagcagcctgagaaccaccccttggcgctcacaggggctgcagcctgccttatccaaggacagttagagtgcagacccacctaaccctggacccactggtggtacccatccacccatcctggtagcttaacacaaagatacacttttaggagcttcatagcccctcttcccccattgcctgagaaaccactttccctgggcaacttagggcaagctcaaatcccactgctaccaccacagctggtgctcttttgcaagtgccacctcctagctggagaccaaccagcacagtccacacagcacctcaaggaagaataaatagaactgttcccaggaaggagaaaatgcctgcatgagctcagctgttaccactgcgtaccacaccctgaccagtcagaggtcttgagtcggtccgcatgacaagttcaccgctcgcataaccagcattcaagaaagccagcacactaagcctatctacagccagggagtctcagagtctacgtcactcccctgccacctcaatcagagctggtgctggtatccactgctgggagacttgtgctgaggtgaagcctgggctggatggctggaggatgaagaactgcacggaggagatggaggcacccagacagatgccccatggacatcctgaagcagagctgcctcactgccctgcacacacatgagagcgcagccaggaacagaaggactgggcaacattcaggcggagcccaggccaattttctaaacatggaatatgagttaaataaatggcttcgtattaaa

SEQ ID NO: 893 - DNA, 744 bp, Homo sapiens
  source 1..744: mol_type = unassigned DNA
attcgaaatatcagtgtgtgaagctgaatgatggtcacttcatgcctgtcctgggatttggcacctatgcgcctgcagaggttggactggccatccgaagcaagattgcagatggcagtgtgaagagagaagacatattctacacttcaaagctttggtgcaattcccatcgaccagagttggtccgaccagccttggaaaggtcactgaaaaatcttcaattggattatgttgacctctaccttattcattttccagtgtctgtaaagccaggtgaggaagtgatcccaaaagatgaaaatggaaaaatactatttgacacagtggatctctgtgccacatgggaggccgtggagaagtgtaaagatgcaggattggccaagtccatcggggtgtccaacttcaaccgcaggcagctggagatgatcctcaacaagccagggctcaagtacaagcctgtctgcaaccaggtggaatgtcatccttacttcaaccagagaaaactgctggatttctgcaagtcaaaagacattgttctggttgcctatagtgctctgggatcccaccgagaagaaccatgggtggacccgaactccccggtgctcttggaggacccagtcctttgtgccttggcaaaaaagcacaagcgaaccccagccctgattgccctgcgctaccagctacagcgtggggttgtggtcctggccaagagctacaatgagcagcgcatcagacagaacgtgc

SEQ ID NO: 894 - DNA, 858 bp, Homo sapiens
  source 1..858: mol_type = unassigned DNA
tgaagattgattgcaatgggagtggtttctctgtttctttgtatagtcgaacagatatttacttcttccaagaagatacaattcagaggaatttttatggcaaaagttcctaaaagtaaagctttagaggccaccaaattggcaattgaagctggcttccgccatattgattctgctcatttatacaataatgaggagcaggttggactggccatccgaagcaagattgcagatggcagtgtgaagagagaagacatattctacacttcaaagctttggtgcaattcccatcgaccagagttggtccgaccagccttggaaaggtcactgaaaaatcttcaattggattatgttgacctctaccttattcattttccagtgtctgtaaagccaggtgaggaagtgatcccaaaagatgaaaatggaaaaatactatttgacacagtggatctctgtgccacatgggaggccgtggagaagtgtaaagatgcaggattggccaagtccatcggggtgtccaacttcaaccgcaggcagctggagatgatcctcaacaagccagggctcaagtacaagcctgtctgcaaccagcctagagataattccatcttttccttgagtcctgactggtgattccaggcctccttgatcaaattgactgtccccaaatgttacacacatttcagcattaaagttactacacttttcccagtaaattacatttttttgttttattttatgttttaaaacttagagtcaatcagtgaagatctacagtggaaatacatatgtataaaattagtgaatttggtataatgatacggtgctgtgataatttaataaaagcattgagaaatt

SEQ ID NO: 895 - DNA, 713 bp, Homo sapiens
  source 1..713: mol_type = unassigned DNA
cctgatctcatgatccgcccagctcggcctcccaaagtgctgggattacaggtgtgagccgccacgcctggccattccttgtgttaattttaccatactaaaaataattaagattatatctataactataggttgcatcctgttaatttttccaaaaaatgactgaacctgaaattgttttggggacacttccaaactagtggtcaagcagtgatttttctgggactgcagaagttcctgctgtgcccaacctttattactaactgggaaagacccagggagactgggatgggctcatgattctacatacagaactcatccaagaaaggaggaaaagctgatttttgtgaacgtcgctacttgtgcctgaactaactctcaggcacattagtcagaaaatactacctatggttactcccccaggttcctaaaagtaaagctttagaggccaccaaattggcaattgaagctggcttccgccatattgattctgctcatttatacaataatgaggagcaggttggactggccatccgaagcaagattgcagatggcagtgtgaagagagaagacatattctacacttcaaagctttggtgcaattcccatcgaccagagttggtccgaccagccttggaaaggtcactgaaaaatcttcaattggattatgttgacctctaccttattcattttccagtgtctgtaaaggtagg

SEQ ID NO: 896 - DNA, 3756 bp, Homo sapiens
  source 1..3756: mol_type = unassigned DNA
ttttcttaggtaagaaacggttgaactggatgcaatttttatcacagcttgtgtaagactgcctctgtccctcctctcacatgccattggttaaccagcagacagtgtgctcaggggcgttgccagctcattgctcttatagcctgtgagggaggaagaaacatttgctaaccaggccagtgacagaaatggattcgaaataccagtgtgtgaagctgaatgatggtcacttcatgcctgtcctgggatttggcacctatgcgcctgcagaggttcctaaaagtaaagctctagaggccgtcaaattggcaatagaagccgggttccaccatattgattctgcacatgtttacaataatgaggagcaggttggactggccatccgaagcaagattgcagatggcagtgtgaagagagaagacatattctacacttcaaagctttggagcaattcccatcgaccagagttggtccgaccagccttggaaaggtcactgaaaaatcttcaattggactatgttgacctctatcttattcattttccagtgtctgtaaagccaggtgaggaagtgatcccaaaagatgaaaatggaaaaatactatttgacacagtggatctctgtgccacatgggaggccatggagaagtgtaaagatgcaggattggccaagtccatcggggtgtccaacttcaaccacaggctgctggagatgatcctcaacaagccagggctcaagtacaagcctgtctgcaaccaggtggaatgtcatccttacttcaaccagagaaaactgctggatttctgcaagtcaaaagacattgttctggttgcctatagtgctctgggatcccatcgagaagaaccatgggtggacccgaactccccggtgctcttggaggacccagtcctttgtgccttggcaaaaaagcacaagcgaaccccagccctgattgccctgcgctaccagctgcagcgtggggttgtggtcctggccaagagctacaatgagcagcgcatcagacagaacgtgcaggtgtttgaattccagttgacttcagaggagatgaaagccatagatggcctaaacagaaatgtgcgatatttgacccttgatatttttgctggcccccctaattatccattttctgatgaatattaacatggagggcattgcatgaggtctgccagaaggccctgcgtgtggatggtgacacagaggatggctctatgctggtgactggacacatcgcctctggttaaatctctcctgcttggcgacttcagtaagctacagctaagcccatcggccggaaaagaaagacaataattttgtttttcattttgaaaaaattaaatgctctctcctaaagattcttcacctactttggtctccataacttctatgttttctctccttctgacacactagtgcccccaaattgtgatttgcctatacgtttagggccggggttggaagatgttaacaaccatttaagattcatttctgcagtgggagtgggtggagtttcaccctctgggaaaggggcaggtgacaggtatttatcagtcagtgcctctctagctcttgtaggaagaagcacacgcaggatggagtctagaggatgagcgatattgactagcaattcatgggctccctccagcagtgcgagggtcagagtttctggagccttgggaggaggcatccctgtgagggggggttagggagatgggagggcaccaggaaaagtgattagaagtcaggtatgggaaggctaaataggacagagtcgagtacatctctgcttggaaaaacatatcaacacccttttttttgatcattatatcttgttcataaaagaaaactttccacattgttttaacaaaccccacagctgagagtcaggcctgaatctttgatgtgtgcccattcacaacgttgaccctattggtttgtggtggggcaggacatcgaagatatcattgactcatcacattcccctgaatagctcatatttagaaaatattcttagattgtaaaaatgtactgttcatttgttatatgcaatcttttaaatgttttatactttaaacaaggcatagttacaagtataaaacataaatatcccaaagccattatgcatggcactcaagattaaaatgggaaataatacatctaataaatcaaatgttccaagacttcaaatgtcttttggaaacaggctatgtaaaacagcacactggtttcaaactttggtaaattttaagaagaactcttacaaaggcatttaattcttatacataattttcaggggaactaatcaaatcagctaatcatgaagacatgattttcgttttagaaaacacttttgaaaacttgggataatctcatgtcttaatgatcaaagcattatgagaaggacagtggttttttacctgggcacactttctaacacatttactctccactattcgtactctggtagccatgttaaccccatcagagattccttctcaagccatgtctcagagctgataggcatcccagcaagttttgcagctcacaatttttctgtaaattacttattctataaaattggaagaggccataaactttggagggccctagaccaattttttggattatttctggtctactctcattccgttgatgatcttagatattctctgcattaaatatcacctctaggctgagaaatccaccaaaaaatatttctagctcagcgttttcctccaaatcttcaatggaagatcataatgtgaactctgcatctccatgttaaagtttaatggacattcacacttagcatgtctcaaagaaatctcatgtaaaccatggccatcctgttctaccttaactttctgagtctatggaatgataatttcacatctcataaacttgactgatgtaagtgtcaagaaaagattgacattttgttaaaacttcgtagccaagtgtgtaacgcttaagcagactttcatatttcaaatctctatagcacgtgtaactcttttttcaagatgtgaaataatcattaggtcagtcatttgtaaatagtacggctgctgtgggctttttccagttcttcaccatccatttttataaaactcttattgttaaaaaaaaaaagttactcagaatttcataaagccaaacacctgatttcaggaacacttgagatgtaagaaaattttatagggacctccaatcactaattttcctattttttctctcaaagaaatgctgaagggaggaattcaggttgaatgaaaggaaatagtaacttacagccatatagagttataaagacttcttgtaaatgtgaacatatggtaaaatataaaaacatgtatttttgaaattttggattctactcattattttacttcaatttaagatataaatgtatagaaataagtataattctaagctaatacgtatgcaatgtaggaagctgtaattactgaccaaaactatgtgaagtggagaaaacctggggaagtggatggttttagatgaaactgaagttaaattcatattgatttaaagtaaattgtcataactttataaagtttttcatcatcaccacagcaatcacaaagagaataattatgaatatacgcaagaggaaatgagaagggaatccaaatgtcattaaaaaaaaatcacgccacctcacaaaatggtaacagtggatataaaggatagaaagctataaacctggtaggaaaacatt

SEQ ID NO: 897 - DNA, 1481 bp, Homo sapiens
  source 1..1481: mol_type = unassigned DNA
tttgctaaccaggccagtgacagaaatggattcgaaataccagtgtgtgaagctgaatgatggtcacttcatgcctgtcctgggatttggcacctatgcgcctgcagaggttcctaaaagtaaagctctagaggccgtcaaattggcaatagaagccgggttccaccatattgattctgcacatgtttacaataatgaggagcaggttggactggccatccgaagcaagattgcagatggcagtgtgaagagagaagacatattctacacttcaaagctttggagcaattcccatcgaccagagttggtccgaccagccttggaaaggtcactgaaaaatcttcaattggactatgttgacctctatcttattcattttccagtgtctgtaaaggccatggagaagtgtaaagatgcaggattggccaagtccatcggggtgtccaacttcaaccacaggctgctggagatgatcctcaacaagccagggctcaagtacaagcctgtctgcaaccaggtggaatgtcatccttacttcaaccagagaaaactgctggatttctgcaagtcaaaagacattgttctggttgcctatagtgctctgggatcccatcgagaagaaccatgggtggacccgaactccccggtgctcttggaggacccagtcctttgtgccttggcaaaaaagcacaagcgaaccccagccctgattgccctgcgctaccagctgcagcgtggggttgtggtcctggccaagagctacaatgagcagcgcatcagacagaacgtgcaggtgtttgaattccagttgacttcagaggagatgaaagccatagatggcctaaacagaaatgtgcgatatttgacccttgatatttttgctggcccccctaattatccattttctgatgaatattaacatggagggcattgcatgaggtctgccagaaggccctgcgtgtggatggtgacacagaggatggctctatgctggtgactggacacatcgcctctggttaaatctctcctgcttggcgacttcagtaagctacagctaagcccatcggccggaaaagaaagacaataattttgtttttcattttgaaaaaattaaatgctctctcctaaagattcttcacctactttggtctccataacttctatgttttctctccttctgacacactagtgcccccaaattgtgatttgcctatacgtttagggccggggttggaagatgttaacaaccatttaagattcatttctgcagtgggagtgggtggagtttcaccctctgggaaaggggcaggtgacaggtatttatcagtcagtgcctctctagctcttgtaggaagaagcacacgcaggatggagtctagaggatgagcgatattgactagcaattcatgggctccctccagcagtgcgagggtcagagtttctggagccttgggaggaggcatccctgtgagggggggtta

SEQ ID NO: 898 - DNA, 2639 bp, Homo sapiens
  source 1..2639: mol_type = unassigned DNA
ttttcttaggtaagaaacggttgaactggatgcaatttttatcacagcttgtgtaagactgcctctgtccctcctctcacatgccattggttaaccagcagacagtgtgctcaggggcgttgccagctcattgctcttatagcctgtgagggaggaagaaacatttgctaaccaggccagtgacagaaatggattcgaaataccagtgtgtgaagctgaatgatggtcacttcatgcctgtcctgggatttggcacctatgcgcctgcagaggttcctaaaagtaaagctctagaggccgtcaaattggcaatagaagccgggttccaccatattgattctgcacatgtttacaataatgaggagcaggttggactggccatccgaagcaagattgcagatggcagtgtgaagagagaagacatattctacacttcaaagctttggagcaattcccatcgaccagagttggtccgaccagccttggaaaggtcactgaaaaatcttcaattggactatgttgacctctatcttattcattttccagtgtctgtaaaggtaggcagcttgtgtgatcaaattaatttcacttttgttctcagcataaatattgttttcatggagatttgaactaagctttttcttaggaggacatagggattttaacatggaagaagagccctaaacataactcctaattcctttctatggaacagaaagcaattttgaatccatacttccgtgattgcatgtctacaagaaaagagagtgcagaatcctcaaagcctctgcctcaaaaacttgaggaaatgacaatcatctccttgaaggcacaaggtcttatttatgattcctgatttcacctcttgggatgttcacagacacagagtttcatgaagctgtggtgtccagaaaacctgctgcacatagggtgcacaatgagtttccatcttcttgcctcttttcaaggggcaagaactcagtccgggaatgtcttaaactacaaaccttcatgggaaaccttgttgcttctgcttcctctcttttcacactggaggttttatttttgcttagccatgaattcttgtgtcattcataacttttgtcttaaggtactgaaaactagtcaggctagttaatgcaaaagggtatattagatatgataatgggaaatcaaagccagggctacattaagaatttgataaaaactctaaaaatatatcctttctccacccttatctctgctttattacaaaaggctttttaaatatttgttccaacctttttcgttggtggcatttatggctttggagcactgtcaggcccatgttcattaccgtgagctcctgtgcatctcctaatttccaaactagcctggaaaacgcctccattgaccatgattggttcatggtcctgtgcatggaacatcatatgttcagggagataaagaactctgatagtggcacctgggtaaaaagtacaatccattatatctggatatcaagatcttttgcagttgaagagaggtattgccacagagaaaattataggagcagaagaaagtcaatgaaagtcaatgatgacactccattaggaaccagaaagatggtatttatttatacatataataggtgtaagagattagaggaagcctgtcacctgaagacattccttataccttcatatgtagtacactttgtacataccactctctggagcgctgcatcacctacctcatggaggattagtgtccttaaatgtacctcagagcatggctatgtgtggagaaattgacttgtgacatcactaaactgactgcttctacttcagccaggtgaggaagtgatcccaaaagatgaaaatggaaaaatactatttgacacagtggatctctgtgccacatgggaggccatggagaagtgtaaagatgcaggattggccaagtccatcggggtgtccaacttcaaccacaggctgctggagatgatcctcaacaagccagggctcaagtacaagcctgtctgcaaccaggtggaatgtcatccttacttcaaccagagaaaactgctggatttctgcaagtcaaaagacattgttctggttgcctatagtgctctgggatcccatcgagaagaaccatgggtggacccgaactccccggtgctcttggaggacccagtcctttgtgccttggcaaaaaagcacaagcgaaccccagccctgattgccctgcgctaccagctgcagcgtggggttgtggtcctggccaagagctacaatgagcagcgcatcagacagaacgtgcaggtgtttgaattccagttgacttcagaggagatgaaagccatagatggcctaaacagaaatgtgcgatatttgacccttgatatttttgctggcccccctaattatccattttctgatgaatattaacatggagggcattgcatgaggtctgccagaaggccctgcgtgtggatggtgacacagaggatggctctatgctggtgactggacacatcgcctctggttaaatctctcctgcttggcgacttcagtaagctacagctaagcccatcggccggaaaagaaagacaataattttgtttttcattttgaaaaaattaaatgctctctcct

SEQ ID NO: 899 - DNA, 745 bp, Homo sapiens
  source 1..745: mol_type = unassigned DNA
tctcctgccagccaagtgaagacatgcttacttccccttcaccttccttcatgatgacagtgtgctcaggggcgttgccagctcattgctcttatagcctgtgagggaggaagaaacatttgctaaccaggccagtgacagaaatggattcgaaataccagtgtgtgaagctgaatgatggtcacttcatgcctgtcctgggatttggcacctatgcgcctgcagaggttcctaaaagtaaagctctagaggccgtcaaattggcaatagaagccgggttccaccatattgattctgcacatgtttacaataatgaggagcaggttggactggccatccgaagcaagattgcagatggcagtgtgaagagagaagacatattctacacttcaaagctttggagcaattcccatcgaccagagttggtccgaccagccttggaaaggtcactgaaaaatcttcaattggactatgttgacctctatcttattcattttccagtgtctgtaaagccaggtgaggaagtgatcccaaaagatgaaaatggaaaaatactatttgacacagtggatctctgtgccacatgggaggccatggagaagtgtaaagatgcaggattggccaagtccatcggggtgtccaacttcaaccacaggctgctggagatgatcctcaacaagccagggctcaagtacaagcctgtctgcaaccaggtggaatgtcatccttacttcaaccagagaaa

SEQ ID NO: 900 - DNA, 553 bp, Homo sapiens
  source 1..553: mol_type = unassigned DNA
atttgctaaccaggccagtgacagaaatggattcgaaataccagtgtgtgaagctgaatgatggtcacttcatgcctgtcctgggatttggcacctatgcgcctgcagaggttcctaaaagtaaagctctagaggccgtcaaattggcaatagaagccgggttccaccatattgattctgcacatgtttacaataatgaggagcaggttggactggccatccgaagcaagattgcagatggcagtgtgaagagagaagacatattctacacttcaaagctttggagcaattcccatcgaccagagttggtccgaccagccttggaaaggtcactgaaaaatcttcaattggactatgttgacctctatcttattcattttccagtgtctgtaaaggaggacatagggattttaacatggaagaagagccctaaacataactcctaattcctttctatggaacagaaagcaattttgaatccatacttccgtgattgcatgtctacaagaaaagagagtgcagaatcctcaaagcctctgcctcaaaaacttga

SEQ ID NO: 901 - DNA, 600 bp, Homo sapiens
  source 1..600: mol_type = unassigned DNA
ataatagaattctcatgagatctggttgtttgaaagtgtgtagcacctccaccttctctctctctctccctctccctctcctgccagccaagtgaagacatgcttacttccccttcaccttccttcatgatgtgggaagagtgctgcaacccagccctagccaacgccgcatgagagggagtgtgccgagggcttctgagaaggtttctctcacatctagaaagaagcgcttaagatgtggcagcccctcttcttcaagtggctcttgtcctgttgccctgggagttctcaaattgctgcagcagcctccacccagcctgaggatgacatcaatacacagaggaagaagagtcaggaaaagatgagagaagttacagactctcctgggcgaccccgagagcttaccattcctcagacttcttcacatggtgctaacagatttttaccattggaatgacatactgcatcctatagttataccatccactctgaaatcaatgtgaatttaacttcagttccatacagaaacttcttttccacagactcaggaatttcaagtgtgctatccctatgtgtattgattatatcttcatcctgctc

SEQ ID NO: 902 - DNA, 576 bp, Homo sapiens
  source 1..576: mol_type = unassigned DNA
acatgcttacttccccttcaccttccttcatgatgtgggaagagtgctgcaacccagccctagccaacgccgcatgagagggagtgtgccgagggcttctgagaaggtttctctcacatctagaaagaagcgcttaagatgtggcagcccctcttcttcaagtggctcttgtcctgttgccctgggagttctcaaattgctgcagcagcctccacccagcctgaggatgacatcaatacacagaggaagaagagtcaggaaaagatgagagaagttacagactctcctgggcgaccccgagagcttaccattcctcagacttcttcacatggtgctaacagatttttaccattggaatgacatactgcatcctatagttataccatccactctgaaatcaatgtgaatttaacttcagttccatacagaaacttcttttccacagatggagtttaagcccaagctggagtgcgatggtgcaatcccaactcactgcaacctctgcctcccaggttcaagctattttcctggcttagcctccggagtagctggaattacagatgtgcgcccccatga

SEQ ID NO: 903 - DNA, 579 bp, Homo sapiens
  source 1..579: mol_type = unassigned DNA
gattgtaagtttcctgaggcctccacagccatactttctgtacagcctgtggaactgtaatgtctaatgaaactacagggcactggagccttagaccctgccactttgttgacacctactgggcaaccaaaggaactagtacacaactgcctagtggttatagatcaagagtcttccaggcgaccagatctgaaggacacagccctccagggtggagactggatgctctttgtggacagaagcagcctagtcaccaacagaaggaggaatgctgtctaggctatagtgactctcttggaggtaatagctgcaagaactctcccaacagggacttctgtgcaaaaggctgagtaaattgcccttatgagagccttgcatctgtccaaagtgggaagagtgctgcaacccagccctagccaacgccgcatgagagggagtgtgccgagggcttctgagaaggtttctctcacatctagaaagaagcgcttaagatgtggcagcccctcttcttcaagtggctcttgtcctgttgccctgggagttctcaaattgctgcagcagcctccacccagcctgagg

SEQ ID NO: 904 - DNA, 460 bp, Homo sapiens
  source 1..460: mol_type = unassigned DNA
cagcctagtcaccaacagaaggaggaatgctgtctaggctatagtgactctcttggaggtaatagctgcaagaactctcccaacagggacttctgtgcaaaaggctgagtaaattgcccttatgagagccttgcatctgtccaaaggccctggagaaatgcagagatgcaggtttaaccaggtccatcagggtgtccagtttcaatcactaactgctggaactgatcctcagacaagccaggactcaagtacaagcccacctacaaccagatgagcccttagggccactggggccatttctgactttgtgctcttcacatacttccttacattagaataatgtaattgttcagtatgttgtgctttaattttttaagaaaatgtcaaaggctagccatgacacggttatgtgtatttcttttaacttttccataaatattaaataatgtaattgttcaga

SEQ ID NO: 905 - DNA, 1098 bp, Homo sapiens
  source 1..1098: mol_type = unassigned DNA
gtaagaaacggttgaactggatgcaatttttatcacagcttgtgtaagactgcctctgtccctcctctcacatgccattggttaaccagcagacagtgtgctcaggggcgttgccagctcattgctcttatagcctgtgagggaggaagaaacatttgctaaccaggccagtgacagaaatggattcgaaataccagtgtgtgaagctgaatgatggtcacttcatgcctgtcctgggatttggcacctatgcgcctgcagaggttcctaaaagtaaagctctagaggccgtcaaattggcaatagaagccgggttccaccatattgattctgcacatgtttacaataatgaggagcaggttggactggccatccgaagcaagattgcagatggcagtgtgaagagagaagacatattctacacttcaaagctttggagcaattcccatcgaccagagttggtccgaccagccttggaaaggtcactgaaaaatcttcaattggactatgttgacctctatcttattcattttccagtgtctgtaaaggaggacatagggattttaacatggaagaagagccctaaacataactcctaattcctttctatggaacagaaagcaattttgaatccatacttccgtgattgcatgtctacaagaaaagagagtgcagaatcctcaaagcctctgcctcaaaaacttgaggaaatgacaatcatctccttgaaggcacaaggtcttatttatgattcctgatttcacctcttgggatgttcacagacacagagtttcatgaagctgtggtgtccagaaaacctgctgcacatagggtgcacaatgagtttccatcttcttgcctcttttcaaggggcaagaactcagtccgggaatgtcttaaactacaaaccttcatgggaaaccttgttgcttctgcttcctctcttttcacactggaggttttatttttgcttagccatgaattcttgtgtcattcataacttttgtcttaaggtactgaaaactagtcaggctagttaatgcaaaagggtatattagatatgataatgggaaatcaaagccagggctacattaagaa

SEQ ID NO: 906 - DNA, 859 bp, Homo sapiens
  source 1..859: mol_type = unassigned DNA
ccaccctggcgatggctccctggtcctactttctctctcaaactggctttttctcattcctttgactccgccagacttcctcgcccccatgacctggtgttgtgtctgatcaccccaacattcctggctgcccaatgtggggcaatgaagaccccagtgaaggaatgctagagtgtgtgaaagtggaggacgcatcgtcaaaggacacctgaggacgtctcaaagaagctcggcgggagagctgagcgctcggaagaaccaaggttccgagaagtaaagctttggaggtcacaaaattagcaatagaagctgggttccgccatatagattctgctcatttatacaataatgaggagcaggttggactggccatccgaagcaagattgcagatggcagtgtgaagagagaagacatattctacacttcaaagctttggtccacttttcatcgaccagagttggtccgaccagccttggaaaactcactgaagaaagctcaattggactatgttgacctctatcttattcattctccaatgtctctaaagccaggtgaggaactttcaccaacagatgaaaatggaaaagtaatatttgacatagtggatctctgtaccacctgggaggccatggagaagtgtaaggatgcaggattggccaagtccattggggtgtcaaacttcaaccgcaggcagctggagatgatcctcaacaagccaggactcaagtacaagcctgtctgcaaccaggtagaatgtcatccgtatttcaaccggagtaaattgctagatttctgcaagtcgaaagatattgttctggttgcctatagtgctctgggatctcaacgagacaaacgatg

SEQ ID NO: 907 - DNA, 996 bp, Homo sapiens
  source 1..996: mol_type = unassigned DNA
ccctggcgatggctccctggtcctactttctctctcaaactggctttttctcattcctttgactccgccagacttcctcgcccccatgacctggtgttgtgtctgatcaccccaacattcctggctgcccaatgtggggcaatgaagaccccagtgaaggaatgctagagtgtgtgaaagtggaggacgcatcgtcaaaggacacctgaggacgtctcaaagaagctcggcgggagagctgagcgctcggaagaaccaagaactaagatcagaattctttgaatcatcagaatcatctcttttgaaaaatcgattcatcaaatgaatcttcagccaacaactgttcaagaaggatgcaaatatcacagtgttagatgaactttctggttgacacctgacaggaagagcctctgtattggaccaccatgtttgtgctcactgtgtagtaacaaaccaacacaccaaaatagcgggagttgccactgacaaagagttgaatgatcaaatgacggccaaaggaggaggtgtgaattcaaaggcagcattactccccattttcttccctctcctgtgtctctcccctgaggcttctctgcaaaacatcactgcccagcttagcatctgtcctgggcactggtaataatgtggtaccattcatcctctcctagcatttgatcactcatcaggagccctcagccccatggggaagaggacagaagaagaaaccagttccgagaagtaaagctttggaggtcacaaaattagcaatagaagctgggttccgccatatagattctgctcatttatacaataatgaggagcaggttggactggccatccgaagcaagattgcagatggcagtgtgaagagagaagacatattctacacttcaaagctttggtccacttttcatcgaccagagttggtccgaccagccttggaaaactcactgaagaaagctcaattggactatgttgacctctatcttattcatt

SEQ ID NO: 908 - DNA, 795 bp, Homo sapiens
  source 1..795: mol_type = unassigned DNA
cctggcgatggctccctggtcctactttctctctcaaactggctttttctcattcctttgactccgccagacttcctcgcccccatgacctggtgttgtgtctgatcaccccaacattcctggctgcccaatgtggggcaatgaagaccccagtgaaggaatgctagagtgtgtgaaagtggaggacgcatcgtcaaaggacacctgaggacgtctcaaagaagctcggcgggagagctgagcgctcggaagaaccaagaactaagatcagaattctttgaatcatcagaatcatctcttttgaaaaatcgattcatcaaatgaatcttcagccaacaactgttcaagaaggatgcaaatatcacagtgttagatgaactttctggttgacacctgacaggaagagcctctgtattggaccaccatgtttgtgctcactgtgtagtaacaaaccaacacaccaaaatagcgggagttgccactgacaaagagttgaatgatcaaatgacggccaaaggaggaggttccgagaagtaaagctttggaggtcacaaaattagcaatagaagctgggttccgccatatagattctgctcatttatacaataatgaggagcaggttggactggccatccgaagcaagattgcagatggcagtgtgaagagagaagacatattctacacttcaaagctttggtccacttttcatcgaccagagttggtccgaccagccttggaaaactcactgaagaaagctcaattggactatgttgacctctatcttattcattctcc

SEQ ID NO: 909 - DNA, 636 bp, Homo sapiens
  source 1..636: mol_type = unassigned DNA
tgctagccagctgagtgacagtgatggattcaaaacatcagtgtttgaagctaaatgatggtcacttcatgcctgtcctgggatttggcacctatgcacctccagagaatcatctcttttgaaaaatcgattcatcaaatgaatcttcagccaacaactgttcaagaaggatgcaaatatcacaggttccgagaagtaaagctttggaggtcacaaaattagcaatagaagctgggttccgccatatagattctgctcatttatacaataatgaggagcaggttggactggccatccgaagcaagattgcagatggcagtgtgaagagagaagacatattctacacttcaaagctttggtccacttttcatcgaccagagttggtccgaccagccttggaaaactcactgaagaaagctcaattggactatgttgacctctatcttattcattctccaatgtctctaaagccaggtgaggaactttcaccaacagatgaaaatggaaaagtaatatttgacatagtggatctctgtaccacctgggaggccatggagaagtgtaaggatgcaggattggccaagtccattggggtgtcaaacttcaaccgcaggcagctggagatgatcctcaaca

SEQ ID NO: 910 - DNA, 972 bp, Homo sapiens
  source 1..972: mol_type = unassigned DNA
atggattcaaaacatcagtgtttgaagctaaatgatggtcacttcatgcctgtcctgggatttggcacctatgcacctccagaggttccgagaagtaaagctttggaggtcacaaaattagcaatagaagctgggttccgccatatagattctgctcatttatacaataatgaggagcaggttggactggccatccgaagcaagattgcagatggcagtgtgaagagagaagacatattctacacttcaaagctttggtccacttttcatcgaccagagttggtccgaccagccttggaaaactcactgaagaaagctcaattggactatgttgacctctatcttattcattctccaatgtctctaaagccaggtgaggaactttcaccaacagatgaaaatggaaaagtaatatttgacatagtggatctctgtaccacctgggaggccatggagaagtgtaaggatgcaggattggccaagtccattggggtgtcaaacttcaaccgcaggcagctggagatgatcctcaacaagccaggactcaagtacaagcctgtctgcaaccaggtagaatgtcatccgtatttcaaccggagtaaattgctagatttctgcaagtcgaaagatattgttctggttgcctatagtgctctgggatctcaacgagacaaacgatgggtggacccgaactccccggtgctcttggaggacccagtcctttgtgccttggcaaaaaagcacaagcgaaccccagccctgattgccctgcgctaccagctgcagcgtggggttgtggtcctggccaagagctacaatgagcagcgcatcagacagaacgtgcaggtttttgagttccagttgactgcagaggacatgaaagccatagatggcctagacagaaatctccactattttaacagtgatagttttgctagccaccctaattatccatattcagatgaatattaa

SEQ ID NO: 911 - DNA, 1405 bp, Homo sapiens
  source 1..1405: mol_type = unassigned DNA
tttttgctgaacattccccttagtaaaatggcaggatggtttgcttgccattgaaactaaccaaacatttaatccttttccctttagagaaaaaagaaaaaaaaaggtgcagctcactgccagtgcccatttagttttacattaacatgttccttgaggttgaagcaaatctgaccgattttcaatgtaaaaataacatataaaaactgttctcggagttatttctaaacagaactaagatcagaattctttgaatcatcagaatcatctcttttgaaaaatcgattcatcaaatgaatcttcagccaacaactgttcaagaaggatgcaaatatcacaggttccgagaagtaaagctttggaggtcacaaaattagcaatagaagctgggttccgccatatagattctgctcatttatacaataatgaggagcaggttggactggccatccgaagcaagattgcagatggcagtgtgaagagagaagacatattctacacttcaaagctttggtccacttttcatcgaccagagttggtccgaccagccttggaaaactcactgaagaaagctcaattggactatgttgacctctatcttattcattctccaatgtctctaaagccaggtgaggaactttcaccaacagatgaaaatggaaaagtaatatttgacatagtggatctctgtaccacctgggaggccatggagaagtgtaaggatgcaggattggccaagtccattggggtgtcaaacttcaaccgcaggcagctggagatgatcctcaacaagccaggactcaagtacaagcctgtctgcaaccaggtagaatgtcatccgtatttcaaccggagtaaattgctagatttctgcaagtcgaaagatattgttctggttgcctatagtgctctgggatctcaacgagacaaacgatgggtggacccgaactccccggtgctcttggaggacccagtcctttgtgccttggcaaaaaagcacaagcgaaccccagccctgattgccctgcgctaccagctgcagcgtggggttgtggtcctggccaagagctacaatgagcagcgcatcagacagaacgtgcaggtttttgagttccagttgactgcagaggacatgaaagccatagatggcctagacagaaatctccactattttaacagtgatagttttgctagccaccctaattatccatattcagatgaatattaacatggagggctttgcctgatgtctaccagaagccctgtgtgtggatggtgacgcagaggacgtctctatgccggtgactggacatatcacctctacttaaatccgtcctgtttagcgacttcagtcaactacagctgagtccataggccagaaagacaataaatttttatcattttg

SEQ ID NO: 912 - DNA, 1807 bp, Homo sapiens
  source 1..1807: mol_type = unassigned DNA
ccctcatcaggattacagctttatcaggactgcatcttcttcagaaatgaatatttctcttacaacgcaaagaaagaaaaatcaaaataaattttctgattgaaaatgtaaaaaggcaaatatttttacagttttaactttaattttttattgaggaccaactatttgaaaaattctcattagtcattcctttaaattatgtgtatgtgagagaaagacgtaagatggttaattatttcaaatgatgcagtataaagaaggggcattatcacggcagaaacgaaaaaagatatttgtagctggaggtttttatagtctaacatatggttgctatttgttctacaaatccttttgaataatttaatatagagatttagaatagaaaataatactttagatagaaattaatgagtttattataaccatatattataataatttacttaggaattctctttgataagaaacaaatgaactgaatgcaattttctccacagaccatataagactgcctatgtacctcctcctacatgccattggttaaccatcagtcagtttgcaggggtggggggaggggtttcctgcccattgtttttgtaatctctgaggagaagcagcagcaaacatttgctagtcagacaagtgacagggaatggattccaaacaccagtgtgtaaagctaaatgatggccacttcatgcctgtattgggatttggcacctatgcacctccagaggttccgagaagtaaagctttggaggtcacaaaattagcaatagaagctgggttccgccatatagattctgctcatttatacaataatgaggagcaggttggactggccatccgaagcaagattgcagatggcagtgtgaagagagaagacatattctacacttcaaagctttggtccacttttcatcgaccagagttggtccgaccagccttggaaaactcactgaagaaagctcaattggactatgttgacctctatcttattcattctccaatgtctctaaagccaggtgaggaactttcaccaacagatgaaaatggaaaagtaatatttgacatagtggatctctgtaccacctgggaggccatggagaagtgtaaggatgcaggattggccaagtccattggggtgtcaaacttcaaccgcaggcagctggagatgatcctcaacaagccaggactcaagtacaagcctgtctgcaaccaggtagaatgtcatccgtatttcaaccggagtaaattgctagatttctgcaagtcgaaagatattgttctggttgcctatagtgctctgggatctcaacgagacaaacgatgggtggacccgaactccccggtgctcttggaggacccagtcctttgtgccttggcaaaaaagcacaagcgaaccccagccctgattgccctgcgctaccagctgcagcgtggggttgtggtcctggccaagagctacaatgagcagcgcatcagacagaacgtgcaggtttttgagttccagttgactgcagaggacatgaaagccatagatggcctagacagaaatctccactattttaacagtgatagttttgctagccaccctaattatccatattcagatgaatattaacatggagggctttgcctgatgtctaccagaagccctgtgtgtggatggtgacgcagaggacgtctctatgccggtgactggacatatcacctctacttaaatccgtcctgtttagcgacttcagtcaactacagctgagtccataggccagaaagacaataaatttttatcattttgaaataa

SEQ ID NO: 913 - DNA, 1026 bp, Homo sapiens
  source 1..1026: mol_type = unassigned DNA
aaacatttgctagtcagacaagtgacagggaatggattccaaacaccagtgtgtaaagctaaatgatggccacttcatgcctgtattgggatttggcacctatgcacctccagaggttccgagaagtaaagctttggaggtcacaaaattagcaatagaagctgggttccgccatatagattctgctcatttatacaataatgaggagcaggttggactggccatccgaagcaagattgcagatggcagtgtgaagagagaagacatattctacacttcaaagctttggtccacttttcatcgaccagagttggtccgaccagccttggaaaactcactgaagaaagctcaattggactatgttgacctctatcttattcattctccaatgtctctaaaggtatgcagtttgtatgagcataaaattgcgcttctgctgtcattataaacattgtttatctggatagttgaacagagctttttattaggaggatgtagggattatcacacagaagaagaaccgtaagtggaacacctaatttcctttctttcgagtaaattttgaatcctacttctctaatgcacacctacaagagaagagagtacagcaacctcaaagcctcttcctcaaaaacttgaaattacaatagtctctttcaaggcactgtcttagttgtggcttttgagtccatctcttgggatgttcccagacacagagtttcatgcagttgtggtgcccaataaaactgctgcacatgtgatgcacaatgagtttccaccatctctccccatttcaagctgaagcagatttggtggaagccactatgcatggttcttaaattagaaacccttaatgtggacttgcaaagctttattattctgctgcctcttctttcacaatagagtttgaagctgtatttagccaggaattactgtgtagtgtataacttttgatttaaagttacagaaaactactcaggctagttaatgcaaaagagtttactgagttatgtaaaatgggaagtc

SEQ ID NO: 914 - DNA, 846 bp, Homo sapiens
  source 1..846: mol_type = unassigned DNA
atttgctagtcagacaagtgacagggaatggattccaaacaccagtgtgtaaagctaaatgatggccacttcatgcctgtattgggatttggcacctatgcacctccagaggttccgagaagtaaagctttggaggtcacaaaattagcaatagaagctgggttccgccatatagattctgctcatttatacaataatgaggagcaggttggactggccatccgaagcaagattgcagatggcagtgtgaagagagaagacatattctacacttcaaaggccatggagaagtgtaaggatgcaggattggccaagtccattggggtgtcaaacttcaaccgcaggcagctggagatgatcctcaacaagccaggactcaagtacaagcctgtctgcaaccaggtgagctcccttggccttctctcctttcggttcttcatgccccctcttcctgtcctattgccaaatatctgtttgttttgtcccagttatctttgtgaagtagaagattatctagagagcaaagcttctgtcaagaaaggcgtgaagatttcttgtttgtaccctgcttggaaaagtattagggaaaaattggaatgagtttaatgctgaatcgtgtgtaatatttaggggaggtccatttgatcagggaggcctggaatcatcaattagaactcaaggaaaggtggacttacctctaagctatgaaagatgaccagaaagtgcatgggtgaaggtgatttggagggaatggtgtatagatatgaagctaggaaaagatgaaatgagctgtacgtgaacagagagttagaataagagaagagaggtgctaggggtttacatgga

SEQ ID NO: 915 - DNA, 528 bp, Homo sapiens
  source 1..528: mol_type = unassigned DNA
cttttccaacaaatcactgaatctgagggtgttatttggtacctccataacagtgatcaaccagagattgcctgagactgaaggtgtttctgggatgctcaacctttattactaaccaggaaagactcaggcaaactgagatggacttttcaccccacatacagacaggaggaaaagctgattcttgtataaaagtcaatgcttgtgcctgaactacctctcagccacagtgatcaccagatactacctttggttgctcctccaggttccgagaagtaaagctttggaggtcacaaaattagcaatagaagctgggttccgccatatagattctgctcatttatacaataatgaggagcaggttggactggccatccgaagcaagattgcagatggcagtgtgaagagagaagacatattctacacttcaaagctttggtccacttttcatcgaccagagttggtccgaccagccttggaaaactcactgaagaaagctcaattggactatgttgacctctatcttat

SEQ ID NO: 916 - DNA, 629 bp, Homo sapiens
  source 1..629: mol_type = unassigned DNA
aggtacatgaccctatcatgtgggcacaatgtgaccctatcatgtgggcacaatgtcagcgctgtttcttctccattttctgttgaaattttctctttgtctgcagagttgcacagtttcaatacataatatctaggaatggatttctgcttatttttcgtgagctattcattgacccacctgagtgtttagagctgacttctataactgtttaaaacttaccaatattttaagtattgtctctgcaccctactgtctaatatacttggggattcacaactggcaatctaaaaataataaaagttttttatttctgataggtttttgagttccagttgactgcagaggacatgaaagccatagatggcctagacagaaatctccactattttaacagtgatagttttgctagccaccctaattatccatattcagatgaatattaacatggagggctttgcctgatgtctaccagaagccctgtgtgtggatggtgacgcagaggacgtctctatgccggtgactggacatatcacctctacttaaatccgtcctgtttagcgacttcagtcaactacagctgagtccataggccagaaagacaataaatttttatcattttgaaataa

SEQ ID NO: 917 - DNA, 808 bp, Homo sapiens
  source 1..808: mol_type = unassigned DNA
taggaagaagtgaatagaagaaaagagggtgttgcaaatcaaaagcacatagagatatcatcttacaccagtcagaatggctattcttaaaatgtcagacaacaacagatattggattgccacatcatcaggaccacaccttcatcaggaatgaatattcctactacaattaaagaagaaacaaaattaatttgttggtgaaaaacgtaaaaagagaaattttctttggttttgtttaatttctttattgagggtcaccactaaaaaaaaatgctcactggtcattcttttgaatactgtctgagagaaagatgtaagatggttgattatttcaaatgacagaagataaagatgggatatcatcatggcatgaacaaaaacaagatttgtagctggaggtattttatagtctaacatgatcaccaatcattctataaacctgttggatgagtttatcagacagacagagagagagattgattgattctgaatagaaaatttcactttagaaaaaaatattttgactatataataatgtatgtaaaaattctctttgataagaaacgagtgaactggattcaattttcctcacagcctgtgtaatacaccatcacttgcttcctcctacatgccattgattagccccagggagcagtgcagcactgcctgcccatgttttacataacccctgaatataaatgccagatgttgctgaaggaaacaggatctgcttagtgaaagaagtggcaagcaatggatcccaaatatcagcgtgtagagctaaatgatggtcacttcatgcccgtat

SEQ ID NO: 918 - DNA, 1414 bp, Homo sapiens
  source 1..1414: mol_type = unassigned DNA
aggaagaagtgaatagaagaaaagagggtgttgcaaatcaaaagcacatagagatatcatcttacaccagtcagaatggctattcttaaaatgtcagacaacaacagatattggattgccacatcatcaggaccacaccttcatcaggaatgaatattcctactacaattaaagaagaaacaaaattaatttgttggtgaaaaacatgttgctgaaggaaacaggatctgcttagtgaaagaagtggcaagcaatggatcccaaatatcagcgtgtagagctaaatgatggtcacttcatgcccgtattgggatttggcacctatgcacctccagaggttccgaggaacagagctgtagaggtcaccaaattagcaatagaagctggcttccgccatattgattctgcttatttatacaataatgaggagcaggttggactggccatccgaagcaagattgcagatggcagtgtgaagagagaagacatattctacacttcaaagctttggtgcactttctttcaaccacagatggtccaaccagccttggaaagctcactgaaaaaacttcaactggactatgttgacctctatcttcttcatttcccaatggctctcaagccaggtgagacgccactaccaaaagatgaaaatggaaaagtaatattcgacacagtggatctctctgccacatgggaggtcatggagaagtgtaaggatgcaggattggccaagtccatcggggtgtcaaacttcaactgcaggcagctggagatgatcctcaacaagccaggactcaagtacaagcctgtctgcaaccaggtagaatgtcatccttacctcaaccagagcaaactgctggatttctgcaagtcaaaagacattgttctggttgcccacagtgctctgggaacccaacgacataaactatgggtggacccaaactccccagttcttttggaggacccagttctttgtgccttagcaaagaaacacaaacaaaccccagccctgattgccctgcgctaccagctgcagcgtggggttgtggtcctggccaagagctacaatgagcagcggatcagagagaacatccaggtttttgaattccagttgacatcagaggatatgaaagttctagatggtctaaacagaaattatcgatatgttgtcatggattttcttatggaccatcctgattatccattttcagatgaatattagcatagagggtgttgcacgacatctagcagaaggccctgtgtgtggatggtgatgcagaggatgtctctatgctggtgactggacacacagcctctggttaaatccctcccctcctgcttggcaacttcagctagctagatatatccatggtccagaaagcaaacataataaatttttatcttgaagtaa

SEQ ID NO: 919 - DNA, 1192 bp, Homo sapiens
  source 1..1192: mol_type = unassigned DNA
acaggatctgcttagtgaaagaagtggcaagcaatggatcccaaatatcagcgtgtagagctaaatgatggtcacttcatgcccgtattgggatttggcacctatgcacctccagaggttccgaggaacagagctgtagaggtcaccaaattagcaatagaagctggcttccgccatattgattctgcttatttatacaataatgaggagcaggttggactggccatccgaagcaagattgcagatggcagtgtgaagagagaagacatattctacacttcaaagctttggtgcactttctttcaaccacagatggtccaaccagccttggaaagctcactgaaaaaacttcaactggactatgttgacctctatcttcttcatttcccaatggctctcaagccaggtgagacgccactaccaaaagatgaaaatggaaaagtaatattcgacacagtggatctctctgccacatgggaggtcatggagaagtgtaaggatgcaggattggccaagtccatcggggtgtcaaacttcaactgcaggcagctggagatgatcctcaacaagccaggactcaagtacaagcctgtctgcaaccaggtagaatgtcatccttacctcaaccagagcaaactgctggatttctgcaagtcaaaagacattgttctggttgcccacagtgctctgggaacccaacgacataaactatgggtggacccaaactccccagttcttttggaggacccagttctttgtgccttagcaaagaaacacaaacaaaccccagccctgattgccctgcgctaccagctgcagcgtggggttgtggtcctggccaagagctacaatgagcagcggatcagagagaacatccaggtttttgaattccagttgacatcagaggatatgaaagttctagatggtctaaacagaaattatcgatatgttgtcatggattttcttatggaccatcctgattatccattttcagatgaatattagcatagagggtgttgcacgacatctagcagaaggccctgtgtgtggatggtgatgcagaggatgtctctatgctggtgactggacacacagcctctggttaaatccctcccctcctgcttggcaacttcagctagctagatatatccatggtccagaaagcaaacataataaatttttatcttgaagt

SEQ ID NO: 920 - DNA, 1936 bp, Homo sapiens
  source 1..1936: mol_type = unassigned DNA
acctgtcattcgttcgtcctcagtgcagggcaacagggcccacatgccttggccccacataccaacccaggctgctgtgacagcccatgagagggggagaggttgctctgggatggaacaagaaaaagaggttgttttgtgaggactttaggttcaagatggtgactgcagccatgctgctacagtgctgcccagtgcttgcccggggccccacaagcctcctaggcaaggtggttaagactcaccagttcctgtttggtattggacgctgtcccatcctggctacccaaggaccaaactgttctcaaatccaccttaaggcaacaaaggctggaggagattctccatcttgggcgaagggccactgtcccttcatgctgtcggaactccaggatgggaagagcaagattgtgcagaaggcagccccagaagtccaggaagatgtgaaggctttcaagacaggaaactatgtcttcagttatgaccagtttttcagggacaagatcatggagaagaaacaggatcacacctaccgtgtgttcaagactgtgaaccgctgggctgatgcatatccctttgcccaacatttctctgaggcatctgtggcctcaaaggatgtgtccgtctggtgtagtaatgattacctgggcatgagccgacaccctcaggtcttgcaagccacacaggagaccctgcagcgtcatggtgctggagctggtggcacccgcaacatctcaggcaccagtaagtttcatgtggagcttgagcaggagctggctgagctgcaccagaaggactcagccctgctcttctcctcctgctttgttgccaatgactctactctcttcaccttggccaagatcctgccagggtgcgagatttactcagacgcaggcaaccatgcttccatgatccaaggtatccgtaacagtggagcagccaagtttgtcttcaggcacaatgaccctgaccacctaaagaaacttctagagaagtctaaccctaagatacccaaaattgtggcctttgagactgtccactccatggatggtgccatctgtcccctcgaggagttgtgtgatgtgtcccaccagtatggggccctgaccttcgtggatgaggtccatgctgtaggactgtatgggtcccggggcgctgggattggggagcgtgatggaattatgcataagattgacatcatctctggaactcttggcaaggcctttggctgtgtgggcggctacattgccagcacccgtgacttggtggacatggtgcgctcctatgctgcaggcttcatctttaccacttctctgccccccatggtgctctctggagctctagaatctgtgcggctgctcaagggagaggagggccaagccctgaggcgagcccaccagcgcaatgtcaagcacatgcgccagctactcatggacaggggccttcctgtcatcccctgccccagccacatcatccccatccgggtgggcaatgcagcactcaacagcaagctctgtgatctcctgctctccaagcatggcatctatgtgcaggccatcaactacccaactgtcccccggggtgaagagctcctgcgcttggcaccctccccccaccacagccctcagatgatggaagattttgtggagaagctgctgctggcttggactgcggtggggctgcccctccaggatgtgtctgtggctgcctgcaatttctgtcgccgtcctgtacactttgagctcatgagtgagtgggaacgttcctacttcgggaacatggggccccagtatgtcaccacctatgcctgagaagccagctgcctaggattcacaccccacctgcgcttcacttgggtccaggcctactcctgtcttctgctttgttgtgtgcctctagctgaattgagcctaaaaataaagcacaaaccacagca

SEQ ID NO: 921 - DNA, 2027 bp, Homo sapiens
  source 1..2027: mol_type = unassigned DNA
aatgcagggccaggccggcagaaggcagggtgggtggggctgagtcagaggagaagggataaatgccaggtcctaacccaagtacccacctgtcattcgttcgtcctcagtgcagggcaacaggactttaggttcaagatggtgactgcagccatgctgctacagtgctgcccagtgcttgcccggggccccacaagcctcctaggcaaggtggttaagactcaccagttcctgtttggtattggacgctgtcccatcctggctacccaaggaccaaactgttctcaaatccaccttaaggcaacaaaggctggaggagattctccatcttgggcgaagggccactgtcccttcatgctgtcggaactccaggatgggaagagcaagattgtgcagaaggcagccccagaagtccaggaagatgtgaaggctttcaagacagatctgcctagctccctggtctcagtcagcctaaggaagccattttccggtccccaggagcaggagcagatctctgggaaggtcacacacctgattcagaacaatatgcctggaaactatgtcttcagttatgaccagtttttcagggacaagatcatggagaagaaacaggatcacacctaccgtgtgttcaagactgtgaaccgctgggctgatgcatatccctttgcccaacatttctctgaggcatctgtggcctcaaaggatgtgtccgtctggtgtagtaatgattacctgggcatgagccgacaccctcaggtcttgcaagccacacaggagaccctgcagcgtcatggtgctggagctggtggcacccgcaacatctcaggcaccagtaagtttcatgtggagcttgagcaggagctggctgagctgcaccagaaggactcagccctgctcttctcctcctgctttgttgccaatgactctactctcttcaccttggccaagatcctgccagggtgcgagatttactcagacgcaggcaaccatgcttccatgatccaaggtatccgtaacagtggagcagccaagtttgtcttcaggcacaatgaccctgaccacctaaagaaacttctagagaagtctaaccctaagatacccaaaattgtggcctttgagactgtccactccatggatggtgccatctgtcccctcgaggagttgtgtgatgtgtcccaccagtatggggccctgaccttcgtggatgaggtccatgctgtaggactgtatgggtcccggggcgctgggattggggagcgtgatggaattatgcataagattgacatcatctctggaactcttggcaaggcctttggctgtgtgggcggctacattgccagcacccgtgacttggtggacatggtgcgctcctatgctgcaggcttcatctttaccacttctctgccccccatggtgctctctggagctctagaatctgtgcggctgctcaagggagaggagggccaagccctgaggcgagcccaccagcgcaatgtcaagcacatgcgccagctactcatggacaggggccttcctgtcatcccctgccccagccacatcatccccatccgggtgggcaatgcagcactcaacagcaagctctgtgatctcctgctctccaagcatggcatctatgtgcaggccatcaactacccaactgtcccccggggtgaagagctcctgcgcttggcaccctccccccaccacagccctcagatgatggaagattttgtggagaagctgctgctggcttggactgcggtggggctgcccctccaggatgtgtctgtggctgcctgcaatttctgtcgccgtcctgtacactttgagctcatgagtgagtgggaacgttcctacttcgggaacatggggccccagtatgtcaccacctatgcctgagaagccagctgcctaggattcacaccccacctgcgcttcacttgggtccaggcctactcctgtcttctgctttgttgtgtgcctctagctgaattgagcctaaaaataaagcacaaaccacagca

SEQ ID NO: 922 - DNA, 1795 bp, Homo sapiens
  source 1..1795: mol_type = unassigned DNA
acctgtcattcgttcgtcctcagtgcagggcaacaggactttaggttcaagatggtgactgcagccatgctgctacagtgctgcccagtgcttgcccggggccccacaagcctcctaggcaaggtggttaagactcaccagttcctgtttggtattggacgctgtcccatcctggctacccaaggaccaaactgttctcaaatccaccttaaggcaacaaaggctggaggagattctccatcttgggcgaagggccactgtcccttcatgctgtcggaactccaggatgggaagagcaagattgtgcagaaggcagccccagaagtccaggaagatgtgaaggctttcaagacaggaaactatgtcttcagttatgaccagtttttcagggacaagatcatggagaagaaacaggatcacacctaccgtgtgttcaagactgtgaaccgctgggctgatgcatatccctttgcccaacatttctctgaggcatctgtggcctcaaaggatgtgtccgtctggtgtagtaatgattacctgggcatgagccgacaccctcaggtcttgcaagccacacaggagaccctgcagcgtcatggtgctggagctggtggcacccgcaacatctcaggcaccagtaagtttcatgtggagcttgagcaggagctggctgagctgcaccagaaggactcagccctgctcttctcctcctgctttgttgccaatgactctactctcttcaccttggccaagatcctgccagggtgcgagatttactcagacgcaggcaaccatgcttccatgatccaaggtatccgtaacagtggagcagccaagtttgtcttcaggcacaatgaccctgaccacctaaagaaacttctagagaagtctaaccctaagatacccaaaattgtggcctttgagactgtccactccatggatggtgccatctgtcccctcgaggagttgtgtgatgtgtcccaccagtatggggccctgaccttcgtggatgaggtccatgctgtaggactgtatgggtcccggggcgctgggattggggagcgtgatggaattatgcataagattgacatcatctctggaactcttggcaaggcctttggctgtgtgggcggctacattgccagcacccgtgacttggtggacatggtgcgctcctatgctgcaggcttcatctttaccacttctctgccccccatggtgctctctggagctctagaatctgtgcggctgctcaagggagaggagggccaagccctgaggcgagcccaccagcgcaatgtcaagcacatgcgccagctactcatggacaggggccttcctgtcatcccctgccccagccacatcatccccatccgggtgggcaatgcagcactcaacagcaagctctgtgatctcctgctctccaagcatggcatctatgtgcaggccatcaactacccaactgtcccccggggtgaagagctcctgcgcttggcaccctccccccaccacagccctcagatgatggaagattttgtggagaagctgctgctggcttggactgcggtggggctgcccctccaggatgtgtctgtggctgcctgcaatttctgtcgccgtcctgtacactttgagctcatgagtgagtgggaacgttcctacttcgggaacatggggccccagtatgtcaccacctatgcctgagaagccagctgcctaggattcacaccccacctgcgcttcacttgggtccaggcctactcctgtcttctgctttgttgtgtgcctctagctg

SEQ ID NO: 923 - DNA, 959 bp, Homo sapiens
  source 1..959: mol_type = unassigned DNA
tggagcttgagcaggagctggctgagctgcaccagaaggactcagccctgctcttctcctcctgctttgttgccaatgactctactctcttcaccttggccaagatcctgccagggtgcgagatttactcagacgcaggcaaccatgcttccatgatccaaggtatccgtaacagtggagcagccaagtttgtcttcaggcacaatgaccctgaccacctaaagaaacttctagagaagtctaaccctaagatacccaaaattgtggcctttgagactgtccactccatggatggtgccatctgtcccctcgaggagttgtgtgatgtgtcccaccagtatggggccctgaccttcgtggatgaggtccatgctgtaggactgtatgggtcccggggcgctgggattggggagcgtgatggaattatgcataagattgacatcatctctggaactcttggcaaggcctttggctgtgtgggcggctacattgccagcacccgtgacttggtggacatggtgcgctcctatgctgcaggcttcatctttaccacttctctgccccccatggtgctctctggagctctagaatctgtgcggctgctcaagggagaggagggccaagccctgaggcgagcccaccagcgcaatgtcaagcacatgcgccagctactcatggacaggggccttcctgtcatcccctgccccagccacatcatccccatccggagaagctgctgctggcttggactgcggtggggctgcccctccaggatgtgtctgtggctgcctgcaatttctgtcgccgtcctgtacactttgagctcatgagtgagtgggaacgttcctacttcgggaacatggggccccagtatgtcaccacctatgcctgagaagccagctgcctaggattcacaccccacctgcgcttcacttgggtccaggcctactcctgtcttc

SEQ ID NO: 924 - DNA, 646 bp, Homo sapiens
  source 1..646: mol_type = unassigned DNA
acctgtcattcgttcgtcctcagtgcagggcaacaggactttaggttcaagatggtgactgcagccatgctgctacagtgctgcccagtgcttgcccggggccccacaagcctcctaggcaaggtggttaagactcaccagttcctgtttggtattggacgctgtcccatcctggctacccaaggaccaaactgttctcaaatccaccttaaggcaacaaaggctggaggagattctccatcttgggcgaagggccactgtcccttcatgctgtcggaactccaggatgggaagagcaagattgtgcagaaggcagccccagaagtccaggaagatgtgaaggctttcaagacagggagaccctgcagcgtcatggtgctggagctggtggcacccgcaacatctcaggcaccagtaagtttcatgtggagcttgagcaggagctggctgagctgcaccagaaggactcagccctgctcttctcctcctgctttgttgccaatgactctactctcttcaccttggccaagatcctgccagggtgcgagatttactcagacgcaggcaaccatgcttccatgatccaaggtatccgtaacagtggagcagccaagtttgtcttcaggcacaatgaccctgaccacct

SEQ ID NO: 925 - DNA, 582 bp, Homo sapiens
  source 1..582: mol_type = unassigned DNA
acctgtcattcgttcgtcctcagtgcagggcaacagattctccatcttgggcgaagggccactgtcccttcatgctgtcggaactccaggatgggaagagcaagattgtgcagaaggcagccccagaagtccaggaagatgtgaaggctttcaagacaggaaactatgtcttcagttatgaccagtttttcagggacaagatcatggagaagaaacaggatcacacctaccgtgtgttcaagactgtgaaccgctgggctgatgcatatccctttgcccaacatttctctgaggcatctgtggcctcaaaggatgtgtccgtctggtgtagtaatgattacctgggcatgagccgacaccctcaggtcttgcaagccacacaggagaccctgcagcgtcatggtgctggagctggtggcacccgcaacatctcaggcaccagtaagtttcatgtggagcttgagcaggagctggctgagctgcaccagaaggactcagccctgctcttctcctcctgctttgttgccaatgactctactctcttcaccttggccaagatcctgccagggtgcgagatttact

SEQ ID NO: 926 - DNA, 664 bp, Homo sapiens
  source 1..664: mol_type = unassigned DNA
acctgtcattcgttcgtcctcagtgcagggcaacagattctccatcttgggcgaagggccactgtcccttcatgctgtcggaactccaggatgggaagagcaagattgtgcagaaggcagccccagaagtccaggaagatgtgaaggctttcaagacagatctgcctagctccctggtctcagtcagcctaaggaagccattttccggtccccaggagcaggagcagatctctgggaaggtcacacacctgattcagaacaatatgcctggaaactatgtcttcagttatgaccagtttttcagggacaagatcatggagaagaaacaggatcacacctaccgtgtgttcaagactgtgaaccgctgggctgatgcatatccctttgcccaacatttctctgaggcatctgtggcctcaaaggatgtgtccgtctggtgtagtaatgattacctgggcatgagccgacaccctcaggtcttgcaagccacacaggagaccctgcagcgtcatggtgctggagctggtggcacccgcaacatctcaggcaccagtaagtttcatgtggagcttgagcaggagctggctgagctgcaccagaaggactcagccctgctcttctcctcctgctttgttgccaatgactctactctcttcaccttggc

SEQ ID NO: 927 - DNA, 658 bp, Homo sapiens
  source 1..658: mol_type = unassigned DNA
acctgtcattcgttcgtcctcagtgcagggcaacaggactttaggttcaagatggtgactgcagccatgctgctacagtgctgcccagtgcttgcccggggccccacaagcctcctaggcaaggtggttaagactcaccagttcctgtttggtattggacgctgtcccatcctggctacccaaggaccaaactgttctcaaatccaccttaaggcaacaaaggctggaggagattctccatcttgggcgaagggccactgtcccttcatgctgtcggaactccaggatgggaagagcaagattgtgcagaaggcagccccagaagtccaggaagatgtgaaggctttcaagacaggaaactatgtcttcagttatgaccagtttttcagggacaagatcatggagaagaaacaggatcacacctaccgtgtgttcaagactgtgaaccgctgggctgatgcatatccctttgcccaacatttctctgaggcatctgtggcctcaaaggatgtgtccgtctggtgtagtaatgattacctgggcatgagccgacaccctcaggtcttgcaagccacacaggagaccctgcagcgtcatggtgctggagctggtggcacccgcaacatctcaggcaccagtaagtttcatgtggagcttg

SEQ ID NO: 928 - DNA, 4701 bp, Homo sapiens
  source 1..4701: mol_type = unassigned DNA
agagcagcccggagaccgctgccgccgctgccgctgctaccaccgctgccacctgaggagacccgccgcccccccgtcgccgcctcctgcgagtccttcttagcacctggcgtttcatgcacattgccactgccattattattatcattccaatacaaggaaaataaaagaagataccagcgaaaagaaccgcttacacctttccgaattactcaagtgtctcctggaaacagagggtcgttgtccccggaggagcagccgaagggcccgtgggctggtgttgaccgggagggaggaggagttgggggcattgcgtggtggaaagttgcgtgcggcagagaaccgaaggtgcagcgccacagcccaggggacggtgtgtctgggagaagacgctgcccctgcgtcgggacccgccagcgcgcgggcaccgcggggcccgggacgacgccccctcctgcggcgtggactccgtcagtggcccaccaagaaggaggaggaatatggaatccaagggggccagttcctgccgtctgctcttctgcctcttgatctccgccaccgtcttcaggccaggccttggatggtatactgtaaattcagcatatggagataccattatcataccttgccgacttgacgtacctcagaatctcatgtttggcaaatggaaatatgaaaagcccgatggctccccagtatttattgccttcagatcctctacaaagaaaagtgtgcagtacgacgatgtaccagaatacaaagacagattgaacctctcagaaaactacactttgtctatcagtaatgcaaggatcagtgatgaaaagagatttgtgtgcatgctagtaactgaggacaacgtgtttgaggcacctacaatagtcaaggtgttcaagcaaccatctaaacctgaaattgtaagcaaagcactgtttctcgaaacagagcagctaaaaaagttgggtgactgcatttcagaagacagttatccagatggcaatatcacatggtacaggaatggaaaagtgctacatccccttgaaggagcggtggtcataatttttaaaaaggaaatggacccagtgactcagctctataccatgacttccaccctggagtacaagacaaccaaggctgacatacaaatgccattcacctgctcggtgacatattatggaccatctggccagaaaacaattcattctgaacaggcagtatttgatatttactatcctacagagcaggtgacaatacaagtgctgccaccaaaaaatgccatcaaagaaggggataacatcactcttaaatgcttagggaatggcaaccctcccccagaggaatttttgttttacttaccaggacagcccgaaggaataagaagctcaaatacttacacactgacggatgtgaggcgcaatgcaacaggagactacaagtgttccctgatagacaaaaaaagcatgattgcttcaacagctatcacagttcactatttggatttgtccttaaacccaagtggagaagtgactagacagattggtgatgccctacccgtgtcatgcacaatatctgctagcaggaatgcaactgtggtatggatgaaagataacatcaggcttcgatctagcccgtcattttctagtcttcattatcaggatgctggaaactatgtctgcgaaactgctctgcaggaggttgaaggactaaagaaaagagagtcattgactctcattgtagaaggcaaacctcaaataaaaatgacaaagaaaactgatcccagtggactatctaaaacaataatctgccatgtggaaggttttccaaagccagccattcaatggacaattactggcagtggaagcgtcataaaccaaacagaggaatctccttatattaatggcaggtattatagtaaaattatcatttcccctgaagagaatgttacattaacttgcacagcagaaaaccaactggagagaacagtaaactccttgaatgtctctgctataagtattccagaacacgatgaggcagacgagataagtgatgaaaacagagaaaaggtgaatgaccaggcaaaactaattgtgggaatcgttgttggtctcctccttgctgcccttgttgctggtgtcgtctactggctgtacatgaagaagtcaaagactgcatcaaaacatgtaaacaaggacctcggtaatatggaagaaaacaaaaagttagaagaaaacaatcacaaaactgaagcctaagagagaaactgtcctagttgtccagagataaaaatcatatagaccaattgaagcatgaacgtggattgtatttaagacataaacaaagacattgacagcaattcatggttcaagtattaagcagttcattctaccaagctgtcacaggttttcagagaattatctcaagtaaaacaaatgaaatttaattacaaacaataagaacaagttttggcagccatgataataggtcatatgttgtgtttggttcaattttttttccgtaaatgtctgcactgaggatttctttttggtttgccttttatgtaaattttttacgtagctatttttatacactgtaagctttgttctgggagttgctgttaatctgatgtataatgtaatgtttttatttcaattgtttatatggataatctgagcaggtacatttctgattctgattgctatcagcaatgccccaaactttctcataagcacctaaaacccaaaggtggcagcttgtgaagattggggacactcatattgccctaattaaaaactgtgatttttatcacaagggaggggaggccgagagtcagactgatagacaccataggagccgactctttgatatgccaccagcgaactctcagaaataaatcacagatgcatatagacacacatacataatggtactcccaaactgacaattttacctattctgaaaaagacataaaacagaatttggtagcacttacctctacagacacctgctaataaattattttctgtcaaaagaaaaaacacaagcatgtgtgagagacagtttggaaaaatcatggtcaacattcccattttcatagatcacaatgtaaatcactataattacaaattggtgttaaatcctttgggttatccactgccttaaaattatacctatttcatgtttaaaaagatatcaatcagaattggagtttttaacagtggtcattatcaaagctgtgttattttccacagaatatagaatatatatttttttcgtgtgtgtttttgttaactaccctacagatattgaatgcaccttgagataatttagtgtttttaactgatacataatttatcaagcagtacatgaaagtgtaataataaaatgtctatgtatctttagttacattcaaatttgtaactttataaacatgttttatgcttgaggaaatttttaaggtggtagtataaatggaaactttttgaagtagaccagatatgggctacttgtgactagacttttaaactttgctctttcaagcagaagcctggtttctgggagaacactgcacagcgatttctttcccaggatttacacaactttaaagggaagataaatgaacatcagatttctaggtatagaactatgttattgaaaggaaaaggaaaactggtgtttgtttcttagactcatgaaataaaaaattatgaaggcaatgaaaaataaattgaaaattaaagtcagatgagaataggaataatactttgccacttctgcattatttagaaacatacgttattgtacatttgtaaaccatttactgtctgggcaatagtgactccgtttaataaaagcttccgtagtgcattggtatggattaaatgcataaaatattcttagactcgatgctgtataaaatattatgggaaaaaaagaaaatacgttattttgcctctaaacttttattgaagttttatttggcaggaaaaaaaattgaatcttggtcaacatttaaaccaaagtaaaaggggaaaaaccaaagttatttgttttgcatggctaagccattctgttatctctgtaaatactgtgatttcttttttattttctctttagaattttgttaaagaaattctaaaatttttaaacacctgctctccacaataaatcacaaacactaaaataaaattacttccatataaatattattttctcttttggtgtgggagatcaaaggtttaaagtctaacttctaagatatatttgcagaaagaagcaacatgacaatagagagagttatgctacaattatttcttggtttccacttgcaatggttaattaagtccaaaaacagctgtcagaacctcgagagcagaacatgagaaactcagagctctggaccgaaagcagaaagtttgccgggaaaaaaaaagacaacattattaccatcgattcagtgcctggataaagaggaaagcttacttgtttaatggcagccacatgcacgaagatgctaagaagaaaaagaattccaaatcctcaacttttgaggtttcggctctccaatttaactctttggcaacaggaaacaggttttgcaagttcaaggttcactccctatatgtgattataggaattgtttgtggaaatggattaacatacccgtctatgcctaaaagataataaaactgaaatatgtcttca

SEQ ID NO: 929 - DNA, 1770 bp, Homo sapiens
  source 1..1770: mol_type = unassigned DNA
cggagaccgctgccgccgctgccgctgctaccaccgctgccacctgaggagacccgccgcccccccgtcgccgcctcctgcgagtccttcttagcacctggcgtttcatgcacattgccactgccattattattatcattccaatacaaggaaaataaaagaagataccagcgaaaagaaccgcttacacctttccgaattactcaagtgtctcctggaaacagagggtcgttgtccccggaggagcagccgaagggcccgtgggctggtgttgaccgggagggaggaggagttgggggcattgcgtggtggaaagttgcgtgcggcagagaaccgaaggtgcagcgccacagcccaggggacggtgtgtctgggagaagacgctgcccctgcgtcgggacccgccagcgcgcgggcaccgcggggcccgggacgacgccccctcctgcggcgtggactccgtcagtggcccaccaagaaggaggaggaatatggaatccaagggggccagttcctgccgtctgctcttctgcctcttgatctccgccaccgtcttcaggccaggccttggatggtatactgtaaattcagcatatggagataccattatcataccttgccgacttgacgtacctcagaatctcatgtttggcaaatggaaatatgaaaagcccgatggctccccagtatttattgccttcagatcctctacaaagaaaagtgtgcagtacgacgatgtaccagaatacaaagacagattgaacctctcagaaaactacactttgtctatcagtaatgcaaggatcagtgatgaaaagagatttgtgtgcatgctagtaactgaggacaacgtgtttgaggcacctacaatagtcaaggtgttcagtaagtagtctgcagcagtgtcactgctaagtgggattgatggccagtaccagaccatgttctttagaaagaagactgaactctctgtagtgtctctatagcaggtatctatataaggggacttaaagagatcttcattctgctcatatatactatcagcaaagaaaacaaagagtatgaaattcaaataggagatttgcagtgaggaactaaaataatattctctgttactttgtcatgtaaaaatgtcgtgagctatgaagtactactactgataactagcaggtgatcttaatttttactgacatgtacaaataagtgttgtgtgatacatacatagatatatgatatatatgtaatcatgtatatcacgcatacatatacatgtatttggctgaaccaaatgaaattgccattttgctgcataataaaaaaatataagcaaattcaaactatattttaacagaggtataaattttccatttatatatatccacatatataaatatcccatatatatccacatacaaatattttatatattatatatattagagatatagatacatttccatcctgacctttattgactggttattgatttagatttcaaaaagtattcacttgctttagaaaattgtcctaaaattaaaaaaactcactataccctgaatgcttatgtgggatacaccaaggggagaaagtagagtagtgatggaagaagagaaaattgtagaagaaacttggaataattatagtcactatgacaaaattactttgcctaatgatagcatatagttaatgttactgtgcaaataactgtgcaaatgaatgacttgagaagttataattaaagtatttcatcttttaaaactcaaataaaaa

SEQ ID NO: 930 - DNA, 4189 bp, Homo sapiens
  source 1..4189: mol_type = unassigned DNA
gcccgggacgacgccccctcctgcggcgtggactccgtcagtggcccaccaagaaggaggaggaatatggaatccaagggggccagttcctgccgtctgctcttctgcctcttgatctccgccaccgtcttcaggccaggccttggatggtatactgtaaattcagcatatggagataccattatcataccttgccgacttgacgtacctcagaatctcatgtttggcaaatggaaatatgaaaagcccgatggctccccagtatttattgccttcagatcctctacaaagaaaagtgtgcagtacgacgatgtaccagaatacaaagacagattgaacctctcagaaaactacactttgtctatcagtaatgcaaggatcagtgatgaaaagagatttgtgtgcatgctagtaactgaggacaacgtgtttgaggcacctacaatagtcaaggtgttcaagcaaccatctaaacctgaaattgtaagcaaagcactgtttctcgaaacagagcagctaaaaaagttgggtgactgcatttcagaagacagttatccagatggcaatatcacatggtacaggaatggaaaagtgctacatccccttgaaggagcggtggtcataatttttaaaaaggaaatggacccagtgactcagctctataccatgacttccaccctggagtacaagacaaccaaggctgacatacaaatgccattcacctgctcggtgacatattatggaccatctggccagaaaacaattcattctgaacaggcagtatttgatatttactatcctacagagcaggtgacaatacaagtgctgccaccaaaaaatgccatcaaagaaggggataacatcactcttaaatgcttagggaatggcaaccctcccccagaggaatttttgttttacttaccaggacagcccgaaggaataagaagctcaaatacttacacactgacggatgtgaggcgcaatgcaacaggagactacaagtgttccctgatagacaaaaaaagcatgattgcttcaacagctatcacagttcactatttggatttgtccttaaacccaagtggagaagtgactagacagattggtgatgccctacccgtgtcatgcacaatatctgctagcaggaatgcaactgtggtatggatgaaagataacatcaggcttcgatctagcccgtcattttctagtcttcattatcaggatgctggaaactatgtctgcgaaactgctctgcaggaggttgaaggactaaagaaaagagagtcattgactctcattgtagaaggcaaacctcaaataaaaatgacaaagaaaactgatcccagtggactatctaaaacaataatctgccatgtggaaggttttccaaagccagccattcaatggacaattactggcagtggaagcgtcataaaccaaacagaggaatctccttatattaatggcaggtattatagtaaaattatcatttcccctgaagagaatgttacattaacttgcacagcagaaaaccaactggagagaacagtaaactccttgaatgtctctgctaatgaaaacagagaaaaggtgaatgaccaggcaaaactaattgtgggaatcgttgttggtctcctccttgctgcccttgttgctggtgtcgtctactggctgtacatgaagaagtcaaagactgcatcaaaacatgtaaacaaggacctcggtaatatggaagaaaacaaaaagttagaagaaaacaatcacaaaactgaagcctaagagagaaactgtcctagttgtccagagataaaaatcatatagaccaattgaagcatgaacgtggattgtatttaagacataaacaaagacattgacagcaattcatggttcaagtattaagcagttcattctaccaagctgtcacaggttttcagagaattatctcaagtaaaacaaatgaaatttaattacaaacaataagaacaagttttggcagccatgataataggtcatatgttgtgtttggttcaattttttttccgtaaatgtctgcactgaggatttctttttggtttgccttttatgtaaattttttacgtagctatttttatacactgtaagctttgttctgggagttgctgttaatctgatgtataatgtaatgtttttatttcaattgtttatatggataatctgagcaggtacatttctgattctgattgctatcagcaatgccccaaactttctcataagcacctaaaacccaaaggtggcagcttgtgaagattggggacactcatattgccctaattaaaaactgtgatttttatcacaagggaggggaggccgagagtcagactgatagacaccataggagccgactctttgatatgccaccagcgaactctcagaaataaatcacagatgcatatagacacacatacataatggtactcccaaactgacaattttacctattctgaaaaagacataaaacagaatttggtagcacttacctctacagacacctgctaataaattattttctgtcaaaagaaaaaacacaagcatgtgtgagagacagtttggaaaaatcatggtcaacattcccattttcatagatcacaatgtaaatcactataattacaaattggtgttaaatcctttgggttatccactgccttaaaattatacctatttcatgtttaaaaagatatcaatcagaattggagtttttaacagtggtcattatcaaagctgtgttattttccacagaatatagaatatatatttttttcgtgtgtgtttttgttaactaccctacagatattgaatgcaccttgagataatttagtgtttttaactgatacataatttatcaagcagtacatgaaagtgtaataataaaatgtctatgtatctttagttacattcaaatttgtaactttataaacatgttttatgcttgaggaaatttttaaggtggtagtataaatggaaactttttgaagtagaccagatatgggctacttgtgactagacttttaaactttgctctttcaagcagaagcctggtttctgggagaacactgcacagcgatttctttcccaggatttacacaactttaaagggaagataaatgaacatcagatttctaggtatagaactatgttattgaaaggaaaaggaaaactggtgtttgtttcttagactcatgaaataaaaaattatgaaggcaatgaaaaataaattgaaaattaaagtcagatgagaataggaataatactttgccacttctgcattatttagaaacatacgttattgtacatttgtaaaccatttactgtctgggcaatagtgactccgtttaataaaagcttccgtagtgcattggtatggattaaatgcataaaatattcttagactcgatgctgtataaaatattatgggaaaaaaagaaaatacgttattttgcctctaaacttttattgaagttttatttggcaggaaaaaaaattgaatcttggtcaacatttaaaccaaagtaaaaggggaaaaaccaaagttatttgttttgcatggctaagccattctgttatctctgtaaatactgtgatttcttttttattttctctttagaattttgttaaagaaattctaaaatttttaaacacctgctctccacaataaatcacaaacactaaaataaaattacttccatataaatattattttctcttttggtgtgggagatcaaaggtttaaagtctaacttctaagatatatttgcagaaagaagcaacatgacaatagagagagttatgctacaattatttcttggtttccacttgcaatggttaattaagtccaaaaacagctgtcagaacctcgagagcagaacatgagaaactcagagctctggaccgaaagcagaaagtttgccgggaaaaaaaaagacaacattattaccatcgattcagtgcctggataaagaggaaagcttacttgtttaatggcagccacatgcacgaagatgctaagaagaaaaagaattccaaatcctcaacttttgaggtttcggctctccaatttaactctttggcaacaggaaacaggttttgcaagttcaaggttcactccctatatgtgattataggaattgtttgtggaaatggattaacatacccg

SEQ ID NO: 931 - DNA, 1242 bp, Homo sapiens
  source 1..1242: mol_type = unassigned DNA
agtcattatttgaatggtttgtgcaattgacatatgcctcagtttttgtttttgttttttaaccaataagcatggaaaaaaaaaacctcctatgttagtttcttatttttcatatatagaaagtcatatggaatactcctgctatatggctatctctgatcttctgccccaggatatatttttcaggcattgaaggactgatgccttggatggtatactgtaaattcagcatatggagataccattatcataccttgccgacttgacgtacctcagaatctcatgtttggcaaatggaaatatgaaaagcccgatggctccccagtatttattgccttcagatcctctacaaagaaaagtgtgcagtacgacgatgtaccagaatacaaagacagattgaacctctcagaaaactacactttgtctatcagtaatgcaaggatcagtgatgaaaagagatttgtgtgcatgctagtaactgaggacaacgtgtttgaggcacctacaatagtcaaggtgttcaagcaaccatctaaacctgaaattgtaagcaaagcactgtttctcgaaacagagcagctaaaaaagttgggtgactgcatttcagaagacagttatccagatggcaatatcacatggtacaggaatggaaaagtgctacatccccttgaaggagcggtggtcataatttttaaaaaggaaatggacccagtgactcagctctataccatgacttccaccctggagtacaagacaaccaaggctgacatacaaatgccattcacctgctcggtgacatattatggaccatctggccagaaaacaattcattctgaacaggcagtatttgatatttactatcctacagagcaggtgacaatacaagtgctgccaccaaaaaatgccatcaaagaaggggataacatcactcttaaatgcttagggaatggcaaccctcccccagaggaatttttgttttacttaccaggacagcccgaaggaataagaagctcaaatacttacacactgacggatgtgaggcgcaatgcaacaggagactacaagtgttccctgatagacaaaaaaagcatgattgcttcaacagctatcacagttcactagttagcactttgaacagattttctgcttcacagatttggatttgtccttaaacccaagtggagaagtgactagacagattggtgatgccctacccgtgtcatgcacaatatctgctagcag

SEQ ID NO: 932 - DNA, 1818 bp, Homo sapiens
  source 1..1818: mol_type = unassigned DNA
aaaccctaaagcccagtgcttttagtgacatttcaaatgccttggatggtatactgtaaattcagcatatggagataccattatcataccttgccgacttgacgtacctcagaatctcatgtttggcaaatggaaatatgaaaagcccgatggctccccagtatttattgccttcagatcctctacaaagaaaagtgtgcagtacgacgatgtaccagaatacaaagacagattgaacctctcagaaaactacactttgtctatcagtaatgcaaggatcagtgatgaaaagagatttgtgtgcatgctagtaactgaggacaacgtgtttgaggcacctacaatagtcaaggtgttcaagcaaccatctaaacctgaaattgtaagcaaagcactgtttctcgaaacagagcagctaaaaaagttgggtgactgcatttcagaagacagttatccagatggcaatatcacatggtacaggaatggaaaagtgctacatccccttgaaggagcggtggtcataatttttaaaaaggaaatggacccagtgactcagctctataccatgacttccaccctggagtacaagacaaccaaggctgacatacaaatgccattcacctgctcggtgacatattatggaccatctggccagaaaacaattcattctgaacaggcagtatttgatatttactatcctacagagcaggtgacaatacaagtgctgccaccaaaaaatgccatcaaagaaggggataacatcactcttaaatgcttagggaatggcaaccctcccccagaggaatttttgttttacttaccaggacagcccgaaggaataagaagctcaaatacttacacactgacggatgtgaggcgcaatgcaacaggagactacaagtgttccctgatagacaaaaaaagcatgattgcttcaacagctatcacagttcactatttggatttgtccttaaacccaagtggagaagtgactagacagattggtgatgccctacccgtgtcatgcacaatatctgctagcaggaatgcaactgtggtatggatgaaagataacatcaggcttcgatctagcccgtcattttctagtcttcattatcaggatgctggaaactatgtctgcgaaactgctctgcaggaggttgaaggactaaagaaaagagagtcattgactctcattgtagaaggcaaacctcaaataaaaatgacaaagaaaactgatcccagtggactatctaaaacaataatctgccatgtggaaggttttccaaagccagccattcaatggacaattactggcagtggaagcgtcataaaccaaacagaggaatctccttatattaatggcaggtattatagtaaaattatcatttcccctgaagagaatgttacattaacttgcacagcagaaaaccaactggagagaacagtaaactccttgaatgtctctgctataagtattccagaacacgatgaggcagacgagataagtgatgaaaacagagaaaaggtgaatgaccaggcaaaactaattgtgggaatcgttgttggtctcctccttgctgcccttgttgctggtgtcgtctactggctgtacatgaagaagtcaaagactgcatcaaaacatgtaaacaaggacctcggtaatatggaagaaaacaaaaagttagaagaaaacaatcacaaaactgaagcctaagagagaaactgtcctagttgtccagagataaaaatcatatagaccaattgaagcatgaacgtggattgtatttaagacataaacaaagacattgacagcaa

SEQ ID NO: 933 - DNA, 564 bp, Homo sapiens
  source 1..564: mol_type = unassigned DNA
ttaatcaattgctcctgaagtctttattaaaatttatgtttcttagaactacctatatttaaaatgtttttgtccatcatctcaggttccacatttgaaagattttctcacatttacactttcatattgtgacttggcttaagagagcaaccatctaaacctgaaattgtaagcaaagcactgtttctcgaaacagagcagctaaaaaagttgggtgactgcatttcagaagacagttatccagatggcaatatcacatggtacaggaatggaaaagtgctacatccccttgaaggagcggtggtcataatttttaaaaaggaaatggacccagtgactcagctctataccatgacttccaccctggagtacaagacaaccaaggctgacatacaaatgccattcacctgctcggtgacatattatggaccatctggccagaaaacaattcattctgaacaggcagtatttgatatttactatcctacagagcaggtgacaatacaagtgctgccaccaaaaaatgccatcaaagaaggggataacatcactcttaaatgctta

SEQ ID NO: 934 - DNA, 2496 bp, Homo sapiens
  source 1..2496: mol_type = unassigned DNA
gttgggtgactgcatttcagaagacagttatccagatggcaatatcacatggtacaggaatggaaaagtgctacatccccttgaaggagcggtggtcataatttttaaaaaggaaatggacccagtgactcagctctataccatgacttccaccctggagtacaagacaaccaaggctgacatacaaatgccattcacctgctcggtgacatattatggaccatctggccagaaaacaattcattctgaacaggcagtatttgatatttactatttggatttgtccttaaacccaagtggagaagtgactagacagattggtgatgccctacccgtgtcatgcacaatatctgctagcaggaatgcaactgtggtatggatgaaagataacatcaggcttcgatctagcccgtcattttctagtcttcattatcaggatgctggaaactatgtctgcgaaactgctctgcaggaggttgaaggactaaagaaaagagagtcattgactctcattgtagaaggcaaacctcaaataaaaatgacaaagaaaactgatcccagtggactatctaaaacaataatctgccatgtggaaggttttccaaagccagccattcaatggacaattactggcagtggaagcgtcataaaccaaacagaggaatctccttatattaatggcaggtattatagtaaaattatcatttcccctgaagagaatgttacattaacttgcacagcagaaaaccaactggagagaacagtaaactccttgaatgtctctgctataagtattccagaacacgatgaggcagacgagataagtgatgaaaacagagaaaaggtgaatgaccaggcaaaactaattgtgggaatcgttgttggtctcctccttgctgcccttgttgctggtgtcgtctactggctgtacatgaagaagtcaaagactgcatcaaaacatgtaaacaaggacctcggtaatatggaagaaaacaaaaagttagaagaaaacaatcacaaaactgaagcctaagagagaaactgtcctagttgtccagagataaaaatcatatagaccaattgaagcatgaacgtggattgtatttaagacataaacaaagacattgacagcaattcatggttcaagtattaagcagttcattctaccaagctgtcacaggttttcagagaattatctcaagtaaaacaaatgaaatttaattacaaacaataagaacaagttttggcagccatgataataggtcatatgttgtgtttggttcaattttttttccgtaaatgtctgcactgaggatttctttttggtttgccttttatgtaaattttttacgtagctatttttatacactgtaagctttgttctgggagttgctgttaatctgatgtataatgtaatgtttttatttcaattgtttatatggataatctgagcaggtacatttctgattctgattgctatcagcaatgccccaaactttctcataagcacctaaaacccaaaggtggcagcttgtgaagattggggacactcatattgccctaattaaaaactgtgatttttatcacaagggaggggaggccgagagtcagactgatagacaccataggagccgactctttgatatgccaccagcgaactctcagaaataaatcacagatgcatatagacacacatacataatggtactcccaaactgacaattttacctattctgaaaaagacataaaacagaatttggtagcacttacctctacagacacctgctaataaattattttctgtcaaaagaaaaaacacaagcatgtgtgagagacagtttggaaaaatcatggtcaacattcccattttcatagatcacaatgtaaatcactataattacaaattggtgttaaatcctttgggttatccactgccttaaaattatacctatttcatgtttaaaaagatatcaatcagaattggagtttttaacagtggtcattatcaaagctgtgttattttccacagaatatagaatatatatttttttcgtgtgtgtttttgttaactaccctacagatattgaatgcaccttgagataatttagtgtttttaactgatacataatttatcaagcagtacatgaaagtgtaataataaaatgtctatgtatctttagttacattcaaatttgtaactttataaacatgttttatgcttgaggaaatttttaaggtggtagtataaatggaaactttttgaagtagaccagatatgggctacttgtgactagacttttaaactttgctctttcaagcagaagcctggtttctgggagaacactgcacagcgatttctttcccaggatttacacaactttaaagggaagataaatgaacatcagatttctaggtatagaactatgttattgaaaggaaaaggaaaactggtgtttgtttcttagactcatgaaataaaaaattatgaaggcaatg

SEQ ID NO: 935 - DNA, 2845 bp, Homo sapiens
  source 1..2845: mol_type = unassigned DNA
ttgggacttagtagctgtacaataaatacttgttcagttgagttggaattttctcatacagatcagactatgacagtaagatttttataaagattgttttccatcaactggatgagaaatggaatagcactttttaaaaatatctgctgctatagtaaattctctctgaagaaacacaactactatctcatggtttttcaatttatcacctgctgtctaaagatgcttgattttccaacatttatgccttactgtctctttatataatatttacctagtcatcatctttattttcttccagaagtgacttaagatttttttttcttaaggtgataggccctaggggaatatttatatcccctcaaaatatcaatcacgttaactgcaaataaatggataatcaattagattgaccactctcttgtctaaactagtctcaaggctggcttgaaaaactaggctaatcatgctatagtccaattattttagtcatataaatcagttctgaatgttcaaatgcagttagaagaaatttattttctttcatcttttcttctccaaaatattttgactatcttacatttcagagttagcactttgaacagattttctgcttcacagatttggatttgtccttaaacccaagtggagaagtgactagacagattggtgatgccctacccgtgtcatgcacaatatctgctagcaggaatgcaactgtggtatggatgaaagataacatcaggcttcgatctagcccgtcattttctagtcttcattatcaggatgctggaaactatgtctgcgaaactgctctgcaggaggttgaaggactaaagaaaagagagtcattgactctcattgtagaaggcaaacctcaaataaaaatgacaaagaaaactgatcccagtggactatctaaaacaataatctgccatgtggaaggttttccaaagccagccattcaatggacaattactggcagtggaagcgtcataaaccaaacagaggaatctccttatattaatggcaggtattatagtaaaattatcatttcccctgaagagaatgttacattaacttgcacagcagaaaaccaactggagagaacagtaaactccttgaatgtctctgctataagtattccagaacacgatgaggcagacgagataagtgatgaaaacagagaaaaggtgaatgaccaggcaaaactaattgtgggaatcgttgttggtctcctccttgctgcccttgttgctggtgtcgtctactggctgtacatgaagaagtcaaagactgcatcaaaacatgtaaacaaggacctcggtaatatggaagaaaacaaaaagttagaagaaaacaatcacaaaactgaagcctaagagagaaactgtcctagttgtccagagataaaaatcatatagaccaattgaagcatgaacgtggattgtatttaagacataaacaaagacattgacagcaattcatggttcaagtattaagcagttcattctaccaagctgtcacaggttttcagagaattatctcaagtaaaacaaatgaaatttaattacaaacaataagaacaagttttggcagccatgataataggtcatatgttgtgtttggttcaattttttttccgtaaatgtctgcactgaggatttctttttggtttgccttttatgtaaattttttacgtagctatttttatacactgtaagctttgttctgggagttgctgttaatctgatgtataatgtaatgtttttatttcaattgtttatatggataatctgagcaggtacatttctgattctgattgctatcagcaatgccccaaactttctcataagcacctaaaacccaaaggtggcagcttgtgaagattggggacactcatattgccctaattaaaaactgtgatttttatcacaagggaggggaggccgagagtcagactgatagacaccataggagccgactctttgatatgccaccagcgaactctcagaaataaatcacagatgcatatagacacacatacataatggtactcccaaactgacaattttacctattctgaaaaagacataaaacagaatttggtagcacttacctctacagacacctgctaataaattattttctgtcaaaagaaaaaacacaagcatgtgtgagagacagtttggaaaaatcatggtcaacattcccattttcatagatcacaatgtaaatcactataattacaaattggtgttaaatcctttgggttatccactgccttaaaattatacctatttcatgtttaaaaagatatcaatcagaattggagtttttaacagtggtcattatcaaagctgtgttattttccacagaatatagaatatatatttttttcgtgtgtgtttttgttaactaccctacagatattgaatgcaccttgagataatttagtgtttttaactgatacataatttatcaagcagtacatgaaagtgtaataataaaatgtctatgtatctttagttacattcaaatttgtaactttataaacatgttttatgcttgaggaaatttttaaggtggtagtataaatggaaactttttgaagtagaccagatatgggctacttgtgactagacttttaaactttgctctttcaagcagaagcctggtttctgggagaacactgcacagcgatttctttcccaggatttacacaactttaaagggaagataaatgaacatcagatttctaggtatagaactatgttattgaaaggaaaaggaaaactggtgtttgtttcttagactcatgaaataaaaaattatgaaggcaatg

SEQ ID NO: 936 - DNA, 783 bp, Homo sapiens
  source 1..783: mol_type = unassigned DNA
caactggagagaacagtaaactccttgaatgtctctgctataagtattccagaacacgatgaggcagacgagataagtgatgaaaacagagaaaaggtgaatgaccaggcaaaactaattgtgggaatcgttgttggtctcctccttgctgcccttgttgctggtgtcgtctactggctgtacatgaagaagtcaaagtgagttgtggaaaaaagatcttcatcgttcattgactttcactgggagaaaatacaatgtgctaattttgctcactccagtcgtgcatataatttatacaataaggaagatgtatccccaaatcaggttgattatatattttgtttcaactaattttgactacactgcctttgtcagggacatggcttgggatactgtttcacatgtgtccgtttatttgtctcaatcaatagcctgaattcaattatttgattttttcagtgcttgagtgaattttttaaagcgtatacttcctaaaggtcaacaaccatagactttttggttgaagttggagaagattcattaaaagtacctagtacatcttgtagggactgccaggtgtctttgcagtgacacatctggccagcaatgaaactgctgctgaggtaggaatatcttattgttattactcccatattctagttagttgactttgatccatataagagtctatatcagagaaaatcatgtcattatgtcaacttgagtttttaaaaatggattaaagtaccaacactacattaaaaatgctttagagatgttaaa

SEQ ID NO: 937 - DNA, 2107 bp, Homo sapiens
  source 1..2107: mol_type = unassigned DNA
ctatcagaaccaaattgctgagccagtcacctgtgttccaggagccgaatcagaaatgtcatcctcaggcacgccagacttacctgtcctactcaccgatttgaagattcaatatactaagatcttcataaacaatgaatggcatgattcagtgagtggcaagaaatttcctgtctttaatcctgcaactgaggaggagctctgccaggtagaagaaggagataaggaggatgttgacaaggcagtgaaggccgcaagacaggcttttcagattggatccccgtggcgtactatggatgcttccgagagggggcgactattatacaagttggctgatttaatcgaaagagatcgtctgctgctggcgacaatggagtcaatgaatggtggaaaactctattccaatgcatatctgaatgatttagcaggctgcatcaaaacattgcgctactgtgcaggttgggctgacaagatccagggccgtacaataccaattgatggaaatttttttacatatacaagacatgaacctattggtgtatgtggccaaatcattccttggaatttcccgttggttatgctcatttggaagatagggcctgcactgagctgtggaaacacagtggttgtcaaaccagcagagcaaactcctctcactgctctccacgtggcatctttaataaaagaggcagggtttcctcctggagtagtgaatattgttcctggttatgggcctacagcaggggcagccatttcttctcacatggatatagacaaagtagccttcacaggatcaacagaggttggcaagttgatcaaagaagctgccgggaaaagcaatctgaagagggtgaccctggagcttggaggaaagagcccttgcattgtgttagctgatgccgacttggacaatgctgttgaatttgcacaccatggggtattctaccaccagggccagtgttgtatagccgcatccaggatttttgtggaagaatcaatttatgatgagtttgttcgaaggagtgttgagcgggctaagaagtatatccttggaaatcctctgaccccaggagtcactcaaggccctcagattgacaaggaacaatatgataaaatacttgacctcattgagagtgggaagaaagaaggggccaaactggaatgtggaggaggcccgtgggggaataaaggctactttgtccagcccacagtgttctctaatgttacagatgagatgcgcattgccaaagaggagatttttggaccagtgcagcaaatcatgaagtttaaatctttagatgacgtgatcaaaagagcaaacaatactttctatggcttatcagcaggagtgtttaccaaagacattgataaagccataacaatctcctctgctctgcaggcaggaacagtgtgggtgaattgctatggcgtggtaagtgcccagtgcccctttggtggattcaagatgtctggaaatggaagagaactgggagagtacggtttccatgaatatacagaggtcaaaacagtcacagtgaaaatctctcagaagaactcataaagaaaatacaagagtggagagaagctcttcaatagctaagcatctccttacagtcactaatatagtagattttaaagacaaaatttttcttttcttgatttttttaaacataagctaaatcatattagtattaatactacccatagaaaacttgacatgtagcttcttctgaaagaattatttgccttctgaaatgtgacccccaagtcctatcctaaataaaaaaagacaaattcggatgtatgatctctctagctttgtcatagttatgtgattttcctttgtagctacttttgcaggataataattttatagaaaaggaacagttgcatttagcttctttcccttagtgactcttgaagtacttaacatacacgttaactgcagagtaaattgctctgttcccagtagttataaagtccttggactgttttgaaaagtttcctaggatgtcatgtctgcttgtcaaaagaaataatccctgtaatatttagctgtaaactgaatataaagcttaataaaaacaaccttgcatgattcttgtta

SEQ ID NO: 938 - DNA, 822 bp, Homo sapiens
  source 1..822: mol_type = unassigned DNA
tctatcagaaccaaattgctgagccagtcacctgtgttccaggagccgaatcagaaatgtcatcctcaggcacgccagacttacctgtcctactcaccgatttgaagattcaatatactaagatcttcataaacaatgaatggcatgattcagtgagtggcaagaaatttcctgtctttaatcctgcaactgaggaggagctctgccaggtagaagaaggagataaggaggatgttgacaaggcagtgaaggccgcaagacaggcttttcagattggatccccgtggcgtactatggatgcttccgagagggggcgactattatacaagttggctgatttaatcgaaagagatcgtctgctgctggcgacaatggagtcaatgaatggtggaaaactctattccaatgcatatctgaatgatttagcaggctgcatcaaaacattgcgctactgtgcaggttgggctgacaagatccagggccgtacaataccaattgatggaaatttttttacatatacaagacatgaacctattggtgtatgtggccaaatcattccttggaatttcccgttggttatgctcatttggaagatagggcctgcactgagctgtggaaacacagtggttgtcaaaccagcagagcaaactcctctcactgctctccacgtggcatctttaataaaagaggcagggtttcctcctggagtagtgaatattgttcctggttatggggccagtgttgtatagccgcatccaggatttttgtggaagaatcaatttatgatgagtttgttcgaaggagtgttgagcgggctaagaa

SEQ ID NO: 939 - DNA, 879 bp, Homo sapiens
  source 1..879: mol_type = unassigned DNA
caccgatttgaagattcaatatactaagatcttcataaacaatgaatggcatgattcagtgagtggcaagaaatttcctgtctttaatcctgcaactgaggaggagctctgccaggtagaagaaggagataaggaggatgttgacaaggcagtgaaggccgcaagacaggcttttcagattggatccccgtggcgtactatggatgcttccgagagggggcgactattatacaagttggctgatttaatcgaaagagatcgtctgctgctggcgacaatggagtcaatgaatggtggaaaactctattccaatgcatatctgaatgatttagcaggctgcatcaaaacattgcgctactgtgcaggttgggctgacaagatccagggccgtacaataccaattgatggaaatttttttacatatacaagacatgaacctattggtgtatgtggccaaatcattccttggaatttcccgttggttatgctcatttggaagatagggcctgcactgagctgtggaaacacagtggttgtcaaaccagcagagcaaactcctctcactgctctccacgtggcatctttaataaaagaggcagggtttcctcctggagtagtgaatattgttcctggttatgggcctacagcaggggcagccatttcttctcacatggatatagacaaagtagccttcacaggatcaacagaggtaatattatttactcagggcaaaagttaagaatgtctgcattgccagctatgaagtatgttttatgtaactatttttgagccaacaattttaaaacaaaaactctttttaatgatttgttacttattttagccttcaaacatatggatagaatataagcagatgtagtt

SEQ ID NO: 940 - DNA, 806 bp, Homo sapiens
  source 1..806: mol_type = unassigned DNA
agaagtccaggatgggaagagagatctgcagactcccagggaacctacagctttctccttcacagcattgcaggaggagccgaatcagaaatgtcatcctcaggcacgccagacttacctgtcctactcaccgatttgaagattcaatatactaagatcttcataaacaatgaatggcatgattcagtgagtggcaagaaatttcctgtctttaatcctgcaactgaggaggagctctgccaggtagaagaaggagataaggaggatgttgacaaggcagtgaaggccgcaagacaggcttttcagattggatccccgtggcgtactatggatgcttccgagagggggcgactattatacaagttggctgatttaatcgaaagagatcgtctgctgctggcgacaatggagtcaatgaatggtggaaaactctattccaatgcatatctgaatgatttagcaggctgcatcaaaacattgcgctactgtgcaggttgggctgacaagatccagggccgtacaataccaattgatggaaatttttttacatatacaagacatgaacctattggtgtatgtggccaaatcattccttggaatttcccgttggttatgctcatttggaagatagggcctgcactgagctgtggaaacacagtggttgtcaaaccagcagagcaaactcctctcactgctctccacgtggcatctttaataaaagaggcagggtttcctcctggagtagtgaatattgttcctggttatgggcctacagcaggggcagccatttcttctcacatggatat

SEQ ID NO: 941 - DNA, 805 bp, Homo sapiens
  source 1..805: mol_type = unassigned DNA
gtggccaggatcgggtctgggaagctcggagatttcactgtgagtggagtcagagggaaggcatttggagcaaaggcttctgtaagagggagtaggatggaaattgatctttgaagaaagcaagacagaagaagggagatggaaagatgaaatcattttaaaattgctggtaacaaacgaaggagccgaatcagaaatgtcatcctcaggcacgccagacttacctgtcctactcaccgatttgaagattcaatatactaagatcttcataaacaatgaatggcatgattcagtgagtggcaagaaatttcctgtctttaatcctgcaactgaggaggagctctgccaggtagaagaaggagataaggaggatgttgacaaggcagtgaaggccgcaagacaggcttttcagattggatccccgtggcgtactatggatgcttccgagagggggcgactattatacaagttggctgatttaatcgaaagagatcgtctgctgctggcgacaatggagtcaatgaatggtggaaaactctattccaatgcatatctgaatgatttagcaggctgcatcaaaacattgcgctactgtgcaggttgggctgacaagatccagggccgtacaataccaattgatggaaatttttttacatatacaagacatgaacctattggtgtatgtggccaaatcattccttggaatttcccgttggttatgctcatttggaagatagggcctgcactgagctgtggaaacacagtggttgtcaaaccagcagagcaaactcctctcactgctctc

SEQ ID NO: 942 - DNA, 604 bp, Homo sapiens
  source 1..604: mol_type = unassigned DNA
ctactcaccgatttgaagattcaatatactaagatcttcataaacaatgaatggcatgattcagtgagtggcaagaaatttcctgtctttaatcctgcaactgaggaggagctctgccaggtagaagaaggagataaggaggatgttgacaaggcagtgaaggccgcaagacaggcttttcagattggatccccgtggcgtactatggatgcttccgagagggggcgactattatacaagttggctgatttaatcgaaagagatcgtctgctgctggcgacaatggagtcaatgaatggtggaaaactctattccaatgcatatctgaatgatttagcaggctgcatcaaaacattgcgctactgtgcaggttgggctgacaagatccagggccgtacaataccaattgatggaaatttttttacatatacaagacatgaacctattggtgtatgtggccaaatcattcctgtaagcttttctcctatataattctcaattttaaaaagaagagttcttattctatctaatgatgaagctttctctaaaacagatggatgcttatgtatttgttaaatgtggagtaaatgtaagatttgttgaa

SEQ ID NO: 943 - DNA, 209 bp, Homo sapiens
  source 1..209: mol_type = unassigned DNA
cagctttctccttcacagcattgcaggagcttgcagcctgaaacatcagtcagatgagatcttgggtgaagagaaaagactgtataacatatttactgtctgctgagtgcataagaatgcagtctctgccagtcactggagacatcaagccctgaccactacaggaagcacatggtttccattacataaaatttacacatttggatttg

SEQ ID NO: 944 - DNA, 2107 bp, Homo sapiens; identical to SEQ ID NO: 937
  source 1..2107: mol_type = unassigned DNA

SEQ ID NO: 945 - DNA, 822 bp, Homo sapiens; identical to SEQ ID NO: 938
  source 1..822: mol_type = unassigned DNA

SEQ ID NO: 946 - DNA, 879 bp, Homo sapiens; identical to SEQ ID NO: 939
  source 1..879: mol_type = unassigned DNA

SEQ ID NO: 947 - DNA, 806 bp, Homo sapiens; identical to SEQ ID NO: 940
  source 1..806: mol_type = unassigned DNA

SEQ ID NO: 948 - DNA, 805 bp, Homo sapiens; identical to SEQ ID NO: 941
  source 1..805: mol_type = unassigned DNA

SEQ ID NO: 949 - DNA, 604 bp, Homo sapiens; identical to SEQ ID NO: 942
  source 1..604: mol_type = unassigned DNA

SEQ ID NO: 950 - DNA, 209 bp, Homo sapiens; identical to SEQ ID NO: 943
  source 1..209: mol_type = unassigned DNA

SEQ ID NO: 951 - DNA, 571 bp, Homo sapiens
  source 1..571: mol_type = unassigned DNA
gacaaagtctatggctgagtgctccagtctgatctcaggctcccaggatcacgtgggtatcaaacggaggagctgcaggtgagccagtcggcatctttgcaactggctcctgagaccagacgcctcgggtcacaaggatgtctgagtgtgagatatttatcaacaatgaatggcacgaatccaagagtgggaaaaagtttgctacatgtaacccttcaactcgggagcaaatatgtgaagtggaagaaggagataagcccgacgtggacaaggctgtggaggctgcacaggttgccttccagaggggctcgccatggcgccggctggatgccctgagtcgtgggcggctgctgcaccagctggctgacctggtggagagggaccgcgccaccttggccgccctggagacgatggatacagggaagccatttcttcatgcttttttcatcgacctggagggctgtattagaaccctcagatactttgcagggtgggcagacaaaatccagggcaagaccatccccacagatgacaacgtcgtgtgcttcaccaggcatgagcccattggtgt

SEQ ID NO: 952 - DNA, 3924 bp, Homo sapiens
  source 1..3924: mol_type = unassigned DNA
attcccgagcgccgcgagccggccgaagtcgggcgagcgcgccgtgcggcggctgggagtgggctgcatgtgccgcgcggggagcccgcccgacttcggggaggcagcggggcgccgtggccccgcggctcagctccctgccgggtcgggtgtcccagccctgcgacttccggggcccggcggctcctcggggagctcgtccacaggcagcctccggggcgagagagcgcgcggcgcgggcgccgggacggtccgcggcacgcgggtggagccgccggcgctcgggctcccgcaggggcggcgggcggggcggggtgaggcgggccggccgccctcccctctcctccctcccgcagcccgccctcccttcctccggtcccgcagccaattaggcggccccctcgggcgggaggcgtggggcgctgcataaagcggcggggagctgccaccccgggagcgggctgcgcagtgtccgggccgagccggtgcgccgcagactagggcgcctcgggccagggagcgcggaggagccatggccaccgctaacggggccgtggaaaacgggcagccggacaggaagccgccggccctgccgcgccccatccgcaacctggaggtcaagttcaccaagatatttatcaacaatgaatggcacgaatccaagagtgggaaaaagtttgctacatgtaacccttcaactcgggagcaaatatgtgaagtggaagaaggagataagcccgacgtggacaaggctgtggaggctgcacaggttgccttccagaggggctcgccatggcgccggctggatgccctgagtcgtgggcggctgctgcaccagctggctgacctggtggagagggaccgcgccaccttggccgccctggagacgatggatacagggaagccatttcttcatgcttttttcatcgacctggagggctgtattagaaccctcagatactttgcagggtgggcagacaaaatccagggcaagaccatccccacagatgacaacgtcgtgtgcttcaccaggcatgagcccattggtgtctgtggggccatcactccatggaacttccccctgctgatgctggtgtggaagctggcacccgccctctgctgtgggaacaccatggtcctgaagcctgcggagcagacacctctcaccgccctttatctcggctctctgatcaaagaggccgggttccctccaggagtggtgaacattgtgccaggattcgggcccacagtgggagcagcaatttcttctcaccctcagatcaacaagatcgccttcaccggctccacagaggttggaaaactggttaaagaagctgcgtcccggagcaatctgaagcgggtgacgctggagctgggggggaagaacccctgcatcgtgtgtgcggacgctgacttggacttggcagtggagtgtgcccatcagggagtgttcttcaaccaaggccagtgttgcacggcagcctccagggtgttcgtggaggagcaggtctactctgagtttgtcaggcggagcgtggagtatgccaagaaacggcccgtgggagaccccttcgatgtcaaaacagaacaggggcctcagattgatcaaaagcagttcgacaaaatcttagagctgatcgagagtgggaagaaggaaggggccaagctggaatgcgggggctcagccatggaagacaaggggctcttcatcaaacccactgtcttctcagaagtcacagacaacatgcggattgccaaagaggagattttcgggccagtgcaaccaatactgaagttcaaaagtatcgaagaagtgataaaaagagcgaatagcaccgactatggactcacagcagccgtgttcacaaaaaatctcgacaaagccctgaagttggcttctgccttagagtctggaacggtctggatcaactgctacaacgccctctatgcacaggctccatttggtggctttaaaatgtcaggaaatggcagagaactaggtgaatacgctttggccgaatacacagaagtgaaaactgtcaccatcaaacttggcgacaagaacccctgaaggaaaggcggggctccttcctcaaacatcggacggcggaatgtggcagatgaaatgtgctggaggaaaaaaatgacatttctgaccttcccgggacacattcttctggaggctttacatctactggagttgaatgattgctgttttcctctcactctcctgtttattcaccagactggggatgcctataggttgtctgtgaaatcgcagtcctgcctggggagggagctgttggccatttctgtgtttccctttaaaccagatcctggagacagtgagatactcagggcgttgttaacagggagtggtatttgaagtgtccagcagttgcttgaaatgctttgccgaatctgactccagtaagaatgtgggaaaaccccctgtgtgttctgcaagcagggctcttgcaccagcggtctcctcagggtggacctgcttacagagcaagccacgcctctttccgaggtgaaggtgggaccattccttgggaaaggattcacagtaaggttttttggtttttgttttttgttttcttgtttttaaaaaaaggatttcacagtgagaaagttttggttagtgcataccgtggaagggcgccagggtctttgtggattgcatgttgacattgaccgtgagattcggcttcaaaccaatactgcctttggaatatgacagaatcaatagcccagagagcttagtcaaagacgatatcacggtctaccttaaccaaggcactttcttaagcagaaaatattgttgaggttacctttgctgctaaagatccaatcttctaacgccacaacagcatagcaaatcctaggataattcacctcctcatttgacaaatcagagctgtaattcgctttaacaaattacgcatttctatcacgttcactaacagcttatgataagtctgtgtagtcttccttttctccagttctgttacccaatttagattagtaaagcgtacacaactggaaagactgctgtaataacacagccttgttatttttaagtcctattttgatattaatttctgattagttagtaaataacacctggattctatggaggacctcggtcttcatccaagtggcctgagtatttcactggcaggttgtgaatttttcttttcctctttggggatccaaatgatgatgtgcaatttcatgttttaacttgggaaactgaaagtgttcccatatagcttcaaaaacaaaaacaaatgtgttatccgacggatacttttatggttactaactagtactttcctaattgggaaagtagtgcttaagtttgcaaattaagttggggagggcaataataaaatgagggcccgtaacagaaccagtgtgtgtataacgaaaaccatgtataaaatgggcctatcacccttgtcagagatataaattaccacatttgccttcccttcatcagctaacacttatcacttatactaccaataacttgttaaatcaggatttggcttcatacactgaattttcagtattttatctcaagtagatatagacactaaccttgatagtgatacgttagagggttcctattcttccattgtacgataatgtctttaatatgaaatgctacattatttataattggtagagttattgtatctttttatagttgtaagtacacagaggtggtatatttaaacttctgtaatatactgtatttagaaatggaaatatatatagtgttaggtttcacttcttttaaggtttacccctgtggtgtggtttaaaaatctataggcctgggaattccgatcctagctgcagatcgcatcccacaatgcgagaatgataaaataaaattggatatttgagaaa

SEQ ID NO: 953 - DNA, 713 bp, Homo sapiens
  source 1..713: mol_type = unassigned DNA
gggagctgccaccccgggagcgggctgcgcagtgtccgggccgagccggtgcgccgcagactagggcgcctcgggccagggagcgcggaggagccatggccaccgctaacggggccgtggaaaacgggcagccggacaggaagccgccggccctgccgcgccccatccgcaacctggaggtcaagttcaccaagatatttatcaacaatgaatggcacgaatccaagagtgggaaaaagtttgctacatgtaacccttcaactcgggagcaaatatgtgaagtggaagaaggagataagcccgacgtggacaaggctgtggaggctgcacaggttgccttccagaggggctcgccatggcgccggctggatgccctgagtcgtgggcggctgctgcaccagctggctgacctggtggagagggaccgcgccaccttggccatgacaacgtcgtgtgcttcaccaggcatgagcccattggtgtctgtggggccatcactccatggaacttccccctgctgatgctggtgtggaagctggcacccgccctctgctgtgggaacaccatggtcctgaagcctgcggagcagacacctctcaccgccctttatctcggctctctgatcaaagaggccgggttccctccaggagtggtgaacattgtgccaggattcgggcccacagtgggagcagcaatttcttctcaccctcaga

SEQ ID NO: 954 - DNA, 1670 bp, Homo sapiens
  source 1..1670: mol_type = unassigned DNA
gcgcagtgtccgggccgagccggtgcgccgcagactagggcgcctcgggccagggagcgcggaggagccatggccaccgctaacggggccgtggaaaacgggcagccggacaggaagccgccggccctgccgcgccccatccgcaacctggaggtcaagttcaccaaggtgaggcgggcgcccctcccacccgacggccgcgggcccctgcgctgggcagccagactcggggcggcgggggcgagggagcagcgggccgggggtccgccgggcgccgccgagacccgagcctccctgcccgggcgcggctctccagaaaccgcacctttcgcgggacgtctcgggcgggatcgcaggcggcggggctcggcgctgtgagcctcgaagccgggaaaccgaggccgtccagcgcccgcgcggggccgggccgcccgcatccctgcgaggccccgacgtgtccctgcgctgcccgctttgatcgcgagtggaggtgcgcgccgcgttgactcggagcgcgctggttttggggagctccctccccaaaaacccctgcgatgatttccagggtggacgagtctggctttgagagggtcggagggtccgagagcgccaagagagagtccgggaggcagatggcggagctgcagttggaagactggggaagcgggtcctccgagcaaagcgcagcgggcgccttccgtgcttagtttatacccggctcagcagcagaacgaggaggagtaggaaggtgctcgcttactgacgaaacctccccggagcccagaggtcccggtgtttacacacaaggcgcgcgctccggaaggtcgcagacctgggcctttgggaagcggtgggtcgcgaggccgcagaagcgcacggttctctgcctcctcgctctgtgggctgggaggctacagcgttggcagaacggcgagattacctgcccggggcagaaaggaataaaagaagatggtgaggcctccgaggcctctgagctggggctgaggagggccgagagacccgggtccgggagcgcgacccgatggaggacacccccaggctgtctggcgtgcgcgtctgtcgtgggccggtgctggggcactttagaggcacaggccaggccgagagccattgccttaactttccccacctttggcttctcttgatttttgcttttacccatagcccccaactccagctgacaccgcacttagagaatttcctcatccgttttactttaagaagtagcaattatctttctcaaagaattttaatcaagcggagaaagttgcagggcactatgtgtggccttcagatttgggtctcttggcacttaattcccaatgtcggctgagcctctgatcacaagacatttaaattaactgttttcagaaggctctgtaatcaacaaagacacgtcgctgtaaactaaacgctggaaattattcttaatgtagttttatttgtaatatcagcttcagagtgaaaattccaacacgaattctgggaagagtgaaaatggtacccgaattttgtaagaccctaaccccaggtgcttggctgctgctactgatggttaagtggggaggttgtttgttttcttttggttgtacaggatttcaaaatactgtatatagaaaccagacagtaaatgtattatggtcctttta

SEQ ID NO: 955 - DNA, 576 bp, Homo sapiens
  source 1..576: mol_type = unassigned DNA
ccgggccgagccggtgcgccgcagactagggcgcctcgggccagggagcgcggaggagccatggccaccgctaacggggccgtggaaaacgggcagccggacaggaagccgccggccctgccgcgccccatccgcaacctggaggtcaagttcaccaagatatttatcaacaatgaatggcacgaatccaagagtgggaaaaagtttgctacatgtaacccttcaactcgggagcaaatatgtgaagtggaagaaggagataagcccgacgtggacaaggctgtggaggctgcacaggttgccttccagaggggctcgccatggcgccggctggatgccctgagtcgtgggcggctgctgcaccagctggctgacctggtggagagggaccgcgccaccttggccggcagctcccactgcagccaccccagagccagctaaccttcagagagcttcctgggaacacacaagcacacacgactggccacacagcagaggccactgtgctacagatggaagatcagatgccagtgtgcgttccttcccagcacagctttaaatccgcctggcctccaa

SEQ ID NO: 956 - DNA, 3104 bp, Homo sapiens
  source 1..3104: mol_type = unassigned DNA
agggcgcctcgggccagggagcgcggaggagccatggccaccgctaacggggccgtggaaaacgggcagccggacaggaagccgccggccctgccgcgccccatccgcaacctggaggtcaagttcaccaagatatttatcaacaatgaatggcacgaatccaagagtgggaaaaagtttgctacatgtaacccttcaactcgggagcaaatatgtgaagtggaagaaggagataagcccgacgtggacaaggctgtggaggctgcacaggttgccttccagaggggctcgccatggcgccggctggatgccctgagtcgtgggcggctgctgcaccagctggctgacctggtggagagggaccgcgccaccttggccgccgggttccctccaggagtggtgaacattgtgccaggattcgggcccacagtgggagcagcaatttcttctcaccctcagatcaacaagatcgccttcaccggctccacagaggttggaaaactggttaaagaagctgcgtcccggagcaatctgaagcgggtgacgctggagctgggggggaagaacccctgcatcgtgtgtgcggacgctgacttggacttggcagtggagtgtgcccatcagggagtgttcttcaaccaaggccagtgttgcacggcagcctccagggtgttcgtggaggagcaggtctactctgagtttgtcaggcggagcgtggagtatgccaagaaacggcccgtgggagaccccttcgatgtcaaaacagaacaggggcctcagattgatcaaaagcagttcgacaaaatcttagagctgatcgagagtgggaagaaggaaggggccaagctggaatgcgggggctcagccatggaagacaaggggctcttcatcaaacccactgtcttctcagaagtcacagacaacatgcggattgccaaagaggagattttcgggccagtgcaaccaatactgaagttcaaaagtatcgaagaagtgataaaaagagcgaatagcaccgactatggactcacagcagccgtgttcacaaaaaatctcgacaaagccctgaagttggcttctgccttagagtctggaacggtctggatcaactgctacaacgccctctatgcacaggctccatttggtggctttaaaatgtcaggaaatggcagagaactaggtgaatacgctttggccgaatacacagaagtgaaaactgtcaccatcaaacttggcgacaagaacccctgaaggaaaggcggggctccttcctcaaacatcggacggcggaatgtggcagatgaaatgtgctggaggaaaaaaatgacatttctgaccttcccgggacacattcttctggaggctttacatctactggagttgaatgattgctgttttcctctcactctcctgtttattcaccagactggggatgcctataggttgtctgtgaaatcgcagtcctgcctggggagggagctgttggccatttctgtgtttccctttaaaccagatcctggagacagtgagatactcagggcgttgttaacagggagtggtatttgaagtgtccagcagttgcttgaaatgctttgccgaatctgactccagtaagaatgtgggaaaaccccctgtgtgttctgcaagcagggctcttgcaccagcggtctcctcagggtggacctgcttacagagcaagccacgcctctttccgaggtgaaggtgggaccattccttgggaaaggattcacagtaaggttttttggtttttgttttttgttttcttgtttttaaaaaaaggatttcacagtgagaaagttttggttagtgcataccgtggaagggcgccagggtctttgtggattgcatgttgacattgaccgtgagattcggcttcaaaccaatactgcctttggaatatgacagaatcaatagcccagagagcttagtcaaagacgatatcacggtctaccttaaccaaggcactttcttaagcagaaaatattgttgaggttacctttgctgctaaagatccaatcttctaacgccacaacagcatagcaaatcctaggataattcacctcctcatttgacaaatcagagctgtaattcgctttaacaaattacgcatttctatcacgttcactaacagcttatgataagtctgtgtagtcttccttttctccagttctgttacccaatttagattagtaaagcgtacacaactggaaagactgctgtaataacacagccttgttatttttaagtcctattttgatattaatttctgattagttagtaaataacacctggattctatggaggacctcggtcttcatccaagtggcctgagtatttcactggcaggttgtgaatttttcttttcctctttggggatccaaatgatgatgtgcaatttcatgttttaacttgggaaactgaaagtgttcccatatagcttcaaaaacaaaaacaaatgtgttatccgacggatacttttatggttactaactagtactttcctaattgggaaagtagtgcttaagtttgcaaattaagttggggagggcaataataaaatgagggcccgtaacagaaccagtgtgtgtataacgaaaaccatgtataaaatgggcctatcacccttgtcagagatataaattaccacatttgccttcccttcatcagctaacacttatcacttatactaccaataacttgttaaatcaggatttggcttcatacactgaattttcagtattttatctcaagtagatatagacactaaccttgatagtgatacgttagagggttcctattcttccattgtacgataatgtctttaatatgaaatgctacattatttataattggtagagttattgtatctttttatagttgtaagtacacagaggtggtatatttaaacttctgtaatatactgtatttagaaatggaaatatatatagtgttaggtttcacttcttttaaggtttacccctgtggtgtggtttaaaaatctataggcctgggaattccgatcctagctgcagatcgcatcccacaatgcgagaatgataaaataaaattggatatttgagaaa

SEQ ID NO: 957 - DNA, 586 bp, Homo sapiens
  source 1..586: mol_type = unassigned DNA
gtgatctgtgttctgtcctggaggttggaaaactggttaaagaagctgcgtcccggagcaatctgaagcgggtgacgctggagctgggggggaagaacccctgcatcgtgtgtgcggacgctgacttggacttggcagtggagtgtgcccatcagggagtgttcttcaaccaaggccagtgttgcacggcagcctccagggtgttcgtggaggagcaggtctactctgagtttgtcaggcggagcgtggagtatgccaagaaacggcccgtgggagaccccttcgatgtcaaaacagaacaggggcctcagattgatcaaaagcagttcgacaaaatcttagagctgatcgagagtgggaagaaggaaggggccaagctggaatgcgggggctcagccatggaagacaaggggctcttcatcaaacccactgtcttctcagaagtcacagacaacatgcggattgccaaagaggagattttcgggccagtgcaaccaatactgaagttcaaaagtatcgaagaagtgataaaaagagcgaatagcaccgactatggactcacagcagccgtgttcacaaaaaatct

SEQ ID NO: 958 - DNA, 3179 bp, Homo sapiens
  source 1..3179: mol_type = unassigned DNA
tctgcggcaccaggactgagtagaagggagagagtggagaaggggaattgcagagagaaaaccaggggctgtttttctctcggagaggcgggtaggcactgggcgggcagaagcgccgctatccacccggatgcgcagctgctaaggggccgcctctgcaagcggctgcaaattcccggagggcagcgtctcctttcgctctgctgtgtccgtagcacatggcaggtccttccaaccctcctgctaccatgaagattgcagtgattggacagagcctgtttggccaggaagtttactgccacctgaggaaggagggccacgaagtggtgggtgtgttcactgttccagacaaggatggaaaggccgaccccctgggtctggaagctgagaaggatggagtgccggtattcaagtactcccggtggcgtgcaaaaggacaggctttgcctgatgtggtggcaaaataccaggctttgggggccgagctcaacgtcctgcccttctgcagccaattcatccccatggagataatcagtgccccccggcatggctccatcatctatcacccgtcactgctccctaggcaccgaggggcctcggccatcaactggaccctcattcacggagataagaaaggggggttttccatcttctgggcggatgatggtctggacaccggagacctgctgctgcagaaggagtgtgaggtgctcccggacgacaccgtgagcacgctgtacaaccgcttcctcttccctgaaggcatcaaagggatggtgcaggccgtgaggctgatcgctgagggcaaagcccccagactccctcagcctgaggaaggagccacctatgaggggattcagaagaaggagacagccaagatcaactgggaccagccggcagaggccattcacaactggatccgcgggaacgacaaggtgccgggagcctggacagaggcctgtgaacagaaactgacatttttcaactcaacgctgaacacttcaggcctggtgcccgagggagacgctttgcccatcccaggagcccatcggccaggggtggtcaccaaagcaggactcatcctctttgggaatgatgacaaaatgctgctggtgaagaatattcagctggaggatggcaaaatgatcctggcctcgaacttctttaagggggcagccagcagtgtccttgagctgacagaggcagagctggttactgcggaggctgtgcggagtgtttggcagcggatcctccccaaagtcctggaggttgaagactccactgatttcttcaagtcaggggccgcgtctgtggacgttgtgaggctggtggaggaagtgaaggagctgtgtgatggcctggagttagaaaatgaagatgtgtacatggcatccacctttggggacttcatccagctgttagtgaggaagctgcgaggggacgatgaggagggcgagtgcagcattgactacgtggaaatggcagtgaacaagcgcactgtccgcatgccccaccagctcttcattgggggggagttcgtggatgccgagggcgccaagacctctgagaccatcaatcccaccgatggaagtgtcatctgccaggtatccctggcccaagtcaccgacgtcgacaaggcagtggccgcagccaaggatgcctttgagaatggacggtgggggaagatcagtgcgcgggaccggggccggctgatgtacaggttggcagatctcatggagcagcaccaggaggagctggccaccattgaggccctggatgcgggtgccgtctacacgctggccctgaagacccacgtgggcatgtccatccagaccttccgctactttgctggctggtgtgacaagatccagggctccaccatccccatcaaccaggccagacccaaccgcaacctgaccttgaccaggaaggagcctgttggggtttgtggcatcatcatcccctggaactatcccctgatgatgctgtcctggaagacagctgcctgcctggctgccgggaacacagtggtgatcaagcctgctcaggtgaccccactcacagccttgaagtttgcagagctgacattaaaggccggcattcccaaaggtgtggttaacgtcctcccaggatctggctccctggtcggccagagactctcagaccatcctgatgtgaggaaaatcgggttcacaggctccacagaggtgggcaagcacatcatgaaaagctgtgccataagtaacgtgaagaaggtgtccctggaactgggcgggaagtcacccctcatcatctttgctgactgtgacctcaacaaggctgtgcagatggggatgagttctgttttcttcaacaaaggagagaattgcattgcagcaggccgactctttgtggaggactccattcatgatgagttcgtgcggagagtggtagaagaggtgcggaagatgaaggtgggcaacccgctggacagggacaccgaccacgggccgcagaatcaccatgcccaccttgtgaagctgatggagtactgccagcatggcgtgaaggaaggggccacactggtctgcggcgggaatcaggtccctcggccagggttcttctttgagccaactgttttcacagacgtggaagaccacatgttcatagccaaggaggagtccttcgggcctgtcatgatcatctctcggtttgctgatggggacttggatgccgtgctgtctcgggccaatgccacggaatttggcctggcttctggtgtcttcaccagggacatcaacaaggccctgtatgtcagtgacaagctccaggcaggcactgtgtttgtcaacacgtacaacaagaccgacgtggccgctcccttcggaggattcaaacagtctggatttggcaaagatctaggagaggcggctctgaacgagtacctgcgggtcaagacagtgaccttcgaatactgaagaaaggtctttgtgagaagaaagtccctgcccctccctcgtggctggggccccctccctcttgagcctgggtgcacagcacctcccacctggggggctagtggaagccctcctgcctgcacaccatgtctgcatcttggacgccctctgtccagtcagaagcagcccttggctgggtgaggtgtgcccctcccagggagaataaagcttctgaagagagac

SEQ ID NO: 959 - DNA, 3157 bp, Homo sapiens
  source 1..3157: mol_type = unassigned DNA
actgcgctcaagtggacggtcgcgcgtgcagagggaggccggatagcagaccccacaacgtggctcctggggccccgctatcgagagctcaggccccgcgggcacttgcctaggagaggaaagaatcttcccaaagtgcagacagagacggaatttaatcaggagtcccagacttggagtttggaggcatgggctctggtgtcaggtccttccaaccctcctgctaccatgaagattgcagtgattggacagagcctgtttggccaggaagtttactgccacctgaggaaggagggccacgaagtggtgggtgtgttcactgttccagacaaggatggaaaggccgaccccctgggtctggaagctgagaaggatggagtgccggtattcaagtactcccggtggcgtgcaaaaggacaggctttgcctgatgtggtggcaaaataccaggctttgggggccgagctcaacgtcctgcccttctgcagccaattcatccccatggagataatcagtgccccccggcatggctccatcatctatcacccgtcactgctccctaggcaccgaggggcctcggccatcaactggaccctcattcacggagataagaaaggggggttttccatcttctgggcggatgatggtctggacaccggagacctgctgctgcagaaggagtgtgaggtgctcccggacgacaccgtgagcacgctgtacaaccgcttcctcttccctgaaggcatcaaagggatggtgcaggccgtgaggctgatcgctgagggcaaagcccccagactccctcagcctgaggaaggagccacctatgaggggattcagaagaaggagacagccaagatcaactgggaccagccggcagaggccattcacaactggatccgcgggaacgacaaggtgccgggagcctggacagaggcctgtgaacagaaactgacatttttcaactcaacgctgaacacttcaggcctggtgcccgagggagacgctttgcccatcccaggagcccatcggccaggggtggtcaccaaagcaggactcatcctctttgggaatgatgacaaaatgctgctggtgaagaatattcagctggaggatggcaaaatgatcctggcctcgaacttctttaagggggcagccagcagtgtccttgagctgacagaggcagagctggttactgcggaggctgtgcggagtgtttggcagcggatcctccccaaagtcctggaggttgaagactccactgatttcttcaagtcaggggccgcgtctgtggacgttgtgaggctggtggaggaagtgaaggagctgtgtgatggcctggagttagaaaatgaagatgtgtacatggcatccacctttggggacttcatccagctgttagtgaggaagctgcgaggggacgatgaggagggcgagtgcagcattgactacgtggaaatggcagtgaacaagcgcactgtccgcatgccccaccagctcttcattgggggggagttcgtggatgccgagggcgccaagacctctgagaccatcaatcccaccgatggaagtgtcatctgccaggtatccctggcccaagtcaccgacgtcgacaaggcagtggccgcagccaaggatgcctttgagaatggacggtgggggaagatcagtgcgcgggaccggggccggctgatgtacaggttggcagatctcatggagcagcaccaggaggagctggccaccattgaggccctggatgcgggtgccgtctacacgctggccctgaagacccacgtgggcatgtccatccagaccttccgctactttgctggctggtgtgacaagatccagggctccaccatccccatcaaccaggccagacccaaccgcaacctgaccttgaccaggaaggagcctgttggggtttgtggcatcatcatcccctggaactatcccctgatgatgctgtcctggaagacagctgcctgcctggctgccgggaacacagtggtgatcaagcctgctcaggtgaccccactcacagccttgaagtttgcagagctgacattaaaggccggcattcccaaaggtgtggttaacgtcctcccaggatctggctccctggtcggccagagactctcagaccatcctgatgtgaggaaaatcgggttcacaggctccacagaggtgggcaagcacatcatgaaaagctgtgccataagtaacgtgaagaaggtgtccctggaactgggcgggaagtcacccctcatcatctttgctgactgtgacctcaacaaggctgtgcagatggggatgagttctgttttcttcaacaaaggagagaattgcattgcagcaggccgactctttgtggaggactccattcatgatgagttcgtgcggagagtggtagaagaggtgcggaagatgaaggtgggcaacccgctggacagggacaccgaccacgggccgcagaatcaccatgcccaccttgtgaagctgatggagtactgccagcatggcgtgaaggaaggggccacactggtctgcggcgggaatcaggtccctcggccagggttcttctttgagccaactgttttcacagacgtggaagaccacatgttcatagccaaggaggagtccttcgggcctgtcatgatcatctctcggtttgctgatggggacttggatgccgtgctgtctcgggccaatgccacggaatttggcctggcttctggtgtcttcaccagggacatcaacaaggccctgtatgtcagtgacaagctccaggcaggcactgtgtttgtcaacacgtacaacaagaccgacgtggccgctcccttcggaggattcaaacagtctggatttggcaaagatctaggagaggcggctctgaacgagtacctgcgggtcaagacagtgaccttcgaatactgaagaaaggtctttgtgagaagaaagtccctgcccctccctcgtggctggggccccctccctcttgagcctgggtgcacagcacctcccacctggggggctagtggaagccctcctgcctgcacaccatgtctgcatcttggacgccctctgtccagtcagaagcagcccttggctgggtgaggtgtgcccctcccagggagaataaagcttctgaagagag

SEQ ID NO: 960 - DNA, 3670 bp, Homo sapiens
  source 1..3670: mol_type = unassigned DNA
aaaaaaaaaaaaaaagaagagcaaagcagagctctgagcagcttcctgccccagcatccctggttctgctgctttcttcttcccaggcagccgtgtcacacagacctgcagctgagatgggtgccatctccctgggttgcttctgcagaggaggcctctcctccccagtggagcctcctacctgccggctattgactgagtgtccagctgaggacagcatccctgcagtgcatttcttgcccactgatgtgatgtgttcatgactcccagcctctctgtttgctctgccactaatacaaggaggtgccccagcctctgggcccctgcagctgtgccagcggatggtgctgttttgtattccttaatttgtgcagcaccagctgcgtgcaggcactgtgcttggcaccggggctgtaataggacccagacagatgcgtgcctgccctggccaggctcatgctctgcaggtggggtcagaggtcaacatgcagtagaggaaaggacagcagatggggtgcacaggcaggctgtggttttatacggggcgatcagggaggcaccccagagaagggaacacaggcctgcaggaaatgaggtgtggagtgggcagcaggaagggcagtccagggggcagtggggcacaggcctggtgtgtacaggccagaaaggaaaggcaggtggccgtgtgaagccgcaaggggtgggggggagtggggaggcactggccgggtcttgcttcttgcagcaaagcatgctttgggcctacccaggtccctgccacctggggtcccaatgcccctacctgccctggagggaccggccccaccagccctctgttccttgcagctgtgccataagtaacgtgaagaaggtgtccctggaactgggcgggaagtcacccctcatcatctttgctgactgtgacctcaacaaggctgtgcagatggggatgagttctgttttcttcaacaaaggagagaattgcattgcagcaggccgactctttgtggaggactccattcatgatgagttcgtgcggagagtggtagaagaggtgcggaagatgaaggtgggcaacccgctggacagggacaccgaccacgggccgcagaatcaccatgcccaccttgtgaagctgatggagtactgccagcatggcgtgaaggaaggggccacactggtctgcggcgggaatcaggtccctcggccagggttcttctttgagccaactgttttcacagacgtggaagaccacatgttcatagccaaggaggagtccttcgggcctgtcatgatcatctctcggtttgctgatggggacttggatgccgtgctgtctcgggccaatgccacggaatttggcctggcttctggtgtcttcaccagggacatcaacaaggccctgtatgtcagtgacaagctccaggcaggcactgtgtttgtcaacacgtacaacaagaccgacgtggccgctcccttcggaggattcaaacagtctggatttggcaaagatctaggtaacctactcctgcctgtggggttgctttcatttattcattcaacaaacatctgttcaaaaccacttagggccaggtcctatctcagatgcagggacgtagccttgaacatgatggctgtcagggttcgcttcttactgggagggaacttgtgacaagtccgtgagcaagatgcttgcagaggggggtcgtgctgggaagaaggcaagaagaggggcctggaggagacactccagccaggaggcactgggggcctctctggtgtggtggcacctgtgctacccagacctgcatagcagggaggagttggccatgaagacccaggggcccgtgtttctggctgagggttcagcaggtccttgggggaaccagctttggtcgtggagctgcagagaggccagagtggtgggagtgggccaagggggagcaggagggaggagagaaggcctgagaggcaggtaggggccagattgaaggcccatgggccatggtcaggggctcaggttgcatccttagtgtaaagaggagccatgggaccaaatgtacccccgggtgaacaccacgggtgttgcaagtctcccagtagaggtgaagttactcaggcggcagcaggcggggtccaccggcacatagcaggcggggtcccccggcacacagcacaggctccccagtgctctgcctgctgggtggcatggagttctgctccggccctctctccctgggctgctccaagccttgggcctcgtcctgctctctcagcaggggggactagacaggtctgatgggcaagcttggcaagggtggctggcaaggtccggggaagccatatgctgtctcagaggtcccacctgtctctccaggctcctgtgccagcccagagaccacagggaaggtcatgctgaggctgggggtcaaaggctggtcactgtttccagttttctctcctccccctgcccccatctttcaagccctgcagaagcccccaagggtacccatgagaggggcccatgtgtgcccacagggctggactcacatgcacgcatgtgtaggctggacactcctgcttcctctgtccctgtcggcctcctcttcctgccttctcccaggccaccttcctggtgtccaccaggggaatccatgaggcccatggccacccagggaaggctgtggctgccaagtccccaggacgtgatctgggccccttatgaatcctccccgagttccctcagctccctcctaaccctagtccccatgtcctgctgagaggaccagcaccctcctgggacaggcccacaagccaagccttccaagcagcctgcctgggcagactcaggacctcagagggacggggcagtgccactcctggggccagccagagctgctggggagctgtcaggcagccccaggcctcacacttgtcatggggctgagatgcaccagccacatagcactgccaaggcctggggcctcagggccctgcgaggcatccccttttcccagccacagcttgatgcagacgtagctgggggcagccatgagagaagagatgggccagtgagtctgggcagtaacgccaagtctctccacccccttccacctgaaggggcttcccactgtccagacaaggcggtgggagctggggaagattcttaaatggctgcctcagattggctttgtattctggggagtcctggcccactatccactgccagggataacctgggtaagattcatgacctcgctgggcctcgacttctcacctggaagtggggtgagccagagctgcccccacgtggttgctgaggaataagacacttgcagccccgagcagtgccctgcctgtggtgggagctgctgtgacctttgtggtgtcttacaggagaggcggctctgaacgagtacctgcgggtcaagacagtgaccttcgaatactgaagaaaggtctttgtgagaagaaagtccctgcccctccctcgtggctggggccccctccctcttgagcctgggtgcacagcacctcccacctggggggctagtggaagccctcctgcctgcacaccatgtctgcatcttggacgccctctgtccagtcagaagcagcccttggctgggtgaggtgtgcccctcccagggagaataaagcttctgaagag

SEQ ID NO: 961 - DNA, 2758 bp, Homo sapiens
  source 1..2758: mol_type = unassigned DNA
acaggtcccacctcctggctcccaggacgggtctgcaccaacctcagtttcggggctgcggctcacagaagtctaacctgcccgggacgcccgcaccaactcctgcgcgcggtccttccaaccctcctgctaccatgaagattgcagtgattggacagagcctgtttggccaggaagtttactgccacctgaggaaggagggccacgaagtggtgggtgtgttcactgttccagacaaggatggaaaggccgaccccctgggtctggaagctgagaaggatggagtgccggtattcaagtactcccggtggcgtgcaaaaggacaggctttgcctgatgtggtggcaaaataccaggctttgggggccgagctcaacgtcctgcccttctgcagccaattcatccccatggagataatcagtgccccccggcatggctccatcatctatcacccgtcactgctccctaggcaccgaggggcctcggccattcacaactggatccgcgggaacgacaaggtgccgggagcctggacagaggcctgtgaacagaaactgacatttttcaactcaacgctgaacacttcaggcctggtgcccgagggagacgctttgcccatcccaggagcccatcggccaggggtggtcaccaaagcaggactcatcctctttgggaatgatgacaaaatgctgctggtgaagaatattcagctggaggatggcaaaatgatcctggcctcgaacttctttaagggggcagccagcagtgtccttgagctgacagaggcagagctggttactgcggaggctgtgcggagtgtttggcagcggatcctccccaaagtcctggaggttgaagactccactgatttcttcaagtcaggggccgcgtctgtggacgttgtgaggctggtggaggaagtgaaggagctgtgtgatggcctggagttagaaaatgaagatgtgtacatggcatccacctttggggacttcatccagctgttagtgaggaagctgcgaggggacgatgaggagggcgagtgcagcattgactacgtggaaatggcagtgaacaagcgcactgtccgcatgccccaccagctcttcattgggggggagttcgtggatgccgagggcgccaagacctctgagaccatcaatcccaccgatggaagtgtcatctgccaggtatccctggcccaagtcaccgacgtcgacaaggcagtggccgcagccaaggatgcctttgagaatggacggtgggggaagatcagtgcgcgggaccggggccggctgatgtacaggttggcagatctcatggagcagcaccaggaggagctggccaccattgaggccctggatgcgggtgccgtctacacgctggccctgaagacccacgtgggcatgtccatccagaccttccgctactttgctggctggtgtgacaagatccagggctccaccatccccatcaaccaggccagacccaaccgcaacctgaccttgaccaggaaggagcctgttggggtttgtggcatcatcatcccctggaactatcccctgatgatgctgtcctggaagacagctgcctgcctggctgccgggaacacagtggtgatcaagcctgctcaggtgaccccactcacagccttgaagtttgcagagctgacattaaaggccggcattcccaaaggtgtggttaacgtcctcccaggatctggctccctggtcggccagagactctcagaccatcctgatgtgaggaaaatcgggttcacaggctccacagaggtgggcaagcacatcatgaaaagctgtgccataagtaacgtgaagaaggtgtccctggaactgggcgggaagtcacccctcatcatctttgctgactgtgacctcaacaaggctgtgcagatggggatgagttctgttttcttcaacaaaggagagaattgcattgcagcaggccgactctttgtggaggactccattcatgatgagttcgtgcggagagtggtagaagaggtgcggaagatgaaggtgggcaacccgctggacagggacaccgaccacgggccgcagaatcaccatgcccaccttgtgaagctgatggagtactgccagcatggcgtgaaggaaggggccacactggtctgcggcgggaatcaggtccctcggccagggttcttctttgagccaactgttttcacagacgtggaagaccacatgttcatagccaaggaggagtccttcgggcctgtcatgatcatctctcggtttgctgatggggacttggatgccgtgctgtctcgggccaatgccacggaatttggcctggcttctggtgtcttcaccagggacatcaacaaggccctgtatgtcagtgacaagctccaggcaggcactgtgtttgtcaacacgtacaacaagaccgacgtggccgctcccttcggaggattcaaacagtctggatttggcaaagatctaggagaggcggctctgaacgagtacctgcgggtcaagacagtgaccttcgaatactgaagaaaggtctttgtgagaagaaagtccctgcccctccctcgtggctggggccccctccctcttgagcctgggtgcacagcacctcccacctggggggctagtggaagccctcctgcctgcacaccatgtctgcatcttggacgccctctgtccagtcagaagcagcccttggctgggtgaggtgtgcccctcccagggagaataaagcttctgaagag

SEQ ID NO: 962 - DNA, 3277 bp, Homo sapiens
  source 1..3277: mol_type = unassigned DNA
acagtaagtcttcttgacctaagcgggaaagagcgcaggcccctgcggggttggcttttacatggcatttatagacccgcccggagagggtgcgctgcgctcccgccatagtcccaccaccggtgagcgccgcccccactcggctgactctccgcccgccccgcgcccctcccctcacgggctctggccttaaccagagctcgcggactggcggggacaggtcccacctcctggctcccaggacgggtctgcaccaacctcagtttcggggctgcggctcacagaagtctaacctgcccgggacgcccgcaccaactcctgcgcgcggtccttccaaccctcctgctaccatgaagattgcagtgattggacagagcctgtttggccaggaagtttactgccacctgaggaaggagggccacgaagtggtgggtgtgttcactgttccagacaaggatggaaaggccgaccccctgggtctggaagctgagaaggatggagtgccggtattcaagtactcccggtggcgtgcaaaaggacaggctttgcctgatgtggtggcaaaataccaggctttgggggccgagctcaacgtcctgcccttctgcagccaattcatccccatggagataatcagtgccccccggcatggctccatcatctatcacccgtcactgctccctaggcaccgaggggcctcggccatcaactggaccctcattcacggagataagaaaggggggttttccatcttctgggcggatgatggtctggacaccggagacctgctgctgcagaaggagtgtgaggtgctcccggacgacaccgtgagcacgctgtacaaccgcttcctcttccctgaaggcatcaaagggatggtgcaggccgtgaggctgatcgctgagggcaaagcccccagactccctcagcctgaggaaggagccacctatgaggggattcagaagaaggagacagccaagatcaactgggaccagccggcagaggccattcacaactggatccgcgggaacgacaaggtgccgggagcctggacagaggcctgtgaacagaaactgacatttttcaactcaacgctgaacacttcaggcctggtgcccgagggagacgctttgcccatcccaggagcccatcggccaggggtggtcaccaaagcaggactcatcctctttgggaatgatgacaaaatgctgctggtgaagaatattcagctggaggatggcaaaatgatcctggcctcgaacttctttaagggggcagccagcagtgtccttgagctgacagaggcagagctggttactgcggaggctgtgcggagtgtttggcagcggatcctccccaaagtcctggaggttgaagactccactgatttcttcaagtcaggggccgcgtctgtggacgttgtgaggctggtggaggaagtgaaggagctgtgtgatggcctggagttagaaaatgaagatgtgtacatggcatccacctttggggacttcatccagctgttagtgaggaagctgcgaggggacgatgaggagggcgagtgcagcattgactacgtggaaatggcagtgaacaagcgcactgtccgcatgccccaccagctcttcattgggggggagttcgtggatgccgagggcgccaagacctctgagaccatcaatcccaccgatggaagtgtcatctgccaggtatccctggcccaagtcaccgacgtcgacaaggcagtggccgcagccaaggatgcctttgagaatggacggtgggggaagatcagtgcgcgggaccggggccggctgatgtacaggttggcagatctcatggagcagcaccaggaggagctggccaccattgaggccctggatgcgggtgccgtctacacgctggccctgaagacccacgtgggcatgtccatccagaccttccgctactttgctggctggtgtgacaagatccagggctccaccatccccatcaaccaggccagacccaaccgcaacctgaccttgaccaggaaggagcctgttggggtttgtggcatcatcatcccctggaactatcccctgatgatgctgtcctggaagacagctgcctgcctggctgccgggaacacagtggtgatcaagcctgctcaggtgaccccactcacagccttgaagtttgcagagctgacattaaaggccggcattcccaaaggtgtggttaacgtcctcccaggatctggctccctggtcggccagagactctcagaccatcctgatgtgaggaaaatcgggttcacaggctccacagaggtgggcaagcacatcatgaaaagctgtgccataagtaacgtgaagaaggtgtccctggaactgggcgggaagtcacccctcatcatctttgctgactgtgacctcaacaaggctgtgcagatggggatgagttctgttttcttcaacaaaggagagaattgcattgcagcaggccgactctttgtggaggactccattcatgatgagttcgtgcggagagtggtagaagaggtgcggaagatgaaggtgggcaacccgctggacagggacaccgaccacgggccgcagaatcaccatgcccaccttgtgaagctgatggagtactgccagcatggcgtgaaggaaggggccacactggtctgcggcgggaatcaggtccctcggccagggttcttctttgagccaactgttttcacagacgtggaagaccacatgttcatagccaaggaggagtccttcgggcctgtcatgatcatctctcggtttgctgatggggacttggatgccgtgctgtctcgggccaatgccacggaatttggcctggcttctggtgtcttcaccagggacatcaacaaggccctgtatgtcagtgacaagctccaggcaggcactgtgtttgtcaacacgtacaacaagaccgacgtggccgctcccttcggaggattcaaacagtctggatttggcaaagatctaggagaggcggctctgaacgagtacctgcgggtcaagacagtgaccttcgaatactgaagaaaggtctttgtgagaagaaagtccctgcccctccctcgtggctggggccccctccctcttgagcctgggtgcacagcacctcccacctggggggctagtggaagccctcctgcctgcacaccatgtctgcatcttggacgccctctgtccagtcagaagcagcccttggctgggtgaggtgtgcccctcccagggagaataaagcttctgaagag

SEQ ID NO: 963 - DNA, 516 bp, Homo sapiens
  source 1..516: mol_type = unassigned DNA
ggagccatttgggatttcagcctggaaggtggatttagagtcagaattcagaaagccctgaggctagaacagagtgtggactttccccaggggtcagccatgagagctgagtcaggtgaggatcattgtcagaaactgtggcagcacaagccacacctgacttggaggactttctgcaggtagaagaggtgcggaagatgaaggtgggcaacccgctggacagggacaccgaccacgggccgcagaatcaccatgcccaccttgtgaagctgatggagtactgccagcatggcgtgaaggaaggggccacactggtctgcggcgggaatcaggtccctcggccagggttcttctttgagccaactgttttcacagacgtggaagaccacatgttcatagccaaggaggagtccttcgggcctgtcatgatcatctctcggtttgctgatggggacttggatgccgtgctgtctcgggccaatgccacggaatttggcctggcttctggtgtcttca

SEQ ID NO: 964 - DNA, 4604 bp, Homo sapiens
  source 1..4604: mol_type = unassigned DNA
ggcagggcggctcagtcacctgggcagctggtactgctgagaggcagggtggcaggctatgggccggagcccacagctgcaggaggggcccggggatcatatgtgagggctgcttgcccctgcccgaggacaggctggcagggacggccacaggcagaggtgctgtccaggcatgcagcaggagggaaggaggccctggggagcccttgctgtttgggcgcagcaggaagagcagctgcagtgtccactgtcccctcgtcctcctcagctcctggccactgccttttatttttcggttgtgttaaacttgtcttccccacagattgaccagctcacaaaaatagtgaacaaagtagagttgctggagatttagtggtacagagagggagcttacctgtgcttcccacggcaagcaactcaaatactccttgaagctgcactgtccaacaaggcagccactggtaacatgcagctattaaatcaattaaaatgaattatactgaaaaattcagttcctcagtctcagccacattctaagtcccctggccaccgtgttggaccgtgcagacttggaactcatccatcaccacagagggctccattgggcagccctgcctcagatgctctgacacccggtcacttcccattcttggcacctcccggtctcttccctcaggctcttgctcacgtgggcccagactccttggctctccttctccctctctgattcctttcccaccaccttcctctttcctgtcacagagaaacaacttcctgcttcatctcagacctccaaacttccaccttcaagcccaccacggggctcaggacccactctctttaaaggcagagaaggcttagacagcaacatggacatttgtgtctgtgttatacctgcagggctttacagtttatataatcatctaagatatcagaagatgtaagatctatgtaatctaaacctttgccaggtagagaggacgggtctgtgtccgttgtgcaatagaagttaggttcacgctgactcccttgttcatatggcaggtgtttcttgggtgactgctgtgtaccaggcaagtctggtcagtctggggaagggtccaggctcaatgtgggccctggggctgggaaggaggcagggtcctattgctggggatagcaacccactggatctccccaggtgcaggccgtgaggctgatcgctgagggcaaagcccccagactccctcagcctgaggaaggagccacctatgaggggattcagaagaaggagacagccaagatcaactgggaccagccggcagaggccattcacaactggatccgcgggaacgacaaggtgccgggagcctggacagaggcctgtgaacagaaactgacatttttcaactcaacgctgaacacttcaggcctggtgcccgagggagacgctttgcccatcccaggagcccatcggccaggggtggtcaccaaagcaggactcatcctctttgggaatgatgacaaaatggttggagacaaggctggagcgcccagcacagcaccccttgtgggacaccttcatcactgcctcaggtccgaccacaggaactgtgaaatccttccttttggccgggcgcagtggctcatgcctgtaatcccagcactttgggaggccaaggtggatggatcatgaggtcaggagttcgagaccagcctgaccaatgtggtgaaaccccgtctctactaaaaatacaaacaaaaattagtcgggcatggtggtgcgcgcctgtaatcccagctattcaggagggctgaggcaggagaatcgcttcaacccgggaggcggaggttgtagtgagccgagatcgcaccactgcactccagcctgggcaacagagcaagactctgtctcaaaaaaagaaaagaaaagaaaagaaatccttccttttgcagctgctggtgaagaatattcagctggaggatggcaaaatgatcctggcctcgaacttctttaagggggcagccagcagtgtccttgagctgacagaggcagagctggttactgcggaggctgtgcggagtgtttggcagcggatcctccccaaagtcctggaggttgaagactccactgatttcttcaagtcaggggccgcgtctgtggacgttgtgaggctggtggaggaagtgaaggagctgtgtgatggcctggagttagaaaatgaagatgtgtacatggcatccacctttggggacttcatccagctgttagtgaggaagctgcgaggggacgatgaggagggcgagtgcagcattgactacgtggaaatggcagtgaacaagcgcactgtccgcatgccccaccagctcttcattgggggggagttcgtggatgccgagggcgccaagacctctgagaccatcaatcccaccgatggaagtgtcatctgccaggtatccctggcccaagtcaccgacgtcgacaaggcagtggccgcagccaaggatgcctttgagaatggacggtgggggaagatcagtgcgcgggaccggggccggctgatgtacaggttggcagatctcatggagcagcaccaggaggagctggccaccattgaggccctggatgcgggtgccgtctacacgctggccctgaagacccacgtgggcatgtccatccagaccttccgctactttgctggctggtgtgacaagatccagggctccaccatccccatcaaccaggccagacccaaccgcaacctgaccttgaccaggaaggagcctgttgggtgagttcctgcccagggcgaggtgcagcctcgcggtgctttccatgcagtacacggaactgtagcacagcctgcgggagctcacagcaccctgtgcgtgcatttatcaaacagccatccatgtgcttcttgagcacctgctccatgccaggcattgttgtaaggacttgaggacaattgtatttaatctcccagtaacactggatcagtcaggtccacggtgggaaacaagagtaaacccaaaaaatgtccaaaatgggtatggtggtcagtgttcataaagatgaggaactcctgcacagcactgaggaacaggaaatatagaacaaaggaggaacaggcagaggacgagagctgctcagcaggaggagttcggaccccgctggatgccaagcatgtaggcgccgggaaatgaacctggcgtgaggcacctcacctcgccacccagtggccccagggcaggagtagggagaagggcttggaacacagccaccgggctctgggttttccctgctagaggaaactgggcagtgacctctcgaggccatacatcctgatttggccccagtcctggtgagttactcacacgcgtgcctgaggaggcttacccaagagtgcatggccactgtgctaggccggtgacagcaaacaccagagcagcaggtgctggtgcagccctgatccatgatctgcactgaggatgcgcctgcaactggacctagagagccccagccctgggtccaccctcactgcgcctgcacgcggtgccacaggagagcctggccagggtgacctgggagcagggcccagctggcatgagcaccacagtcattcccacctgctctgtgccccttgcagggtaggggacctcacagctgtgggcatggccaaaggcccctcagctccacctgaatgttggagtatttgcaaggagaacgtgctccaatgtccctgtgtcactgacagctcatgcagatgaacaaccaactcctcaagcacgggctggaggaggctcctgtgggaaagtgggctgtggacccttagagccccagagaggagccaggctgcaggtggaggcatcgcctccagggtccccacagaggacatcgggcaaggtctgcacatggttttggttgtcccatcagagggggtgatagagtacagccccccacaacaaagaactgccccgccccaaatgtcagtagtgtgggagccaagaaaccctgctatggggcagtggtcagagacctttgtcgtgctttgaaaggggctgggctgggctgggcagggcagggcgggtcgtggcccacctggggccacagttcagagccacacttgggtctttgaggctgcccacccctcccagctgccagcatggggttggggggtgtccacccccatcagactgaggaggaaacagacactgtgtcacccagaagcatccctatgtcaccctgtgaggctggccttggacccaggactctgggcgcctggtcagcaccccagtgtgaacacatcctgccctggggcctggtcccagcagctcacacagaccagggctcgcccaaaggcaggtaggcagggccactgctgaccatgcacctggtgggccgtgattctggaactaatggtctctgcctggcagggaggccgccagggcctctgggcttcacccctccccaccttcacaggggacctcgcctcagtgggaatgttctggagccggaacccaaggttggaatcccagctcctcccctttctagggcaagctcccagcctgtctgtactcagtctccccaactgtcaaatggtaataaaacagtcctgtcctca

SEQ ID NO: 965 - DNA, 2192 bp, Homo sapiens
  source 1..2192: mol_type = unassigned DNA
gcggctcacagaagtctaacctgcccgggacgcccgcaccaactcctgcgcgcggtccttccaaccctcctgctaccatgaagattgcagtgattggacagagcctgtttggccaggaagtttactgccacctgaggaaggagggccacgaagtggtgggtgtgttcactgttccagacaaggatggaaaggccgaccccctggacaccaggacagagtgacagaggaggagaccggagaggagagccagtccagtcagggcccaaacatcacaccagaggctctaacagagaactgaatacaaagaagtgttccttgggtattgaagagtggaaggcagagagcccaaagttattggggacagcgactgcaggaagcagctgccactgtctggaagctgagaaggatggagtgccggtattcaagtactcccggtggcgtgcaaaaggacaggctttgcctgatgtggtggcaaaataccaggctttgggggccgagctcaacgtcctgcccttctgcagccaattcatccccatggagataatcagtgccccccggcatggctccatcatctatcacccgtcactgctccctaggcaccgaggggcctcggccatcaactggaccctcattcacggagataagaaaggggggttttccatcttctgggcggatgatggtctggacaccggagacctgctgctgcagaaggagtgtgaggtgctcccggacgacaccgtgagcacgctgtacaaccgcttcctcttccctgaaggcatcaaagggatggtgcaggccgtgaggctgatcgctgagggcaaagcccccagactccctcagcctgaggaaggagccacctatgaggggattcagaagaaggagacagccaagatcaactgggaccagccggcagaggccattcacaactggatccgcgggaacgacaaggtgccgggagcctggacagaggcctgtgaacagaaactgacatttttcaactcaacgctgaacacttcaggcctggtgcccgagggagacgctttgcccatcccaggagcccatcggccaggggtggtcaccaaagcaggactcatcctctttgggaatgatgacaaaatgctgctggtgaagaatattcagctggaggatggcaaaatgatcctggcctcgaacttctttaagggggcagccagcagtgtccttgagctgacagaggcagagctggttactgcggaggctgtgcggagtgtttggcagcggatcctccccaaagtcctggaggttgaagactccactgatttcttcaagtcaggggccgcgtctgtggacgttgtgaggctggtggaggaagtgaaggagctgtgtgatggcctggagttagaaaatgaagatgtgtacatggcatccacctttggggacttcatccagctgttagtgaggaagctgcgaggggacgatgaggagggcgagtgcagcattgactacgtggaaatggcagtgaacaagcgcactgtccgcatgccccaccagctcttcattgggggggagttcgtggatgccgagggcgccaagacctctgagaccatcaatcccaccgatggaagtgtcatctgccaggtatccctggcccaagtcaccgacgtcgacaaggcagtggccgcagccaaggatgcctttgagaatggacggtgggggaagatcagtgcgcgggaccggggccggctgatgtacaggtgggagcccaacatgtacctgccagccactgccaccatcagcttctgggcagtggcacgggggggacttctgtggaggcccttttacctgccaggaggagctgggtcctggggaggctatgggaccgaggccatcagatgggccaggctggggctccttgcctgaggctcagaaaaggcttctcagaggaagggatatgagaaacaggagacatttcagcagagtgggctcaggggaggtgcctggtggaggtgaggaggtgcggaagccaagggatgcttccaaagtgggcgcaggctgggcctcccaggcagacaaagcacttccctcaccagcctgggctggaggggacttagctcctgcacgcagaagacagcaagggccagagaagggctggcctggtctctgcttgctcagccaggctctgactactggaatctataggtttcacattttct

SEQ ID NO: 966 - DNA, 715 bp, Homo sapiens
  source 1..715: mol_type = unassigned DNA
gccgtgacctgtggtcacatggcctgagcggcagggcggctcagtcacctgggcagctggtactgctgagaggcagggtggcaggctatgggccggagcccacagctgcaggaggggcccggggatcatatgtgagggctgcttgcccctgcccgaggacaggctggcagggacggccacaggcagaggtgcaggccgtgaggctgatcgctgagggcaaagcccccagactccctcagcctgaggaaggagccacctatgaggggattcagaagaaggagacagccaagatcaactgggaccagccggcagaggccattcacaactggatccgcgggaacgacaaggtgccgggagcctggacagaggcctgtgaacagaaactgacatttttcaactcaacgctgaacacttcaggcctggtgcccgagggagacgctttgcccatcccaggagcccatcggccaggggtggtcaccaaagcaggactcatcctctttgggaatgatgacaaaatgctgctggtgaagaatattcagctggaggatggcaaaatgatcctggcctcgaacttctttaagggggcagccagcagtgtccttgagctgacagaggcagagctggttactgcggaggctgtgcggagtgtttggcagcggatcctccccaaagtcctggaggttgaagactccactgatttcttcaagtcaggggc

SEQ ID NO: 967 - DNA, 2913 bp, Homo sapiens
  source 1..2913: mol_type = unassigned DNA
agataatcagtgccccccggcatggctccatcatctatcacccgtcactgctccctaggcaccgaggggcctcggccatcaactggaccctcattcacggagataagaaaggggggttttccatcttctgggcggatgatggtctggacaccggagacctgctgctgcagaaggagtgtgaggtgctcccggacgacaccgtgagcacgctgtacaaccgcttcctcttccctgaaggcatcaaagggatggccgtgaggctgatcgctgagggcaaagcccccagactccctcagcctgaggaaggagccacctatgaggggattcagaagaaggagacagccaagatcaactgggaccagccggcagaggccattcacaactggatccgcgggaacgacaaggtgccgggagcctggacagaggcctgtgaacagaaactgacatttttcaactcaacgctgaacacttcaggcctggtgcccgagggagacgctttgcccatcccaggagcccatcggccaggggtggtcaccaaagcaggactcatcctctttgggaatgatgacaaaatggtaagggcacggctgtgggtcacttgcctgctcaaagccacccatgctcctgtccttggactcaggcctcacaggaagaccctaggctcctctggagaaaatggaaaaaaccagacccaggaaggaacactgaccctgatttgtccctgaccacccggctggtcctgagcacagggtgtccgaggcagtttacccacttctctgttctgggaaagctgggctccctacccttcctggctaggcacccatctccaggctgagtgccctgtgtgggtgtcaggcaacctagaatcagagagaagccctcccagggagcctgggttcagggcctctctttggtctatcagaaacacctctgggtgtggggtcattaagcctctgtgcctcagctcccatctctttgaacggcgatgccatggtaacttagcacgtgcagagccttgggagccatgccggccacctgctcttgttattagcagactacaactcacggtaccagcaaacactgatggagcaccttttataccagaacaatgtatatgcgttaaatttaatctgcctaacaacactatgagatatgtataaatattatatccttatagaggaaaaaaacagagatttaaataacttgtccaggatcatccaagctagcccgtggcagagctgggattcagactctgaaattctggctccaaagccgtgatgctggtcttggccatggtagcttcctgttcatatgcactctactactccttctcacatgagcagccgggggtagggagagggcaggcagggatcttcccacacactgacagggtccggacaaaccccatgggcgtggtacccccagccgtgttgctgtgtccggcctaccagagtgaggcgtggcagtatggggcctggcctttgctcgctcttggtgtccagtctgccatgctcccctgtcagaaggtctaggctgctgttgatgtctgcaatgtagtgttttgggtatccaagattgatatatgcagttgcaagagaatatctgtctgtggtcaggttccctagaagcagcatctaaggtaaaaattcttgtgcaagtgatttattgagggaatgttccagaaaatcatgcgaggcagtaagggcagaggaaagcaaagcaaaagtaaaggttcaggagaagtctagcctggggctgctcccagggtgggttttggagtattaactgcaccctccaattatacctgcctgtccccacctctgtcagcctttggtttcagtggcccctggggtggggtggaggacccaccaggcataatccctcggcctctttgtgtacaggagctcttatccatccacagcaagcaaggatgggacagtgcaggccgttatcatccagcccttgctgcagctggaggacagggcaccagccacaggggtctgagcagggcacccacagcatctgtccagagacctgcaaagacaggaatgcaaagaaggcaattaagtgtcttaagaggaagctggggttatcagctctctcacaagagctttgtccactgtccagaggtggtcagggtgggaggggagtgaggagagaccagctgagcacacacaccctgctccccacagatcaacccagaagaccctgggttgaagcatctctcagccacgccctgtggagtctggctgggctttagcttgcagaaagctccagaacatctttgaaaggcaatggggcgagggtcaggccgagaggcaagttccagttctggcagagcatgcatacagagtaccattcttacacagccactcttaacgcacagtgacatgcacccacccatgagcttatccataactctttttgtacatgtgttttttttcctggcccctaacaaaagcatttgttgaaaaactattgataaacaagcaggccccaaacaattcaaacatcttattaaatacagtaaatctgaggcagacactagagtagcccagagtcatgagctacaatgggggcagttcatgtctggcagccagaatccccttgaactgatggctggacgcaggctctacctgggaccagcttgaagtgctatcctgaagctgcagactgcagggccggccagaccctttttcagcctctcctcttcccacctctgtatcccacacaggcatctggtgatgttctccaggtgtttctgtggcagttctgggagctactgggtgattgcaagattagtttttttttctaagttgactttctatgtggtgcctgaatgacgttttctttttttgttcagtaggaatccttttttatagaagtaataaagtcattacacttaaaaacaaa

SEQ ID NO: 968 - DNA, 1010 bp, Homo sapiens
  source 1..1010: mol_type = unassigned DNA
acaggtcccacctcctggctcccaggacgggtctgcaccaacctcagtttcggggctgcggctcacagaagtctaacctgcccgggacgcccgcaccaactcctgcgcgcggtccttccaaccctcctgctaccatgaagattgcagtgattggacagagcctgtttggccaggaagtttactgccacctgaggaaggagggccacgaagtggtgggtgtgttcactgttccagacaaggatggaaaggccgaccccctgggaccctcattcacggagataagaaaggggggttttccatcttctgggcggatgatggtctggacaccggagacctgctgctgcagaaggagtgtgaggtgctcccggacgacaccgtgagcacgctgtacaaccgcttcctcttccctgaaggcatcaaagggatggtgcaggccgtgaggctgatcgctgagggcaaagcccccagactccctcagcctgaggaaggagccacctatgaggggattcagaagaaggagacagccaagatcaactgggaccagccggcagaggccattcacaactggatccgcgggaacgacaaggtgccgggagcctggacagaggcctgtgaacagaaactgacatttttcaactcaacgctgaacacttcaggcctggtgcccgagggagacgctttgcccatcccaggagcccatcggccaggggtggtcaccaaagcaggactcatcctctttgggaatgatgacaaaatggtaagggcacggctgtgggtcacttgcctgctcaaagccacccatgctcctgtccttggactcaggcctcacaggaagaccctaggctcctctggagaaaatggaaaaaaccagacccaggaaggaacactgaccctgatttgtccctgaccacccggctggtcctgagcacagggtgtccgaggcagtttacccacttctctgttctgggaaagctgggctccctacccttcctggctaggcacccatctcc

SEQ ID NO: 969 - DNA, 615 bp, Homo sapiens
  source 1..615: mol_type = unassigned DNA
atatctgatatgtgataccatatgggagcaggctctgaaagaacactacaagtagagaggtccttccaaccctcctgctaccatgaagattgcagtgattggacagagcctgtttggccaggaagtttactgccacctgaggaaggagggccacgaagtggtgggtgtgttcactgttccagacaaggatggaaaggccgaccccctgggtctggaagctgagaaggatggagtgccggtattcaagtactcccggtggcgtgcaaaaggacaggctttgcctgatgtggtggcaaaataccaggctttgggggccgagctcaacgtcctgcccttctgcagccaattcatccccatggagataatcagtgccccccggcatggctccatcatctatcacccgtcactgctccctaggcaccgaggggcctcggccatcaactggaccctcattcacggagataagaaaggggggttttccatcttctgggcggatgatggtctggacaccggagacctgctgctgcagaaggagtgtgaggtgctcccggacgacaccgtgagcacgctgtacaaccgcttcctcttccctgaaggcatcaaagggatggtgca

SEQ ID NO: 970 - DNA, 1020 bp, Homo sapiens
  source 1..1020: mol_type = unassigned DNA
acagtaagtcttcttgacctaagcgggaaagagcgcaggcccctgcggggttggcttttacatggcatttatagacccgcccggagagggtgcgctgcgctcccgccatagtcccaccaccggtgagcgccgcccccactcggctgactctccgcccgccccgcgcccctcccctcacgggctctggccttaaccagagctcgcggactggcggggacaggtcccacctcctggctcccaggacgggtctgcaccaacctcagtttcggggctgcggctcacagaagtctaacctgcccgggacgcccgcaccaactcctgcgcgcggtgagtttctgggctctcgagagcgctggactcccggcggaaaggaggctgccccggctgcagctccgggggctccgggggctccaggggctccaggactcggttctcaccgcaagggctcctgcggggcccatcaacttcgccgctgggacgccgggctcggggtccttccaaccctcctgctaccatgaagattgcagtgattggacagagcctgtttggccaggaagtttactgccacctgaggaaggagggccacgaagtggtgggtgtgttcactgttccagacaaggatggaaaggccgaccccctgggtctggaagctgagaaggatggagtgccggtattcaagtactcccggtggcgtgcaaaaggacaggctttgcctgatgtggtggcaaaataccaggctttgggggccgagctcaacgtcctgcccttctgcagccaattcatccccatggagataatcagtgccccccggcatggctccatcatctatcacccgtcactgctccctaggcaccgaggggcctcggccatcaactggaccctcattcacggagataagaaaggggggttttccatcttctgggcggatgatggtctggacaccggagacctgctgctgcagaaggagtgtgaggtgctcccggacgacaccgtgagcacgctgtacaaccgcttcctctt

SEQ ID NO: 971 - DNA, 689 bp, Homo sapiens
  source 1..689: mol_type = unassigned DNA
ctttcgctctgctgtgtccgtagcacatggcaggtacttggcccatcaagagtgagagagggtgagcgagtgagtgagtcaccggcttggcgagggtctcctctgacccacttagccttgccagcgctcagaactgccagccctgctgggtgcttgggacttttcaaagccctgggaattctccaagggtccacagtccttccaaccctcctgctaccatgaagattgcagtgattggacagagcctgtttggccaggaagtttactgccacctgaggaaggagggccacgaagtggtgggtgtgttcactgttccagacaaggatggaaaggccgaccccctgggtctggaagctgagaaggatggagtgccggtattcaagtactcccggtggcgtgcaaaaggacaggctttgcctgatgtggtggcaaaataccaggctttgggggccgagctcaacgtcctgcccttctgcagccaattcatccccatggagataatcagtgccccccggcatggctccatcatctatcacccgtcactgctccctaggcaccgaggggcctcggccatcaactggaccctcattcacggagataagaaaggggggttttccatcttctgggcggatgatggtctggacaccggagacctgctgctgcagaaggagtgtgaggtgctcccggac

SEQ ID NO: 972 - DNA, 583 bp, Homo sapiens
  source 1..583: mol_type = unassigned DNA
gttctgtacctcacttctgatttctgcaagtcacttcctttttttttttgtctataaatttgttctgtccacgaggcaaccctggagtctctctgaatctgctgtgattctgagggctgcccaatttgtgaatcgttcattgctcaattaaacttttttaaatttaatttggctgaagtttttcttttaacatggtgtcagaagcgggatccaaagtacagcttctagcgacccccaggagtactgagtgaacaagcaaggtccttccaaccctcctgctaccatgaagattgcagtgattggacagagcctgtttggccaggaagtttactgccacctgaggaaggagggccacgaagtggtgggtgtgttcactgttccagacaaggatggaaaggccgaccccctgggtctggaagctgagaaggatggagtgccggtattcaagtactcccggtggcgtgcaaaaggacaggctttgcctgatgtggtggcaaaataccaggctttgggggccgagctcaacgtcctgcccttctgcagccaattcatccccatggagataatcagtgccccccggcat

SEQ ID NO: 973 - DNA, 583 bp, Homo sapiens
  source 1..583: mol_type = unassigned DNA
ataaatttgttctgtccacgaggcaaccctggagtctctctgaatctgctgtgattctgagggctgcccaatttgtgaatcgttcattgctcaattaaacttttttaaatttaatttggctgaagtttttcttttaacatggtgtcagaagcgggatccaaagtacagcttctagcgacccccaggagtactgagtgaacaagcaaggtccttccaaccctcctgctaccatgaagattgcagtgattggacagagcctgtttggccaggaagtttactgccacctgaggaaggagggccacgaagtggtgggtgtgttcactgttccagacaaggatggaaaggccgaccccctggacaccaggacagagtgacagaggaggagaccggagaggagagccagtccagtcagggcccaaacatcacaccagaggctctaacagagaactgaatacaaagaagtgttccttgggtattgaagagtggaaggcagagagcccaaagttattggggacagcgactgcaggaagcagctgccactgtctggaagctgagaaggatggagtgccggtattcaagtact

SEQ ID NO: 974 - DNA, 2797 bp, Homo sapiens
  source 1..2797: mol_type = unassigned DNA
ctcctggctcccaggacgggtctgcaccaacctcagtttcggggctgcggctcacagaagtctaacctgcccgggacgcccgcaccaactcctgcgcgcggtccttccaaccctcctgctaccatgaagattgcagtgattggacagagcctgtttggccaggaagtttactgccacctgaggaaggagggccacgaagtggtgggtgtgttcactgttccagacaaggatggaaaggccgaccccctgggtctggaagctgagaaggatggagtgccggtattcaagtactcccggtggcgtgcaaaaggacaggctttgcctgatgtggtggcaaaataccaggctttgggggccgagctcaacgtcctgcccttctgcagccaattcatccccatggagataatcagtgccccccggcatggctccatcatctatcacccgtcactgctccctaggcaccgaggggcctcggccatcaactggaccctcattcacggagataagaaaggggggttttccatcttctgggcggatgatggtctggacaccggagacctgctgctgcagaaggagtgtgaggtgctcccggacgacaccgtgagcacgctgtacaaccgcttcctcttccctgaaggcatcaaagggatggtgcaggccgtgaggctgatcgctgagggcaaagcccccagactccctcagcctgaggaaggagccacctatgaggggattcagaagaaggagacagccaagatcaactgggaccagccggcagaggccattcacaactggatccgcgggaacgacaaggtgccgggagcctggacagaggcctgtgaacagaaactgacatttttcaactcaacgctgaacacttcaggcctggtgcccgagggagacgctttgcccatcccaggagcccatcggccaggggtggtcaccaaagcaggactcatcctctttgggaatgatgacaaaatgctgctggtgaagaatattcagctggaggatggcaaaatgatcctggcctcgaacttctttaagggggcagccagcagtgtccttgagctgacagaggcagagctggttactgcggaggctgtgcggagtgtttggcagcggatcctccccaaagtcctggaggttgaagactccactgatttcttcaagtcaggggccgcgtctgtggacgttgtgaggctggtggaggaagtgaaggagctgtgtgatggcctggagttagaaaatgaagatgtgtacatggcatccacctttggggacttcatccagctgttagtgaggaagctgcgaggggacgatgaggagggcgagtgcagcattgactacgtggaaatggcagtgaacaagcgcactgtccgcatgccccaccagctcttcattgggggggagttcgtggatgccgagggcgccaagacctctgagaccatcaatcccaccgatggaagtgtcatctgccaggtatccctggcccaagtcaccgacgtcgacaaggcagtggccgcagccaaggatgcctttgagaatggacggtgggggaagatcagtgcgcgggaccggggccggctgatgtacagggctccaccatccccatcaaccaggccagacccaaccgcaacctgaccttgaccaggaaggagcctgttggggtttgtggcatcatcatcccctggaactatcccctgatgatgctgtcctggaagacagctgcctgcctggctgccgggaacacagtggtgatcaagcctgctcaggtgaccccactcacagccttgaagtttgcagagctgacattaaaggccggcattcccaaaggtgtggttaacgtcctcccaggatctggctccctggtcggccagagactctcagaccatcctgatgtgaggaaaatcgggttcacaggctccacagaggtgggcaagcacatcatgaaaaggggatgagttctgttttcttcaacaaaggagagaattgcattgcagcaggccgactctttgtggaggactccattcatgatgagttcgtgcggagagtggtagaagaggtgcggaagatgaaggtgggcaacccgctggacagggacaccgaccacgggccgcagaatcaccatgcccaccttgtgaagctgatggagtactgccagcatggcgtgaaggaaggggccacactggtctgcggcgggaatcaggtccctcggccagggttcttctttgagccaactgttttcacagacgtggaagaccacatgttcatagccaaggaggagtccttcgggcctgtcatgatcatctctcggtttgctgatggggacttggatgccgtgctgtctcgggccaatgccacggaatttggcctggcttctggtgtcttcaccagggacatcaacaaggccctgtatgtcagtgacaagctccaggcaggcactgtgtttgtcaacacgtacaacaagaccgacgtggccgctcccttcggaggattcaaacagtctggatttggcaaagatctaggagaggcggctctgaacgagtacctgcgggtcaagacagtgaccttcgaatactgaagaaaggtctttgtgagaagaaagtccctgcccctccctcgtggctggggccccctccctcttgagcctgggtgcacagcacctcccacctggggggctagtggaagccctcctgcctgcacaccatgtctgcatcttggacgccctctgtccagtcagaagcagcccttggctgggtgaggtgtgcccctcccagggagaataaagcttctgaag

SEQ ID NO: 975 - DNA, 3137 bp, Homo sapiens
  source 1..3137: mol_type = unassigned DNA
acagtaagtcttcttgacctaagcgggaaagagcgcaggcccctgcggggttggcttttacatggcatttatagacccgcccggagagggtgcgctgcgctcccgccatagtcccaccaccggtgagcgccgcccccactcggctgactctccgcccgccccgcgcccctcccctcacgggctctggccttaaccagagctcgcggactggcggggacaggtcccacctcctggctcccaggacgggtctgcaccaacctcagtttcggggctgcggctcacagaagtctaacctgcccgggacgcccgcaccaactcctgcgcgcggtccttccaaccctcctgctaccatgaagattgcagtgattggacagagcctgtttggccaggaagtttactgccacctgaggaaggagggccacgaagtggtgggtgtgttcactgttccagacaaggatggaaaggccgaccccctgggtctggaagctgagaaggatggagtgccggtattcaagtactcccggtggcgtgcaaaaggacaggctttgcctgatgtggtggcaaaataccaggctttgggggccgagctcaacgtcctgcccttctgcagccaattcatccccatggagataatcagtgccccccggcatggctccatcatctatcacccgtcactgctccctaggcaccgaggggcctcggccatcaactggaccctcattcacggagataagaaaggggggttttccatcttctgggcggatgatggtctggacaccggagacctgctgctgcagaaggagtgtgaggtgctcccggacgacaccgtgagcacgctgtacaaccgcttcctcttccctgaaggcatcaaagggatggtgcaggccgtgaggctgatcgctgagggcaaagcccccagactccctcagcctgaggaaggagccacctatgaggggattcagaagaaggagacagccaagatcaactgggaccagccggcagaggccattcacaactggatccgcgggaacgacaaggtgccgggagcctggacagaggcctgtgaacagaaactgacatttttcaactcaacgctgaacacttcaggcctggtgcccgagggagacgctttgcccatcccaggagcccatcggccaggggtggtcaccaaagcaggactcatcctctttgggaatgatgacaaaatgctgctggtgaagaatattcagctggaggatggcaaaatgatcctggcctcgaacttctttaagggggcagccagcagtgtccttgagctgacagaggcagagctggttactgcggaggctgtgcggagtgtttggcagcggatcctccccaaagtcctggaggttgaagactccactgatttcttcaagtcaggggccgcgtctgtggacgttgtgaggctggtggaggaagtgaaggagctgtgtgatggcctggagttagaaaatgaagatgtgtacatggcatccacctttggggacttcatccagctgttagtgaggaagctgcgaggggacgatgaggagggcgagtgcagcattgactacgtggaaatggcagtgaacaagcgcactgtccgcatgccccaccagctcttcattgggggggagttcgtggatgccgagggcgccaagacctctgagaccatcaatcccaccgatggaagtgtcatctgccaggtatccctggcccaagtcaccgacgtcgacaaggcagtggccgcagccaaggatgcctttgagaatggacggtgggggaagatcagtgcgcgggaccggggccggctgatgtacagggctccaccatccccatcaaccaggccagacccaaccgcaacctgaccttgaccaggaaggagcctgttggggtttgtggcatcatcatcccctggaactatcccctgatgatgctgtcctggaagacagctgcctgcctggctgccgggaacacagtggtgatcaagcctgctcaggtgaccccactcacagccttgaagtttgcagagctgacattaaaggccggcattcccaaaggtgtggttaacgtcctcccaggatctggctccctggtcggccagagactctcagaccatcctgatgtgaggaaaatcgggttcacaggctccacagaggtgggcaagcacatcatgaaaagctgtgccataagtaacgtgaagaaggtgtccctggaactgggcgggaagtcacccctcatcatctttgctgactgtgacctcaacaaggctgtgcagatggggatgagttctgttttcttcaacaaaggagagaattgcattgcagcaggccgactctttgtggaggactccattcatgatgagttcgtgcggagagtggtagaagaggtgcggaagatgaaggtgggcaacccgctggacagggacaccgaccacgggccgcagaatcaccatgcccaccttgtgaagctgatggagtactgccagcatggcgtgaaggaaggggccacactggtctgcggcgggaatcaggtccctcggccagggttcttctttgagccaactgttttcacagacgtggaagaccacatgttcatagccaaggaggagtccttcgggcctgtcatgatcatctctcggtttgctgatggggacttggatgccgtgctgtctcgggccaatgccacggaatttggcctggcttctggtgtcttcaccagggacatcaacaaggccctgtatgtcagtgacaagctccaggcaggcactgtgtttgtcaacacgtacaacaagaccgacgtggccgctcccttcggaggattcaaacagtctggatttggcaaagatctaggagaggcggctctgaacgagtacctgcgggtcaagacagtgaccttcgaatactgaagaaaggtctttgtgagaagaaagtccctgcccctccctcgtggctggggccccctccctcttgagcctgggtgcacagcacctcccacctggggggctagtggaagccctcctgcctgcacaccatgtctgcatcttggacgccctctgtccagtcagaagcagcccttggctgggtgaggtgtgcccctcccagggagaataaagcttctgaagagagaccgtccac

SEQ ID NO: 976 - DNA, 7403 bp, Homo sapiens
  source 1..7403: mol_type = unassigned DNA
caacatatgaaggtatccagaaaaaggaaaatgctgagatttcttgggaccagtctgccgaagttttacataactggattcgaggtcatgataaagtccctggagcttggacagagataaatggacagatggtcactttctatggctcgacattactgaatagctctgtgcctcctggagaaccactggaaattaaaggtgccaagaagcctggtctcgttaccaaaaatggacttgttctttttggtaacgatggaaaagcactgacggtgagaaatctgcagtttgaagatggaaaaatgatccctgcctctcagtacttttcaacgggtgagacgtcagtggtagaactgacagctgaagaggtgaaagtggcagagaccatcaaggtcatctgggctggaattttaagcaatgtccccattattgaagactcaacagacttctttaaatctggagcaagctcaatggatgttgccaggctggttgaagagatcagacagaaatgtggtgggcttcagttgcagaatgaagatgtctatatggccaccaagtttgaaggctttatccaaaaggtcgtgaggaaactgagaggagaagatcaagaggtggagctggttgtagattatatttcaaaggaggtcaatgaaatcatggtaaaaatgccataccagtgtttcataaatggacagttcacagatgcagacgatggaaagacttacgacactatcaacccaacagatggatctacaatatgcaaagtatcctacgcttctttggcggatgttgataaagcagtagcagcagcaaaagatgcttttgaaaacggtgaatggggaagaatgaatgcaagagaaagaggaagattgatgtatagcatgagaatgaactaatacaagcaagatctggaacaaagattgtcggagggggatttcaagctggactctagagtggccccaaaggaacagctcagagaaccactacaaatacagaagaaaaataaatagagaagttgaacacaaaagatgagtcttaccgtatcatagtcattatacagtcctgcacttaccttcccataaaacttgtgaacaccaaacagaaatctgttgcagtgtttgtaattcattgtgtacgttgctatcttgtctcttcagttagttttggaaatatttttgtgccaactggaaatcctcaaatgttcatgggttctcagaagtgtgggttctgggaatgtggttccaatgactggtactggctcagtcattgttctacttcttacacatagatgaggcaagttatatatgcttccaataccctctgcttctcctttgtaattcttgaaacaaatgatttatgaaaatatttgtttaatgtctttcttgcctactggaccatgatctctataagggcagagatctgatccatatgtgtttacctctgaattctccgtccttaggatactgcattatatgtgacaggagctcaatcaatacttgttgaatttatttctttcactgaccacacagacttgcagacctactggaagagaaccaagaagagctggcaactattgaagcccttgattcaggggctgtctataccttggccctgaagacacacattggaatgtctgtgcaaacattcagatattttgctggctggtgcgacaaaattcagggttctactattccaatcaaccaggcccgtccaaatcgcaatctgaccttcaccaagaaagagccactcggtgtctgtgccattattattccctggaactacccgctgatgatgctggcatggaagagtgctgcgtgtttggcagcaggcaataccttagtgctcaagccagcacaggtcacgcccttgactgctttgaagtttgcagaactgtctgtgaaagcaggctttccaaagggggtcatcaacatcattccaggctcaggtggcatagcaggacaacgtctgtctgaacatcctgacatccgcaaacttggtttcactggatccactcctattggcaaacagatcatgaagagctgtgctgttagcaacttgaagaaagtttcccttgagcttggtggcaagtctccacttataatatttaatgactgtgaacttgacaaggctgtgcgaatgggcatgggagcagtatttttcaacaaaggagagaactgtattgctgctgggcggttgttcgtggaagaatccatccacgacgaatttgtgacaagagtggtagaagaaattaaaaagatgaaaattggtgatccacttgacagatccactgatcatgggccccaaaatcataaggctcatctggaaaagctgctgcaatactgtgaaactggagtgaaagaaggggccactttggtgtacgggggaagacaagtccaaaggccaggctttttcatggagccgaccgtgttcacagatgtggaagactacatgtacctcgccaaagaggaatcctttgggcctattatggtcatttctaaattccaaaatggggacatcgatggagtgttgcagcgagcaaatagtacagagtatggtttggcctcaggggtttttacaagagacataaacaaagctatgtatgtgagtgaaaaactggaagcaggaactgtttttattaacacatacaacaagacagatgtggcggccccatttggcggagttaaacaatctggctttggaaaagacttaggtgaggaagctctaaatgaatatctcaaaaccaagacggtgacactggaatattagagcaacaccatcatcaggaaagccttgacagacagccctttacaactctggacacacttaagaagattgggtgtgttgaggcaggaggtgtcagccacaaaccaaaaaatacacagatggaccatgaagagggccaggccatgttaaagcatttacacatgtgcctgagtattttctaatacaccttccagtgatttggagttgttgcattttgactatgttgtatatcatacgtatttctaaaataccaagctgtttctcccctacctagacaaatctattcatggttcccatcttgaagatgtcagtaccatgcagttataatacacaaggtgcatttattggaaactttgtataatatgtacaggtttttaacctctgaactatacatagggggttattaaaaagattttctataagtcttctaaggaacagtataacctgtaaggaatgtgaaggtagttcttttttagtatttggaaataagatacatctttgtgcctttgatattccattttttaacccactgtgatgggtgatcaacctagaaacattatcttgagtacctactaggtaccaggtactatattatgttctgaggagtatagagaatttaatgatatgatggctggcccccacatagtttaaattttagtaaatagcttttgaagcaaattttacatatgatatagtagaaggctgatcctggtcgtatcataccatcttcctatctatgtaactttgggaaactctcgcaactcctctgagcctctgcttccctatgtgtaaaacagggatagtaaatgccttcctcaggacccttaataggagaattcattgcagtaatgtaagtaaagcacctcacattaatgctttgctcatggtaagtactcaaatttaactctgatttcctccgtcaccattcttaaaagatattgagatagtttaattaactagatgaattcatttcccacaacccttttcaatcatcaattcctagatatttttctcatccattgttctgacacaatgcctgatacagcagcactgaaaaatgccacacaatgaaaaatggcaatagtacaaggaaaaggggtgcttttctttgggcagctcgctcgtccttcatgggacatcttactttccatttttctacctattggttctgctgttcactggctgtgtgatcttgggcaagatagtaatctaatatctcagagcctaggttgagtatctataaaatgaaaatcaaatctctatctcagtaggtgttgcaaggattcagtgagataatatacataatgcacttaacaaggcgtttggaccatagcattgaagaaatggaaactattaacagcccatttcccattggcagacagaagtagtcaggtgagtaaattttcaccatctatgtgtgactagaaggcggcaaatttctgaatcacatgagtctccaaaagatagccagaaagttaaattctattaatcctcctttaaaaataaaatttcagtaaacattcctttttctttggctttgaagaagccttagggaatatttgtcattttggagacttggcagaataacatgaggggattgtagggaatcaataaaaactaaacaacaaaatcagagtcagagaacattttcaaaaggaagaataggaggtttgatcccagcatgataaacagagcgaatttggcctggaagcacttttgattatactatagctcatttaccatcccagagtttggcacagctgaaattttaagttggaatgaatattcactgggcccaaaatgacagttcatatttgaataaaagtgacaaaagcctttttataagtaatcacttttaagtgaaatgttttaactgatttcatgtgatttagaatatgatttaatcaaattattttaatgatagatggaatggcagacaaaaacatgcctgtccttctagactgattttactttaccctctaatattcatctcagtagcagtgttttaaatattctctgggctgcaaaactctttgggaatctgataaaagctatgaacactccctgtgtcccgcttctacccccaaaattcatgtgcacacacacaattctgcaagtatcttcaaagggttcacagacctcccaaaggccatgcttgggccccagattaagaactcctttctccatagcaagttttaaacatttcttaccagcttacatttttagatctggctgatcagaatcaaaggctctgtgtaatacataaagttaccaagtgaactggaattggaacatcaccctccccagcctgctaggtgatttacttaacacatagagtaataaaatcatcgctgttgctttagatcacggattattttgctaataatgctaaggatgaagctgtgatcttattatcacctgaatcgggaggtgtggacactttaagcagttccactttccttctaattccccatccccatgcctttgctaaagctgtcccttttgctctaacacccttcctggaccttcctaccctagctgggctaagtgtttctcctcagcgttcccacttgtttcaaacatagcacttaccacttgtactaaaattacttgccttcttaattagatatgaacaaccctccccaactccagtatgggccttctgtcaataataatacgatatgacagctaccatttattaagggcctcctgtatgaaagaccttaggctaagcatgttttaaatgttatttaatcttcacaatctctgaaaaaaatgaagaaatcaacgtgcttttcttactacctctacccctaagccattattacttttttttttttttgagacagagttttgctcttgttgcccaggctgcagtgcagtggtgcaatcttggctcactgcaacctctgcctcttgggttcaagcgattgtcatgccttagccttccaagtagctgggattacaggtgtgtgccactacacctggctaagtagagatggggtttcgccatgttggccaggctggtcttgaactcctgacctcaagtgatccacctgcctccgcctcccaaagtgctgggattacaggcatgaaccactgcacctggcctgttacctctttcctacaattttgctcaagtctcccaactggtcttctggattcctctcttctgcggtcctgttcaaagcttaagtcagacagtgtcacttcactcgtctgtttaaaacctttcaatggcccccatttcacgtagaccaaagtccaacgtatttacctggcctactgatcttgctcctagctacctctgacctcatctcctgtcaatttccctctcattctgttccaccatcctgactgccttgacttcctcaacagaacaagcctgctcctgcctcagggcctctgtccttattcttcctcttcccaggggtgtgctggtaaaatatttaacaaatagttctccgggacgggggagaaaaccctcatttgtagcatttgcaggtatctatgtgtaaatactctcatcaaggctatttttgagccactaatttgccttcactgaatacagagtttgggaagagatgcatgccatcagaacaaatgcaagccagcaccagcacaccactgcctcttcctgcaactcttgtccatacacaacctcatggctggctggctcacttcctgcaggtctctcctcaaatatcatctgatgagagacacattccctgactatgctttctaaaataggccatatgcccccacattcataccccatctgctgtcattctttattctttttataagtgcattattttcatagcacttatcactacctgttgtatattaatcaatgatcttttcccattagaatgtaagtttcatgaacaggtacttgttttaatactgtatctccagtcctaatgtgtaacaggagcccaataaatgtttgctttcaaatggagaggttaagtaacctgctcaaatcacacagctattaagtggcagaacaggttttcaagcaatgcatctggtggttttaactaagtcgagatagtttttattcctaatgcctaaatcagggcctaggtagtgagctgtgggcacatattaagtattggttaaactaaaaataataagcaaaatggacattatctataaaagcttttgtggaaatggctagagctagggtaaggaaacaaatttggttccccatacctgccctccaagaaaataaagctgtcaaggaaaatctgggctaagagtaggatatgagggatgatggataaggcatgagacatgagaaataagggggattaaattattattactattatacaaatgatgcctgagtagatttttaaaatgattaaatacccaatgatgtaaaaaacatttataaaataggaaagtaagactgactcaaccataatttgttgagtcaacccaaaaatctatttggttattttcaaacagaaatagcctacagatgatatctgagattgttccaaactttttctatgaatatgtatactttttttacataattaacataatactgtatattaatttgttacctgctttttcaattaacaatatatcataagcatctatgccaataaacacaattctgcatatttcaa

SEQ ID NO: 977 - DNA, 7547 bp, Homo sapiens
  source 1..7547: mol_type = unassigned DNA
agcagaggccgagagcggcgagccgcgagccaggcagtccggggcatccagactgcaggccgcgcccaggccgcgcccaggctgcgccgcccgcctgcctcccgcgctgccgcgtcgccagtgctagcgctcctctccagcatgctgcggcggggcagccaggcgctccggcgcttctccactggccgggtttatttcaaaaacaagctgaagttggcactaattggccagagcctctttggacaagaagtctatagccacctccgcaaagagggccaccgagtagtaggggtgttcacagttccagacaaggatggaaaagctgaccctctggctttggctgcagagaaagatgggacccctgtgttcaagcttcctaaatggagggtcaagggcaagaccatcaaagaagtggcagaagcctacagatccgtgggtgcagagctaaatgtgctccctttctgcactcagttcattcccatggatataattgatagtccaaagcacggctctatcatttatcacccatccatcctgcccaggcacagaggagcctctgctatcaattggactctaattatgggagataagaaagctgggttttctgttttctgggctgatgatggcttggatacaggacccatccttcttcagagatcatgtgatgttgaacccaatgatacagtggatgcactttataatcggtttctttttcctgaaggaatcaaggccatggtagaagctgtccaactcatagctgatggaaaagctcctcgtataccccagccagaagaaggggcaacatatgaaggtatccagaaaaaggaaaatgctgagatttcttgggaccagtctgccgaagttttacataactggattcgaggtcatgataaagtccctggagcttggacagagataaatggacagatggtcactttctatggctcgacattactgaatagctctgtgcctcctggagaaccactggaaattaaaggtgccaagaagcctggtctcgttaccaaaaatggacttgttctttttggtaacgatggaaaagcactgacggtgagaaatctgcagtttgaagatggaaaaatgatccctgcctctcagtacttttcaacgggtgagacgtcagtggtagaactgacagctgaagaggtgaaagtggcagagaccatcaaggtcatctgggctggaattttaagcaatgtccccattattgaagactcaacagacttctttaaatctggagcaagctcaatggatgttgccaggctggttgaagagatcagacagaaatgtggtgggcttcagttgcagaatgaagatgtctatatggccaccaagtttgaaggctttatccaaaaggtcgtgaggaaactgagaggagaagatcaagaggtggagctggttgtagattatatttcaaaggaggtcaatgaaatcatggtaaaaatgccataccagtgtttcataaatggacagttcacagatgcagacgatggaaagacttacgacactatcaacccaacagatggatctacaatatgcaaagtatcctacgcttctttggcggatgttgataaagcagtagcagcagcaaaagatgcttttgaaaacggtgaatggggaagaatgaatgcaagagaaagaggaagattgatgtatagacttgcagacctactggaagagaaccaagaagagctggcaactattgaagcccttgattcaggggctgtctataccttggccctgaagacacacattggaatgtctgtgcaaacattcagatattttgctggctggtgcgacaaaattcagggttctactattccaatcaaccaggcccgtccaaatcgcaatctgaccttcaccaagaaagagccactcggtgtctgtgccattattattccctggaactacccgctgatgatgctggcatggaagagtgctgcgtgtttggcagcaggcaataccttagtgctcaagccagcacaggtcacgcccttgactgctttgaagtttgcagaactgtctgtgaaagcaggctttccaaagggggtcatcaacatcattccaggctcaggtggcatagcaggacaacgtctgtctgaacatcctgacatccgcaaacttggtttcactggatccactcctattggcaaacagatcatgaagagctgtgctgttagcaacttgaagaaagtttcccttgagcttggtggcaagtctccacttataatatttaatgactgtgaacttgacaaggctgtgcgaatgggcatgggagcagtatttttcaacaaaggagagaactgtattgctgctgggcggttgttcgtggaagaatccatccacgacgaatttgtgacaagagtggtagaagaaattaaaaagatgaaaattggtgatccacttgacagatccactgatcatgggccccaaaatcataaggctcatctggaaaagctgctgcaatactgtgaaactggagtgaaagaaggggccactttggtgtacgggggaagacaagtccaaaggccaggctttttcatggagccgaccgtgttcacagatgtggaagactacatgtacctcgccaaagaggaatcctttgggcctattatggtcatttctaaattccaaaatggggacatcgatggagtgttgcagcgagcaaatagtacagagtatggtttggcctcaggggtttttacaagagacataaacaaagctatgtatgtgagtgaaaaactggaagcaggaactgtttttattaacacatacaacaagacagatgtggcggccccatttggcggagttaaacaatctggctttggaaaagacttaggtgaggaagctctaaatgaatatctcaaaaccaagacggtgacactggaatattagagcaacaccatcatcaggaaagccttgacagacagccctttacaactctggacacacttaagaagattgggtgtgttgaggcaggaggtgtcagccacaaaccaaaaaatacacagatggaccatgaagagggccaggccatgttaaagcatttacacatgtgcctgagtattttctaatacaccttccagtgatttggagttgttgcattttgactatgttgtatatcatacgtatttctaaaataccaagctgtttctcccctacctagacaaatctattcatggttcccatcttgaagatgtcagtaccatgcagttataatacacaaggtgcatttattggaaactttgtataatatgtacaggtttttaacctctgaactatacatagggggttattaaaaagattttctataagtcttctaaggaacagtataacctgtaaggaatgtgaaggtagttcttttttagtatttggaaataagatacatctttgtgcctttgatattccattttttaacccactgtgatgggtgatcaacctagaaacattatcttgagtacctactaggtaccaggtactatattatgttctgaggagtatagagaatttaatgatatgatggctggcccccacatagtttaaattttagtaaatagcttttgaagcaaattttacatatgatatagtagaaggctgatcctggtcgtatcataccatcttcctatctatgtaactttgggaaactctcgcaactcctctgagcctctgcttccctatgtgtaaaacagggatagtaaatgccttcctcaggacccttaataggagaattcattgcagtaatgtaagtaaagcacctcacattaatgctttgctcatggtaagtactcaaatttaactctgatttcctccgtcaccattcttaaaagatattgagatagtttaattaactagatgaattcatttcccacaacccttttcaatcatcaattcctagatatttttctcatccattgttctgacacaatgcctgatacagcagcactgaaaaatgccacacaatgaaaaatggcaatagtacaaggaaaaggggtgcttttctttgggcagctcgctcgtccttcatgggacatcttactttccatttttctacctattggttctgctgttcactggctgtgtgatcttgggcaagatagtaatctaatatctcagagcctaggttgagtatctataaaatgaaaatcaaatctctatctcagtaggtgttgcaaggattcagtgagataatatacataatgcacttaacaaggcgtttggaccatagcattgaagaaatggaaactattaacagcccatttcccattggcagacagaagtagtcaggtgagtaaattttcaccatctatgtgtgactagaaggcggcaaatttctgaatcacatgagtctccaaaagatagccagaaagttaaattctattaatcctcctttaaaaataaaatttcagtaaacattcctttttctttggctttgaagaagccttagggaatatttgtcattttggagacttggcagaataacatgaggggattgtagggaatcaataaaaactaaacaacaaaatcagagtcagagaacattttcaaaaggaagaataggaggtttgatcccagcatgataaacagagcgaatttggcctggaagcacttttgattatactatagctcatttaccatcccagagtttggcacagctgaaattttaagttggaatgaatattcactgggcccaaaatgacagttcatatttgaataaaagtgacaaaagcctttttataagtaatcacttttaagtgaaatgttttaactgatttcatgtgatttagaatatgatttaatcaaattattttaatgatagatggaatggcagacaaaaacatgcctgtccttctagactgattttactttaccctctaatattcatctcagtagcagtgttttaaatattctctgggctgcaaaactctttgggaatctgataaaagctatgaacactccctgtgtcccgcttctacccccaaaattcatgtgcacacacacaattctgcaagtatcttcaaagggttcacagacctcccaaaggccatgcttgggccccagattaagaactcctttctccatagcaagttttaaacatttcttaccagcttacatttttagatctggctgatcagaatcaaaggctctgtgtaatacataaagttaccaagtgaactggaattggaacatcaccctccccagcctgctaggtgatttacttaacacatagagtaataaaatcatcgctgttgctttagatcacggattattttgctaataatgctaaggatgaagctgtgatcttattatcacctgaatcgggaggtgtggacactttaagcagttccactttccttctaattccccatccccatgcctttgctaaagctgtcccttttgctctaacacccttcctggaccttcctaccctagctgggctaagtgtttctcctcagcgttcccacttgtttcaaacatagcacttaccacttgtactaaaattacttgccttcttaattagatatgaacaaccctccccaactccagtatgggccttctgtcaataataatacgatatgacagctaccatttattaagggcctcctgtatgaaagaccttaggctaagcatgttttaaatgttatttaatcttcacaatctctgaaaaaaatgaagaaatcaacgtgcttttcttactacctctacccctaagccattattacttttttttttttttgagacagagttttgctcttgttgcccaggctgcagtgcagtggtgcaatcttggctcactgcaacctctgcctcttgggttcaagcgattgtcatgccttagccttccaagtagctgggattacaggtgtgtgccactacacctggctaagtagagatggggtttcgccatgttggccaggctggtcttgaactcctgacctcaagtgatccacctgcctccgcctcccaaagtgctgggattacaggcatgaaccactgcacctggcctgttacctctttcctacaattttgctcaagtctcccaactggtcttctggattcctctcttctgcggtcctgttcaaagcttaagtcagacagtgtcacttcactcgtctgtttaaaacctttcaatggcccccatttcacgtagaccaaagtccaacgtatttacctggcctactgatcttgctcctagctacctctgacctcatctcctgtcaatttccctctcattctgttccaccatcctgactgccttgacttcctcaacagaacaagcctgctcctgcctcagggcctctgtccttattcttcctcttcccaggggtgtgctggtaaaatatttaacaaatagttctccgggacgggggagaaaaccctcatttgtagcatttgcaggtatctatgtgtaaatactctcatcaaggctatttttgagccactaatttgccttcactgaatacagagtttgggaagagatgcatgccatcagaacaaatgcaagccagcaccagcacaccactgcctcttcctgcaactcttgtccatacacaacctcatggctggctggctcacttcctgcaggtctctcctcaaatatcatctgatgagagacacattccctgactatgctttctaaaataggccatatgcccccacattcataccccatctgctgtcattctttattctttttataagtgcattattttcatagcacttatcactacctgttgtatattaatcaatgatcttttcccattagaatgtaagtttcatgaacaggtacttgttttaatactgtatctccagtcctaatgtgtaacaggagcccaataaatgtttgctttcaaatggagaggttaagtaacctgctcaaatcacacagctattaagtggcagaacaggttttcaagcaatgcatctggtggttttaactaagtcgagatagtttttattcctaatgcctaaatcagggcctaggtagtgagctgtgggcacatattaagtattggttaaactaaaaataataagcaaaatggacattatctataaaagcttttgtggaaatggctagagctagggtaaggaaacaaatttggttccccatacctgccctccaagaaaataaagctgtcaaggaaaatctgggctaagagtaggatatgagggatgatggataaggcatgagacatgagaaataagggggattaaattattattactattatacaaatgatgcctgagtagatttttaaaatgattaaatacccaatgatgtaaaaaacatttataaaataggaaagtaagactgactcaaccataatttgttgagtcaacccaaaaatctatttggttattttcaaacagaaatagcctacagatgatatctgagattgttccaaactttttctatgaatatgtatactttttttacataattaacataatactgtatattaatttgttacctgctttttcaattaacaatatatcataagcatctatgccaataaacacaattctgcata

SEQ ID NO: 978 - DNA, 2746 bp, Homo sapiens
  source 1..2746: mol_type = unassigned DNA
agtgctagcgctcctctccagcatgctgcggcggggcagccaggcgctccggcgcttctccactggccgggtttatttcaaaaacaagctgaagttggcactaattggccagagcctctttggacaagaagtctatagccacctccgcaaagagggccaccgagtagtaggggtgttcacagttccagacaaggatggaaaagctgaccctctggctttggctgcagagaaagatgggacccctgtgttcaagcttcctaaatggagggtcaagggcaagaccatcaaagaagtggcagaagcctacagatccgtgggtgcagagctaaatgtgctccctttctgcactcagttcattcccatggatataattgatagtccaaagcacggctctatcatttatcacccatccatcctgcccaggcacagaggagcctctgctatcaattggactctaattatgggagataagaaagctgggttttctgttttctgggctgatgatggcttggatacaggacccatccttcttcagagatcatgtgatgttgaacccaatgatacagtggatgcactttataatcggtttctttttcctgaaggaatcaaggccatgaagctgtccaactcatagctgatggaaaagctcctcgtataccccagccagaagaaggggcaacatatgaaggtatccagaaaaaggaaaatgctgagatttcttgggaccagtctgccgaagttttacataactggattcgaggtcatgataaagtccctggagcttggacagagataaatggacagatggtcactttctatggctcgacattactgaatagctctgtgcctcctggagaaccactggaaattaaaggtgccaagaagcctggtctcgttaccaaaaatggacttgttctttttggtaacgatggaaaagcactgacggtgagaaatctgcagtttgaagatggaaaaatgatccctgcctctcagtacttttcaacgggtgagacgtcagtggtagaactgacagctgaagaggtgaaagtggcagagaccatcaaggtcatctgggctggaattttaagcaatgtccccattattgaagactcaacagacttctttaaatctggagcaagctcaatggatgttgccaggctggttgaagagatcagacagaaatgtggtgggcttcagttgcagaatgaagatgtctatatggccaccaagtttgaaggctttatccaaaaggtcgtgaggaaactgagaggagaagatcaagaggtggagctggttgtagattatatttcaaaggaggtcaatgaaatcatggtaaaaatgccataccagtgtttcataaatggacagttcacagatgcagacgatggaaagacttacgacactatcaacccaacagatggatctacaatatgcaaagtatcctacgcttctttggcggatgttgataaagcagtagcagcagcaaaagatgcttttgaaaacggtgaatggggaagaatgaatgcaagagaaagaggaagattgatgtatagacttgcagacctactggaagagaaccaagaagagctggcaactattgaagcccttgattcaggggctgtctataccttggccctgaagacacacattggaatgtctgtgcaaacattcagatattttgctggctggtgcgacaaaattcagggttctactattccaatcaaccaggcccgtccaaatcgcaatctgaccttcaccaagaaagagccactcggtgtctgtgccattattattccctggaactacccgctgatgatgctggcatggaagagtgctgcgtgtttggcagcaggcaataccttagtgctcaagccagcacaggtcacgcccttgactgctttgaagtttgcagaactgtctgtgaaagcaggctttccaaagggggtcatcaacatcattccaggctcaggtggcatagcaggacaacgtctgtctgaacatcctgacatccgcaaacttggtttcactggatccactcctattggcaaacagatcatgaagagctgtgctgttagcaacttgaagaaagtttcccttgagcttggtggcaagtctccacttataatatttaatgactgtgaacttgacaaggctgtgcgaatgggcatgggagcagtatttttcaacaaaggagagaactgtattgctgctgggcggttgttcgtggaagaatccatccacgacgaatttgtgacaagagtgatccactgatcatgggccccaaaatcataaggctcatctggaaaagctgctgcaatactgtgaaactggagtgaaagaaggggccactttggtgtacgggggaagacaagtccaaaggccaggctttttcatggagccgaccgtgttcacagatgtggaagactacatgtacctcgccaaagaggaatcctttgggcctattatggtcatttctaaattccaaaatggggacatcgatggagtgttgcagcgagcaaatagtacagagtatggtttggcctcaggggtttttacaagagacataaacaaagctatgtatgtgagtgaaaaactggaagcaggaactgtttttattaacacatacaacaagacagatgtggcggccccatttggcggagttaaacaatctggctttggaaaagacttaggtgaggaagctctaaatgaatatctcaaaaccaagacggtgacactggaatattag

SEQ ID NO: 979 - DNA, 527 bp, Homo sapiens
  source 1..527: mol_type = unassigned DNA
ggtagaagaaattaaaaagatgaaaattggtgatccacttgacagatccactgatcatgggccccaaaatcataaggctcatctggaaaagctgctgcaatactgtgaaactggagtgaaagaaggggccactttggtgtacgggggaagacaagtccaaaggccaggctttttcatggagccgaccgtgttcacagatgtggaagactacatgtacctcgccaaagaggaatcctttgggcctattatggtcatttctaaattccaaaatgggtaggttcttcagacacaatgtaacttaggttttgactagataagtcatttttcccctttgccactgtgctatatacacagcataagattaatgaacatgtaattttctaccataagaataattaacttaaataattagaagttacgcttttgctaaccatcgtagatcatagtatatttttgcttttcagcttcaattaatggccaacataatgggcttttagctgaataaattttagtttttctgcacttga

SEQ ID NO: 980 - DNA, 486 bp, Homo sapiens
  source 1..486: mol_type = unassigned DNA
tctccagcatgctgcggcggggcagccaggcgctccggcgcttctccactggccgggtttatttcaaaaacaagctgaagttggcactaattggccagagcctctttggacaagaagtctatagccacctccgcaaagagggccaccgagtagtaggggtgttcacagttccagacaaggatggaaaagctgaccctctggctttggctgcagagaaagatgggacccctgtgttcaagcttcctaaatggagggtcaagggcaagaccatcaaagaagtggcagaagcctacagatccgtgggtgcagagctaaatgtgctccctttctgcactcagttcattcccatggatataattgatagtccaaagcacggctctatcatttatcacccatccatcctgcccaggcacagaggagcctctgctatcaattggtgagattttttctttttactttttttttttgagatggggtcttgctatg

SEQ ID NO: 981 - DNA, 5499 bp, Homo sapiens
  source 1..5499: mol_type = unassigned DNA
ccaatgaggaagcctggcaggatggagggcgaggcctggcagctgtagtgcttctgggcagtagaggcgcggggtgcggagctagggcggccgagagccatggcggcgctattggcggcggcggcagtgcgagcccggatcctgcaggtttcttccaaggtgaaatccagtcccacctggtattcagcatcttccttctcttcttcagtgccaactgtaaagctcttcattggtgggaaattcgttgaatccaaaagtgacaaatggatcgatatccacaacccagccaccaatgaggtcattggtcgggtccctcaggccaccaaggcagaaatggatgcagccattgcttcctgcaaacgtgcttttcctgcatgggcagacacttcagtattaagccgccagcaggtcttgctccgctatcaacaacttattaaagaaaacttgaaagaaattgccaagttaatcacattggaacaagggaagaccctagctgatgctgaaggagatgtatttcgaggccttcaggtggttgagcatgcctgtagtgtgacatccctcatgatgggagagaccatgccatccatcaccaaagacatggacctttattcctaccgtctgcctctgggagtgtgtgcaggcattgctccattcaattttcctgccatgatccccctttggatgtttcccatggccatggtgtgtggaaataccttcctaatgaaaccatctgagcgagtccctggagcaactatgcttcttgctaagttgctccaggattctggtgcccctgatggaacattaaacatcatccatggacagcatgaagctgtaaattttatttgcgatcatccggacatcaaagcaatcagctttgtgggatccaacaaggcaggagagtatatcttcgagagaggatcaagacatggcaagagggttcaagccaatatgggagccaagaaccatggggtagtcatgccagatgccaataaggaaaataccctgaaccagctggttggggcagcatttggagctgctggtcagcgctgcatggctctttcaacagcagtccttgtgggagaagccaagaagtggctgccagagctggtggagcatgccaaaaacctgagagtcaatgcaggagatcagcctggagctgatcttggccctctgatcactccccaggccaaagagcgagtctgtaatctgattgatagtggaacaaaggagggagcttccatccttcttgatggacgaaaaattaaagtgaaaggctatgaaaatggcaactttgttggaccaaccatcatctcgaatgtcaagccaaatatgacctgttacaaagaggagatttttggtccagttcttgtggttctggagacagaaacattggatgaagccatccagattgtaaataacaacccatatggaaatggaactgccatcttcaccaccaatggagccactgctcggaaatatgcccacttggtggatgttggacaggtgggagtgaatgtccccattccagtgcctttgccaatgttctcattcaccggctctcgatcctccttcaggggagacaccaatttctatggcaaacagggcatccaattctacactcagttaaagaccattacttctcagtggaaagaagaagatgctactctttcctcacctgctgttgtcatgcctaccatgggccgttagaaacaagtttgtttaagactgactccatcctgagtaatctccctttatttttgaccagcttcatttgtcagctttgctcagatcagatcgatgggattggaatacattgtaactaaaatcttcctcaggactattaacccccgcaaagtttctatagggaactgcctagtgtaacaatgaaaccagatttctcacttgctcttcatacttctattttgaggtaactgttgtaactatgaaatgcttatctgaaagtagtgcttaaacctgatttctaaaaattatcccattttctgatgatttgaaggggagaaaagccagtgtatgtaaagaaaatgttccagccaggcgcggtggctcacgcctgtaattccatcattttgggaggccacagtgggcagattgcttgagcccaggagttgaagaacgtggcgaaaccccgtatctattatttaaaaaaattgaaaaagtaaaaaaagaaaagggaaaaaaaattttttaaagaagatgttccaataattgcaagaagaactcttagatggggaaacaggacagaaataactcaccgcttttggttgatcctcaaacatagcgctacctaaatgccactgggagagacctcctgcaaagttttctttagcccctcttttatcccacaatacacaagatataatccatttttatatatcccaaagttgtggcaacagcttctttcttttctgctcaatgccactttgtttcctagtaattcatgaccactattaattctatcattgtcactgctcctgcttaagatcacttctcaaggatacctcagtaagcaatggataaatcaactttttgttatatgtgccaagtactaagtttcagggttctcttcagcaatcattaattaatacttcagccattaattcagatgcaaataattttcttttttcttttttttgagatggagtttcactcttgttgcccaggctggagtgcaatggcgtgatctcagctcaccgcaacctccgcctcccaggttcaagcgattctcctgcctcagcccccctagtagctgggattacaggcatgcgccaccacacccagctaattttgtatttttagtagagacggggtttctccgtgttggtcaggctggtctcgaactcctgacctcaggtgatccgcctgcctcggcctcccaaagtgctgggattacaggcatgagccaccacacccagccagatgcaaataattttcttagaaaattatttcaaaagttattttaggcccagaaatcaaggattgttccaaccatgaaaatgggtaagacacctgccttaagcaaatctaacctgctattacttgccaaattttatatattcttttctcttgcctgtatttctaattagtgatttgtttaatgaagaactcttcatgtagagcaattaactgggcctaagaaatttcgaagctttccatgacataaagtggttaaaaaaaaatgctttgacagtcttcttctgccattagttcaactgcctttacgcttttttttttttttttttttttgagatggagtttcactcttgttgcccaggctagagtgcaatggcgtgatcttggctcactgcaacctctgcctcccgggttcaagcaattctcctgcctcagcctcctgagtagctgggatttcaggcatacgccaccatgcctggctaattttgtatttttagtagagacagggtttctccatgttggtcaggctggtctcgaactcccgacctcaggtgatctgcctgccttggcctcccaaagtgctgggattacaggtgtgagccaccacccccagccgcctctatgctttttgtttctttgatatatctaaacttaaggtcagaacagaaattcatgtgctgaacagaatggattctttttgcagtaccaatccaattgaatcctctttttattttcctgcgtccttaccagtcactttgatagtgctaactaacctacactatgggggttattcatgaattaagtatgataaaaaaaaaaaagaccttgaaaatgttgtgtaccctgtggatttgaggcttattactaccacctggctggataaaatgtcaaaaccttcaatcacttaaggtgactggaacttttgtaaaatacacttatgatcctactgggccttttttttttttttttctgctttcctaaatatgaggcaatagaaatttataatttgagactacagtaccccttgttttagctcttatcacagctggcaactggtagtgattttttttgttgttgttttgttttgttttgagatggagtctcgctctgttgcccagggtggagtgcagtggcacgatctcggctcactgcaacctccacctcctgggttcaagtaattctcctgcctcagtctcccgagtagctgggattacaggtgcatgcccccacacccggataattttttgtacttttagtagagacagggtttcaccatgttagccaggatggtctcaatctcctgacctaatgatccgcccacctcggcctcccaaagtgctgggattacaggcgtgaaccaccgcacctggccctggtagtgatatttaatccaatccaacaactataggctgggttaaataaaaggtcattattgtctatattccaagtggaattaaatgtagtcacagagattcctaacattttccttatatttaagggaaatcacttctaaaaaaacacactaatcagaactgtgatgctctaattagaaacaactcatctggccaactatttgctgctcagagtttcttatttcttagatgaaaaaaactcatcagttatattcatgtgatcgcggctaaaaagtcagtattttctttttgttctaatgtggcttcatttgaaatttctcagattctacattgtactaattatgaataacaaattataaattaaaaactcttaaagagaaaaacttggcttaaaaaaatcatttcatatctccttataagcctttgtcctctaggttgtaatgactctgacttcccacctgtgatggaaagctaagagtcacaaggtcactatgtttactcttacgtaaaagatagtacacattttggctaggctgtttacttcaaaaggcaacctataggtttctacacaaaaagaggcacacatttgcatttgcattagtataatatgcatttgtacggatattgctttaaaaatttatgtaatctactaatgctatttattactcattccactgatccctgaagtctctcaactagtagagaaaataaccgtgatttagcaagaagcgacatggggaagggtgacaacaatatacattgtttgattagatacagactccttactgtgtcagactcctgaggttcttttggaatagtgggtagcaccacttcaccagaagagtctgatattgcaatttgctgggtgatgaagattttatcttgaagcttactttcatccctgcaataatgacaaaataacagaaccgtcaacaactctacacacatgaaacctggtttagaataacagacttgtcatattactttcaattagcacattcaagatgcccacaagaaccatcgtgttgggctcatgtttattacttaagcaagagagctcttacccaaattcctttgtttccccactgtcagaaacaacatagtctggaactggaggcctagaactctggttgtatttcctgtagtgggtaaaagtcaacaaagataatgaatgaggcagtgtctcctcatgcct

SEQ ID NO: 982 - DNA, 2221 bp, Homo sapiens
  source 1..2221: mol_type = unassigned DNA
gtagtgcttctgggcagtagaggcgcggggtgcggagctagggcggccgagagccatggcggcgctattggcggcggcggcagtgcgagcccggatcctgcaggtttcttccaaggtgaaatccagtcccacctggtattcagcatcttccttctcttcttcagtgccaactgtaaagctcttcattggtgggaaattcgttgaatccaaaagtgacaaatggatcgatatccacaacccagccaccaatgaggtcattggtcgggtccctcaggccaccaaggcagaaatggatgcagccattgcttcctgcaaacgtgcttttcctgcatgggcagacacttcagtattaagccgccagcaggtcttgctccgctatcaacaacttattaaagaaaacttgaaagaaattgccaagttaatcacattggaacaagggaagaccctagctgatgctgaaggagatgtatttcgaggccttcagaatctcattttgcacaaacccttaacttggaagggcaagtcagtgtaccctgcaccccttcattggcctgaaccacttcctgtcctcagggctgaagagaacaggacaaagctaactagtacacagtgtggagagctgatggcctgacttctgtgttccagaggtggttgagcatgcctgtagtgtgacatccctcatgatgggagagaccatgccatccatcaccaaagacatggacctttattcctaccgtctgcctctgggagtgtgtgcaggcattgctccattcaattttcctgccatgatccccctttggatgtttcccatggccatggtgtgtggaaataccttcctaatgaaaccatctgagcgagtccctggagcaactatgcttcttgctaagttgctccaggattctggtgcccctgatggaacattaaacatcatccatggacagcatgaagctgtaaattttatttgcgatcatccggacatcaaagcaatcagctttgtgggatccaacaaggcaggagagtatatcttcgagagaggatcaagacatggcaagagggttcaagccaatatgggagccaagaaccatggggtagtcatgccagatgccaataaggaaaataccctgaaccagctggttggggcagcatttggagctgctggtcagcgctgcatggctctttcaacagcagtccttgtgggagaagccaagaagtggctgccagagctggtggagcatgccaaaaacctgagagtcaatgcaggagatcagcctggagctgatcttggccctctgatcactccccaggccaaagagcgagtctgtaatctgattgatagtggaacaaaggagggagcttccatccttcttgatggacgaaaaattaaagtgaaaggctatgaaaatggcaactttgttggaccaaccatcatctcgaatgtcaagccaaatatgacctgttacaaagaggagatttttggtccagttcttgtggttctggagacagaaacattggatgaagccatccagattgtaaataacaacccatatggaaatggaactgccatcttcaccaccaatggagccactgctcggaaatatgcccacttggtggatgttggacaggtgggagtgaatgtccccattccagtgcctttgccaatgttctcattcaccggctctcgatcctccttcaggggagacaccaatttctatggcaaacagggcatccaattctacactcagttaaagaccattacttctcagtggaaagaagaagatgctactctttcctcacctgctgttgtcatgcctaccatgggccgttagaaacaagtttgtttaagactgactccatcctgagtaatctccctttatttttgaccagcttcatttgtcagctttgctcagatcagatcgatgggattggaatacattgtaactaaaatcttcctcaggactattaacccccgcaaagtttctatagggaactgcctagtgtaacaatgaaaccagatttctcacttgctcttcatacttctattttgaggtaactgttgtaactatgaaatgcttatctgaaagtagtgcttaaacctgatttctaaaaattatcccattttctgatgatttgaaggggagaaaagccagtgtatgtaaagaaaatgttccagccaggcgcggtggctcacgcctgtaattccatcattttgggaggccacagt

SEQ ID NO: 983 - DNA, 1869 bp, Homo sapiens
  source 1..1869: mol_type = unassigned DNA
agtgcttctgggcagtagaggcgcggggtgcggagctagggcggccgagagccatggcggcgctattggcggcggcggcagtgcgagcccggatcctgcaggtttcttccaaggtgaaatccagtcccacctggtattcagcatcttccttctcttcttcagtgccaactgtaaagctcttcattggtgggaaattcgttgaatccaaaagtgacaaatggatcgatatccacaacccagccaccaatgaggtcattggtcgggtccctcaggccaccaaggcagaaatggatgcagccattgcttcctgcaaacgtgcttttcctgcatgggcagacacttcagtattaagccgccagcagaaagaaattgccaagttaatcacattggaacaagggaagaccctagctgatgctgaaggagatgtatttcgaggccttcaggtggttgagcatgcctgtagtgtgacatccctcatgatgggagagaccatgccatccatcaccaaagacatggacctttattcctaccgtctgcctctgggagtgtgtgcaggcattgctccattcaattttcctgccatgatccccctttggatgtttcccatggccatggtgtgtggaaataccttcctaatgaaaccatctgagcgagtccctggagcaactatgcttcttgctaagttgctccaggattctggtgcccctgatggaacattaaacatcatccatggacagcatgaagctgtaaattttatttgcgatcatccggacatcaaagcaatcagctttgtgggatccaacaaggcaggagagtatatcttcgagagaggatcaagacatggcaagagggttcaagccaatatgggagccaagaaccatggggtagtcatgccagatgccaataaggaaaataccctgaaccagctggttggggcagcatttggagctgctggtcagcgctgcatggctctttcaacagcagtccttgtgggagaagccaagaagtggctgccagagctggtggagcatgccaaaaacctgagagtcaatgcaggagatcagcctggagctgatcttggccctctgatcactccccaggccaaagagcgagtctgtaatctgattgatagtggaacaaaggagggagcttccatccttcttgatggacgaaaaattaaagtgaaaggctatgaaaatggcaactttgttggaccaaccatcatctcgaatgtcaagccaaatatgacctgttacaaagaggagatttttggtccagttcttgtggttctggagacagaaacattggatgaagccatccagattgtaaataacaacccatatggaaatggaactgccatcttcaccaccaatggagccactgctcggaaatatgcccacttggtggatgttggacaggtgggagtgaatgtccccattccagtgcctttgccaatgttctcattcaccggctctcgatcctccttcaggggagacaccaatttctatggcaaacagggcatccaattctacactcagttaaagaccattacttctcagtggaaagaagaagatgctactctttcctcacctgctgttgtcatgcctaccatgggccgttagaaacaagtttgtttaagactgactccatcctgagtaatctccctttatttttgaccagcttcatttgtcagctttgctcagatcagatcgatgggattggaatacattgtaactaaaatcttcctcaggactattaacccccgcaaagtttctatagggaactgcctagtgtaacaatgaaaccagatttctcacttgctcttcatacttctattttgaggtaactgttgtaactatgaaatgctta

SEQ ID NO: 984 - DNA, 1382 bp, Homo sapiens
  source 1..1382: mol_type = unassigned DNA
ggtggtgggtgcctataatcccagctgcttgggaggctgaggcagagaattgcttgaacctgggaggcggaggttgcagtgagccgaaattgtgccactgcactccagcctgggcaacagagcgagactccgtctcaaaaaaaaaaaaaaaaaaaaagaaaaagtaaaagaaaaacacaggaaaacttcaaatccatagcagtggggaaaggggaaatttgccatgttgagaatccatttgctcctttgtgagtgatcatttattttcttcttaaagctgtaaattttatttgcgatcatccggacatcaaagcaatcagctttgtgggatccaacaaggcaggagagtatatcttcgagagaggatcaagacatggcaagagggttcaagccaatatgggagccaagaaccatggggtagtcatgccagatgccaataaggaaaataccctgaaccagctggttggggcagcatttggagctgctggtcagcgctgcatggctctttcaacagcagtccttgtgggagaagccaagaagtggctgccagagctggtggagcatgccaaaaacctgagagtcaatgcaggagatcagcctggagctgatcttggccctctgatcactccccaggccaaagagcgagtctgtaatctgattgatagtggaacaaaggagggagcttccatccttcttgatggacgaaaaattaaagtgaaaggctatgaaaatggcaactttgttggaccaaccatcatctcgaatgtcaagccaaatatgacctgttacaaagaggagatttttggtccagttcttgtggttctggagacagaaacattggatgaagccatccagattgtaaataacaacccatatggaaatggaactgccatcttcaccaccaatggagccactgctcggaaatatgcccacttggtggatgttggacaggtgggagtgaatgtccccattccagtgcctttgccaatgttctcattcaccggctctcgatcctccttcaggggagacaccaatttctatggcaaacagggcatccaattctacactcagttaaagaccattacttctcagtggaaagaagaagatgctactctttcctcacctgctgttgtcatgcctaccatgggccgttagaaacaagtttgtttaagactgactccatcctgagtaatctccctttatttttgaccagcttcatttgtcagctttgctcagatcagatcgatgggattggaatacattgtaactaaaatcttcctcaggactattaacccccgcaaagtttctatagggaactgcctagtgtaacaatgaaaccagatttctcacttgctcttcatacttctattttgaggtaactg

SEQ ID NO: 985 - DNA, 1323 bp, Homo sapiens
  source 1..1323: mol_type = unassigned DNA
caatgaggaagcctggcaggatggagggcgaggcctggcagctgtagtgcttctgggcagtagaggcgcggggtgcggagctagggcggccgagagccatggcggcgctattggcggcggcggcagtgcgagcccggatcctgcaggtttcttccaaggtgaaatccagtcccacctggtattcagcatcttccttctcttcttcagtgccaactgtaaagctcttcattggtgggaaattcgttgaatccaaaagtgacaaatggatcgatatccacaacccagccaccaatgaggtcattggtcgggtccctcaggccaccaaggcagaaatggatgcagccattgcttcctgcaaacgtgcttttcctgcatgggcagacacttcagtattaagccgccagcaggtcttgctccgctatcaacaacttattaaagaaaacttgaaagaaattgccaagttaatcacattggaacaagggaagaccctagctgatgctgaaggagatgtatttcgaggccttcaggtggttgagcatgcctgtagtgtgacatccctcatgatgggagagaccatgccatccatcaccaaagacatggacctttattcctaccgtctgcctctgggagtgtgtgcaggcattgctccattcaattttcctgccatgatccccctttggatgtttcccatggccatggtgtgtggaaataccttcctaatgaaaccatctgagcgagtccctggagcaactatgcttcttgctaagttgctccaggattctggtgcccctgatggaacattaaacatcatccatggacagcatgaaggtaactgcccttatgcatatggctacttaatctggctaccaaaaaatcaaggtgttgagtgatggttggatgttttaggataaggaacctacttgtaaggaggaaaggatttactcattttaacctccatgtttgttgatgattttgccatctttgtgcgccaaggtaactgattggggaatagcagtgcttgttgccctacagtatatattgggacactagaaatatggattagggctagacacagataagattaaaaagaaacttttttcttcagtgtgaagagaatacatgagggtatttaattcagagaatttgcagatctcagagatactgaaggccttctaattcatgtaataatagctaatacttaaatagtgcttctgtgtttcaggcaccgttcctagtgctttttatctattaatctttataatcaccctttgaggtaggtattatttttccattttgcagaagagaaaaatgagacatagtgaa

SEQ ID NO: 986 - DNA, 580 bp, Homo sapiens
  source 1..580: mol_type = unassigned DNA
gtgcggagctagggcggccgagagccatggcggcgctattggcggcggcggcagtgcgagcccggatcctgcaggtttcttccaaggtgaaatccagtcccacctggtattcagcatcttccttctcttcttcagtggccaccaatgaggtcattggtcgggtccctcaggccaccaaggcagaaatggatgcagccattgcttcctgcaaacgtgcttttcctgcatgggcagacacttcagtattaagccgccagcaggtcttgctccgctatcaacaacttattaaagaaaacttgaaagaaattgccaagttaatcacattggaacaagggaagaccctagctgatgctgaaggagatgtatttcgaggccttcggctgaagagaacaggacaaagctaactagtacacagtgtggagagctgatggcctgacttctgtgttccagaggtggttgagcatgcctgtagtgtgacatccctcatgatgggagagaccatgccatccatcaccaaagacatggacctttattcctaccgtctgcctctgggagtgtgtgcaggcattgctccattcaa

SEQ ID NO: 987 - DNA, 726 bp, Homo sapiens
  source 1..726: mol_type = unassigned DNA
agtgcttctgggcagtagaggcgcggggtgcggagctagggcggccgagagccatggcggcgctattggcggcggcggcagtgcgagcccggatcctgcaggtttcttccaaggtgaaatccagtcccacctggtattcagcatcttccttctcttcttcagtgccaactgtaaagctcttcattggtgggaaattcgttgaatccaaaagtgacaaatggatcgatatccacaacccagccaccaatgaggtcattggtcgggtccctcaggccaccaaggcagaaatggatgcagccattgcttcctgcaaacgtgcttttcctgcatgggcagacacttcagtattaagccgccagcaggtcttgctccgctatcaacaacttattaaagaaaacttggtatgaaatctaaatggtatgcttttccaaactgtcacctagggcatgtttgtcactctcacagagaccttttcagccaccctcccttactctgcagtatgcagagacgttgatcatgactctctcccttgtactgcatctcctccagtcttattcttcctttgctacctcagaatttaaaagaggaacattcttgcattaatttctatttgtgtgtcttctctctagaaagaaattgccaagttaatcacattggaacaagggaagaccctagctgatgctgaaggagatgtatttcgaggccttcgtaagctgggagcccctt

SEQ ID NO: 988 - DNA, 1519 bp, Homo sapiens
  source 1..1519: mol_type = unassigned DNA
gggagccagggctgcagcctcatctgtttgcggatcagaacccgagctgtgcttgtggctgcggctgctaactggctgcgcacagggagctgtcaccatgcctcactcgtacccagccctttctgctgagcagaagaaggagttgtctgacattgccctgcggattgtagccccgggcaaaggcattctggctgcggatgagtctgtaggcagcatggccaagcggctgagccaaattggggtggaaaacacagaggagaaccgccggctgtaccgccaggtcctgttcagtgctgatgaccgtgtgaaaaagtgcattggaggcgtcattttcttccatgagaccctctaccagaaagatgataatggtgttcccttcgtccgaaccatccaggataagggcatcgtcgtgggcatcaaggttgacaagggtgtggtgcctctagctgggactgatggagaaaccaccactcaagggctggatgggctctcagaacgctgtgcccaatacaagaaggatggtgctgactttgccaagtggcgctgtgtgctgaaaatcagtgagcgtacaccctctgcacttgccattctggagaacgccaacgtgctggcccgttatgccagtatctgccagcaggtcttggctgctgtgtacaaggccctgagtgaccatcatgtatacctggaggggaccctgctcaagcccaacatggtgaccccgggccatgcctgtcccatcaagtataccccagaggagattgccatggcaactgtcactgccctgcgtcgcactgtgcccccagctgtcccaggagtgaccttcctgtctgggggtcagagcgaagaagaggcatcattcaacctcaatgccatcaaccgctgcccccttccccgaccctgggcgcttaccttctcctatgggcgtgccctgcaagcctctgcactcaatgcctggcgagggcaacgggacaatgctggggctgccactgaggagttcatcaagcgggctgaggtgaatgggcttgcagcccagggcaagtatgaaggcagtggagaagatggtggagcagcagcacagtcactctacattgccaaccatgcctactgagtatccactccataccacagcccttggcccagccatctgcacccacttttgcttgtagtcatggccagggccaaatagctatgcagagcagagatgccttcacctggcaccaacttgtcttcctttctctcttcccttcccctctctcattgctgcacctgggaccataggatgggaggatagggagcccctcatgactgagggcagaagaaattgctagaagtcagaacaggatggctgggtctccccctacctcttccagctcccacaattttcccatgatgaggtagcttctccctgggctctccttcttgcctgccctgtctcctgggatcagagggtagtacagaagccctgactcatgccttgagtacataccatacagcaaataaatggtagcaaaacattcta

SEQ ID NO: 989 - DNA, 1722 bp, Homo sapiens
  source 1..1722: mol_type = unassigned DNA
atgcaggccacgcccccggaggagtcacgtagctctgcgacatccgcagcctcatttaccagagggagccagggctgcagcctcatctgtttgcggatcagaacccgagctgtgcttgtggctgcggctgctaactggctgcgcacagaagctgagagaagagggtggcaataagtacttttgcctcattctgaagccttggaaggagctgtcaccatgcctcactcgtacccagccctttctgctgagcagaagaaggagttgtctgacattgccctgcggattgtagccccgggcaaaggcattctggctgcggatgagtctgtaggcagcatggccaagcggctgagccaaattggggtggaaaacacagaggagaaccgccggctgtaccgccaggtcctgttcagtgctgatgaccgtgtgaaaaagtgcattggaggcgtcattttcttccatgagaccctctaccagaaagatgataatggtgttcccttcgtccgaaccatccaggataagggcatcgtcgtgggcatcaaggttgacaagggtgtggtgcctctagctgggactgatggagaaaccaccactcaagggctggatgggctctcagaacgctgtgcccaatacaagaaggatggtgctgactttgccaagtggcgctgtgtgctgaaaatcagtgagcgtacaccctctgcacttgccattctggagaacgccaacgtgctggcccgttatgccagtatctgccagcagaatggcattgtgcctattgtggaacctgaaatattgcctgatggagaccacgacctcaaacgttgtcagtatgttacagagaaggtcttggctgctgtgtacaaggccctgagtgaccatcatgtatacctggaggggaccctgctcaagcccaacatggtgaccccgggccatgcctgtcccatcaagtataccccagaggagattgccatggcaactgtcactgccctgcgtcgcactgtgcccccagctgtcccaggagtgaccttcctgtctgggggtcagagcgaagaagaggcatcattcaacctcaatgccatcaaccgctgcccccttccccgaccctgggcgcttaccttctcctatgggcgtgccctgcaagcctctgcactcaatgcctggcgagggcaacgggacaatgctggggctgccactgaggagttcatcaagcgggctgaggtgaatgggcttgcagcccagggcaagtatgaaggcagtggagaagatggtggagcagcagcacagtcactctacattgccaaccatgcctactgagtatccactccataccacagcccttggcccagccatctgcacccacttttgcttgtagtcatggccagggccaaatagctatgcagagcagagatgccttcacctggcaccaacttgtcttcctttctctcttcccttcccctctctcattgctgcacctgggaccataggatgggaggatagggagcccctcatgactgagggcagaagaaattgctagaagtcagaacaggatggctgggtctccccctacctcttccagctcccacaattttcccatgatgaggtagcttctccctgggctctccttcttgcctgccctgtctcctgggatcagagggtagtacagaagccctgactcatgccttgagtacataccatacagcaaataaatggtagcaaaacattcta

SEQ ID NO: 990 - DNA, 1982 bp, Homo sapiens
  source 1..1982: mol_type = unassigned DNA
attacttcctgccctgaacttgggcaccttgaagatgcttctgccccacctactcaacctgttgttactgttctggtgcctcctcttcaccagactaagcttaatccccagcatccagcaagtgcccggcacgtggtaaagggattgtggcagaaatgaacgcaaggtcatggccaggctccccgaggtgggagggcagtccctaacagccacggatgcctggcggggcgctcactccacctcgccgccccgcctctgagggcgtggtcttgccccggacaccagtcctggggagggggtgtggtcagggcggggcatgcaggccacgcccccggaggagtcacgtagctctgcgacatccgcagcctcatttaccagagggagccagggctgcagcctcatctgtttgcggatcagaacccgagctgtgcttgtggctgcggctgctaactggctgcgcacagggagctgtcaccatgcctcactcgtacccagccctttctgctgagcagaagaaggagttgtctgacattgccctgcggattgtagccccgggcaaaggcattctggctgcggatgagtctgtaggcagcatggccaagcggctgagccaaattggggtggaaaacacagaggagaaccgccggctgtaccgccaggtcctgttcagtgctgatgaccgtgtgaaaaagtgcattggaggcgtcattttcttccatgagaccctctaccagaaagatgataatggtgttcccttcgtccgaaccatccaggataagggcatcgtcgtgggcatcaaggttgacaagggtgtggtgcctctagctgggactgatggagaaaccaccactcaagggctggatgggctctcagaacgctgtgcccaatacaagaaggatggtgctgactttgccaagtggcgctgtgtgctgaaaatcagtgagcgtacaccctctgcacttgccattctggagaacgccaacgtgctggcccgttatgccagtatctgccagcagaatggcattgtgcctattgtggaacctgaaatattgcctgatggagaccacgacctcaaacgttgtcagtatgttacagagaaggtcttggctgctgtgtacaaggccctgagtgaccatcatgtatacctggaggggaccctgctcaagcccaacatggtgaccccgggccatgcctgtcccatcaagtataccccagaggagattgccatggcaactgtcactgccctgcgtcgcactgtgcccccagctgtcccaggagtgaccttcctgtctgggggtcagagcgaagaagaggcatcattcaacctcaatgccatcaaccgctgcccccttccccgaccctgggcgcttaccttctcctatgggcgtgccctgcaagcctctgcactcaatgcctggcgagggcaacgggacaatgctggggctgccactgaggagttcatcaagcgggctgaggtgaatgggcttgcagcccagggcaagtatgaaggcagtggagaagatggtggagcagcagcacagtcactctacattgccaaccatgcctactgagtatccactccataccacagcccttggcccagccatctgcacccacttttgcttgtagtcatggccagggccaaatagctatgcagagcagagatgccttcacctggcaccaacttgtcttcctttctctcttcccttcccctctctcattgctgcacctgggaccataggatgggaggatagggagcccctcatgactgagggcagaagaaattgctagaagtcagaacaggatggctgggtctccccctacctcttccagctcccacaattttcccatgatgaggtagcttctccctgggctctccttcttgcctgccctgtctcctgggatcagagggtagtacagaagccctgactcatgccttgagtacataccatacagcaaataaatggtagcaaaacattcta

SEQ ID NO: 991 - DNA, 922 bp, Homo sapiens
  source 1..922: mol_type = unassigned DNA
ggaaaggccaggacttttgcctacctcaacaagggaccaagttcagtgaaagaagggttggcatccttgattgggcagcagatttatcagaagagctgtggcttcagggctgctcacctccccacccccaccctgcatctttccccagggctgggaaggatgcctaccagggacaaaaggagatgtgggaactggagccctaagcttgctagctgtcagaaggactggtgccacttgatgcccaggactcatgccaaggactgctgccctgttcccagccccttgcttgatggggaggccatttggcccatctggccaggagaggcagcagagggtgaggtctggcttttttatcttgtctccactccagggagctgtcaccatgcctcactcgtacccagccctttctgctgagcagaagaaggagttgtctgacattgccctgcggattgtagccccgggcaaaggcattctggctgcggatgagtctgtaggcagcatggccaagcggctgagccaaattggggtggaaaacacagaggagaaccgccggctgtaccgccaggtcctgttcagtgctgatgaccgtgtgaaaaagtgcattggaggcgtcattttcttccatgagaccctctaccagaaagatgataatggtgttcccttcgtccgaaccatccaggataagggcatcgtcgtgggcatcaaggttgacaagggtgtggtgcctctagctgggactgatggagaaaccaccactcaagggctggatgggctctcagaacgctgtgcccaatacaagaaggatggtgctgactttgccaagtggcgctgtgtgctgaaaatcagtgagcgtacaccctctgcacttgccattctggagaacgccaacgtgctggcccgttatgccagtatctgccagcag

SEQ ID NO: 992 - DNA, 686 bp, Homo sapiens
  source 1..686: mol_type = unassigned DNA
atttaccagagggagccagggctgcagcctcatctgtttgcggatcagaacccgagctgtgcttgtggctgcggctgctaactggctgcgcacagctgagagaagagggtggcaataagtacttttgcctcattctgaagccttggaaggagctgtcaccatgcctcactcgtacccagccctttctgctgagcagaagaaggagttgtctgacattgccctgcggattgtagccccgggcaaaggcattctggctgcggatgagtctgtaggcagcatggccaagcggctgagccaaattggggtggaaaacacagaggagaaccgccggctgtaccgccaggtcctgttcagtgctgatgaccgtgtgaaaaagtgcattggaggcgtcattttcttccatgagaccctctaccagaaagatgataatggtgttcccttcgtccgaaccatccaggataagggcatcgtcgtgggcatcaaggttgacaagggtgtggtgcctctagctgggactgatggagaaaccaccactcaagggctggatgggctctcagaacgctgtgcccaatacaagaaggatggtgctgactttgccaagtggcgctgtgtgctgaaaatcagtgagcgtacaccctctgcacttgccattctggagaacgccaacgtgctggcccgttatgcca

SEQ ID NO: 993 - DNA, 580 bp, Homo sapiens
  source 1..580: mol_type = unassigned DNA
tttaccagagggagccagggctgcagcctcatctgtttgcggatcagaacccgagctgtgcttgtggctgcggctgctaactggctgcgcacagaagaaggagttgtctgacattgccctgcggattgtagccccgggcaaaggcattctggctgcggatgagtctgtaggcagcatggccaagcggctgagccaaattggggtggaaaacacagaggagaaccgccggctgtaccgccaggtcctgttcagtgctgatgaccgtgtgaaaaagtgcattggaggcgtcattttcttccatgagaccctctaccagaaagatgataatggtgttcccttcgtccgaaccatccaggataagggcatcgtcgtgggcatcaaggttgacaagggtgtggtgcctctagctgggactgatggagaaaccaccactcaagggctggatgggctctcagaacgctgtgcccaatacaagaaggatggtgctgactttgccaagtggcgctgtgtgctgaaaatcagtgagcgtacaccctctgcacttgccattctggagaacgccaacgtgctggcccgttat

SEQ ID NO: 994 - DNA, 579 bp, Homo sapiens
  source 1..579: mol_type = unassigned DNA
agtctcatctctctctcaggctctctactcctttcagccttggtcctctgccctcccgtctgggtgtctgagttgtggggaattgaagtgcttcctattgctatcctcctgccaaacagggagctgtcaccatgcctcactcgtacccagccctttctgctgagcagaagaaggagttgtctgacattgccctgcggattgtagccccgggcaaaggcattctggctgcggatgagtctgtaggcagcatggccaagcggctgagccaaattggggtggaaaacacagaggagaaccgccggctgtaccgccaggtcctgttcagtgctgatgaccgtgtgaaaaagtgcattggaggcgtcattttcttccatgagaccctctaccagaaagatgataatggtgttcccttcgtccgaaccatccaggataagggcatcgtcgtgggcatcaaggttgacaagggtgtggtgcctctagctgggactgatggagaaaccaccactcaagggctggatgggctctcagaacgctgtgcccaatacaagaaggatggtgctgactttgccaagtggcgct

SEQ ID NO: 995 - DNA, 839 bp, Homo sapiens
  source 1..839: mol_type = unassigned DNA
agcctgcatcaccactagctcccctcagtctcatctctctctcaggctctctactcctttcagccttggtcctctgccctcccgtctgggtgtctgagttgtggggaattgaagtgcttcctattgctatcctcctgccaaacaggtgaagtgcttcctgggcacagagatgacccggaggtgtcactagccctagtctccacacactaacacagctgacccgctgggccctctttcctacatcactgcagccccactggggccaacctctggtactgggtgggaataggcaataggcataggcaggcaggtttggagtacagaaaaggagaagctgcaggagcctgtgactggtatttgtgccactcctactccctacctgttcttccaaccttttcctctagaagctgagagaagagggtggcaataagtacttttgcctcattctgaagccttggaaggagctgtcaccatgcctcactcgtacccagccctttctgctgagcagaagaaggagttgtctgacattgccctgcggattgtagccccgggcaaaggcattctggctgcggatgagtctgtaggcagcatggccaagcggctgagccaaattggggtggaaaacacagaggagaaccgccggctgtaccgccaggtcctgttcagtgctgatgaccgtgtgaaaaagtgcattggaggcgtcattttcttccatgagaccctctaccagaaagatgataatggtgttcccttcgtccgaaccatccaggataagggcatcgtcgtgggcatcaaggttgacaagggtgtggtgcctctagctgggactgatggagaaa

SEQ ID NO: 996 - DNA, 571 bp, Homo sapiens
  source 1..571: mol_type = unassigned DNA
accagagggagccagggctgcagcctcatctgtttgcggatcagaacccgagctgtgcttgtggctgcggctgctaactggctgcgcacagggagctgtcaccatgcctcactcgtacccagccctttctgctgagcagaagaaggagttgtctgacattgccctgcggattgtagccccgggcaaaggcattctggctgcggatgagtctgtaggcagcatggccaagcggctgagccaaattggggtggaaaacacagaggagaaccgccggctgtaccgccaggtcctgttcagtgctgatgaccgtgtgaaaaagtgcattggaggcgtcattttcttccatgagaccctctaccagaaagatgataatggtgttcccttcgtccgaaccatccaggataagggcatcgtcgtgggcatcaaggtgcagcccctggccctgctctgaatggaagctgggtgtgaaaataagcttgtgtaggaggggtagcaaggagaatcctgcctggattcaaccctctgcttgtacttcctctacaggttgacaagggtgtggtgcctctagctg

SEQ ID NO: 997 - DNA, 2513 bp, Homo sapiens
  source 1..2513: mol_type = unassigned DNA
cagccttccctggctccctccccatttcctctcatgggcatttcttctaataaaatctgcagaccatattgggtctaatcccatctccagtctgcttcttggaggaaccagactaacatgactctgccctatataatacaaataattattttccatatatctgatttttagctttgcatttactttaaatcatgcttcaattaaagacacaccttctttaatcattttattagtatttctaagtatgatggaaaggttcagagctcaggggaggatatggagatccagggaggcttcctgtaggaagtggcctgtgtagtgcttcaagggccaggctgccaggccatgttgcagctgaccacccacctgcagtgtaccgccggaagcaccaggagctgcaagccatgcagatggagctgcagagccctgagtacaagctgagcaagctccgcacctcgaccatcatgaccgactacaaccccaactactgctttgctggcaagacctcctccatcagtgacctgaaggaggtgccgcggaaaaacatcaccctcattcggggtctgggccatggcgcctttggggaggtgtatgaaggccaggtgtccggaatgcccaacgacccaagccccctgcaagtggctgtgaagacgctgcctgaagtgtgctctgaacaggacgaactggatttcctcatggaagccctgatcatcagcaaattcaaccaccagaacattgttcgctgcattggggtgagcctgcaatccctgccccggttcatcctgctggagctcatggcggggggagacctcaagtccttcctccgagagacccgccctcgcccgagccagccctcctccctggccatgctggaccttctgcacgtggctcgggacattgcctgtggctgtcagtatttggaggaaaaccacttcatccaccgagacattgctgccagaaactgcctcttgacctgtccaggccctggaagagtggccaagattggagacttcgggatggcccgagacatctacagggcgagctactatagaaagggaggctgtgccatgctgccagttaagtggatgcccccagaggccttcatggaaggaatattcacttctaaaacagacacatggtcctttggagtgctgctatgggaaatcttttctcttggatatatgccataccccagcaaaagcaaccaggaagttctggagtttgtcaccagtggaggccggatggacccacccaagaactgccctgggcctgtataccggataatgactcagtgctggcaacatcagcctgaagacaggcccaactttgccatcattttggagaggattgaatactgcacccaggacccggatgtaatcaacaccgctttgccgatagaatatggtccacttgtggaagaggaagagaaagtgcctgtgaggcccaaggaccctgagggggttcctcctctcctggtctctcaacaggcaaaacgggaggaggagcgcagcccagctgccccaccacctctgcctaccacctcctctggcaaggctgcaaagaaacccacagctgcagagatctctgttcgagtccctagagggccggccgtggaagggggacacgtgaatatggcattctctcagtccaaccctccttcggagttgcacaaggtccacggatccagaaacaagcccaccagcttgtggaacccaacgtacggctcctggtttacagagaaacccaccaaaaagaataatcctatagcaaagaaggagccacacgacaggggtaacctggggctggagggaagctgtactgtcccacctaacgttgcaactgggagacttccgggggcctcactgctcctagagccctcttcgctgactgccaatatgaaggaggtacctctgttcaggctacgtcacttcccttgtgggaatgtcaattacggctaccagcaacagggcttgcccttagaagccgctactgcccctggagctggtcattacgaggataccattctgaaaagcaagaatagcatgaaccagcctgggccctgagctcggtcgcacactcacttctcttccttgggatccctaagaccgtggaggagagagaggcaatggctccttcacaaaccagagaccaaatgtcacgttttgttttgtgccaacctattttgaagtaccaccaaaaaagctgtattttgaaaatgctttagaaaggttttgagcatgggttcatcctattctttcgaaagaagaaaatatcataaaaatgagtgataaatacaaggcccagatgtggttgcataaggtttttatgcatgtttgttgtatacttccttatgcttctttcaaattgtgtgtgctctgcttcaatgtagtcagaattagctgcttctatgtttcatagttggggtcatagatgtttccttgccttgttgatgtggacatgagccatttgaggggagagggaacggaaataaaggagttatttgtaatgactaa

SEQ ID NO: 998 - DNA, 6220 bp, Homo sapiens
  source 1..6220: mol_type = unassigned DNA
gggggcggcagcggtggtagcagctggtacctcccgccgcctctgttcggagggtcgcggggcaccgaggtgctttccggccgccctctggtcggccacccaaagccgcgggcgctgatgatgggtgaggagggggcggcaagatttcgggcgcccctgccctgaacgccctcagctgctgccgccggggccgctccagtgcctgcgaactctgaggagccgaggcgccggtgagagcaaggacgctgcaaacttgcgcagcgcgggggctgggattcacgcccagaagttcagcaggcagacagtccgaagccttcccgcagcggagagatagcttgagggtgcgcaagacggcagcctccgccctcggttcccgcccagaccgggcagaagagcttggaggagccaaaaggaacgcaaaaggcggccaggacagcgtgcagcagctgggagccgccgttctcagccttaaaagttgcagagattggaggctgccccgagaggggacagaccccagctccgactgcggggggcaggagaggacggtacccaactgccacctcccttcaaccatagtagttcctctgtaccgagcgcagcgagctacagacgggggcgcggcactcggcgcggagagcgggaggctcaaggtcccagccagtgagcccagtgtgcttgagtgtctctggactcgcccctgagcttccaggtctgtttcatttagactcctgctcgcctccgtgcagttgggggaaagcaagagacttgcgcgcacgcacagtcctctggagatcaggtggaaggagccgctgggtaccaaggactgttcagagcctcttcccatctcggggagagcgaagggtgaggctgggcccggagagcagtgtaaacggcctcctccggcgggatgggagccatcgggctcctgtggctcctgccgctgctgctttccacggcagctgtgggctccgggatggggaccggccagcgcgcgggctccccagctgcggggccgccgctgcagccccgggagccactcagctactcgcgcctgcagaggaagagtctggcagttgacttcgtggtgccctcgctcttccgtgtctacgcccgggacctactgctgccaccatcctcctcggagctgaaggctggcaggcccgaggcccgcggctcgctagctctggactgcgccccgctgctcaggttgctggggccggcgccgggggtctcctggaccgccggttcaccagccccggcagaggcccggacgctgtccagggtgctgaagggcggctccgtgcgcaagctccggcgtgccaagcagttggtgctggagctgggcgaggaggcgatcttggagggttgcgtcgggccccccggggaggcggctgtggggctgctccagttcaatctcagcgagctgttcagttggtggattcgccaaggcgaagggcgactgaggatccgcctgatgcccgagaagaaggcgtcggaagtgggcagagagggaaggctgtccgcggcaattcgcgcctcccagccccgccttctcttccagatcttcgggactggtcatagctccttggaatcaccaacaaacatgccttctccttctcctgattattttacatggaatctcacctggataatgaaagactccttccctttcctgtctcatcgcagccgatatggtctggagtgcagctttgacttcccctgtgagctggagtattcccctccactgcatgacctcaggaaccagagctggtcctggcgccgcatcccctccgaggaggcctcccagatggacttgctggatgggcctggggcagagcgttctaaggagatgcccagaggctcctttctccttctcaacacctcagctgactccaagcacaccatcctgagtccgtggatgaggagcagcagtgagcactgcacactggccgtctcggtgcacaggcacctgcagccctctggaaggtacattgcccagctgctgccccacaacgaggctgcaagagagatcctcctgatgcccactccagggaagcatggttggacagtgctccagggaagaatcgggcgtccagacaacccatttcgagtggccctggaatacatctccagtggaaaccgcagcttgtctgcagtggacttctttgccctgaagaactgcagtgaaggaacatccccaggctccaagatggccctgcagagctccttcacttgttggaatgggacagtcctccagcttgggcaggcctgtgacttccaccaggactgtgcccagggagaagatgagagccagatgtgccggaaactgcctgtgggtttttactgcaactttgaagatggcttctgtggctggacccaaggcacactgtcaccccacactcctcaatggcaggtcaggaccctaaaggatgcccggttccaggaccaccaagaccatgctctattgctcagtaccactgatgtccccgcttctgaaagtgctacagtgaccagtgctacgtttcctgcaccgatcaagagctctccatgtgagctccgaatgtcctggctcattcgtggagtcttgaggggaaacgtgtccttggtgctagtggagaacaaaaccgggaaggagcaaggcaggatggtctggcatgtcgccgcctatgaaggcttgagcctgtggcagtggatggtgttgcctctcctcgatgtgtctgacaggttctggctgcagatggtcgcatggtggggacaaggatccagagccatcgtggcttttgacaatatctccatcagcctggactgctacctcaccattagcggagaggacaagatcctgcagaatacagcacccaaatcaagaaacctgtttgagagaaacccaaacaaggagctgaaacccggggaaaattcaccaagacagacccccatctttgaccctacagttcattggctgttcaccacatgtggggccagcgggccccatggccccacccaggcacagtgcaacaacgcctaccagaactccaacctgagcgtggaggtggggagcgagggccccctgaaaggcatccagatctggaaggtgccagccaccgacacctacagcatctcgggctacggagctgctggcgggaaaggcgggaagaacaccatgatgcggtcccacggcgtgtctgtgctgggcatcttcaacctggagaaggatgacatgctgtacatcctggttgggcagcagggagaggacgcctgccccagtacaaaccagttaatccagaaagtctgcattggagagaacaatgtgatagaagaagaaatccgtgtgaacagaagcgtgcatgagtgggcaggaggcggaggaggagggggtggagccacctacgtatttaagatgaaggatggagtgccggtgcccctgatcattgcagccggaggtggtggcagggcctacggggccaagacagacacgttccacccagagagactggagaataactcctcggttctagggctaaacggcaattccggagccgcaggtggtggaggtggctggaatgataacacttccttgctctgggccggaaaatctttgcaggagggtgccaccggaggacattcctgcccccaggccatgaagaagtgggggtgggagacaagagggggtttcggagggggtggaggggggtgctcctcaggtggaggaggcggaggatatataggcggcaatgcagcctcaaacaatgaccccgaaatggatggggaagatggggtttccttcatcagtccactgggcatcctgtacaccccagctttaaaagtgatggaaggccacggggaagtgaatattaagcattatctaaactgcagtcactgtgaggtagacgaatgtcacatggaccctgaaagccacaaggtcatctgcttctgtgaccacgggacggtgctggctgaggatggcgtctcctgcattgtgtcacccaccccggagccacacctgccactctcgctgatcctctctgtggtgacctctgccctcgtggccgccctggtcctggctttctccggcatcatgattgtgtaccgccggaagcaccaggagctgcaagccatgcagatggagctgcagagccctgagtacaagctgagcaagctccgcacctcgaccatcatgaccgactacaaccccaactactgctttgctggcaagacctcctccatcagtgacctgaaggaggtgccgcggaaaaacatcaccctcattcggggtctgggccatggcgcctttggggaggtgtatgaaggccaggtgtccggaatgcccaacgacccaagccccctgcaagtggctgtgaagacgctgcctgaagtgtgctctgaacaggacgaactggatttcctcatggaagccctgatcatcagcaaattcaaccaccagaacattgttcgctgcattggggtgagcctgcaatccctgccccggttcatcctgctggagctcatggcggggggagacctcaagtccttcctccgagagacccgccctcgcccgagccagccctcctccctggccatgctggaccttctgcacgtggctcgggacattgcctgtggctgtcagtatttggaggaaaaccacttcatccaccgagacattgctgccagaaactgcctcttgacctgtccaggccctggaagagtggccaagattggagacttcgggatggcccgagacatctacagggcgagctactatagaaagggaggctgtgccatgctgccagttaagtggatgcccccagaggccttcatggaaggaatattcacttctaaaacagacacatggtcctttggagtgctgctatgggaaatcttttctcttggatatatgccataccccagcaaaagcaaccaggaagttctggagtttgtcaccagtggaggccggatggacccacccaagaactgccctgggcctgtataccggataatgactcagtgctggcaacatcagcctgaagacaggcccaactttgccatcattttggagaggattgaatactgcacccaggacccggatgtaatcaacaccgctttgccgatagaatatggtccacttgtggaagaggaagagaaagtgcctgtgaggcccaaggaccctgagggggttcctcctctcctggtctctcaacaggcaaaacgggaggaggagcgcagcccagctgccccaccacctctgcctaccacctcctctggcaaggctgcaaagaaacccacagctgcagagatctctgttcgagtccctagagggccggccgtggaagggggacacgtgaatatggcattctctcagtccaaccctccttcggagttgcacaaggtccacggatccagaaacaagcccaccagcttgtggaacccaacgtacggctcctggtttacagagaaacccaccaaaaagaataatcctatagcaaagaaggagccacacgacaggggtaacctggggctggagggaagctgtactgtcccacctaacgttgcaactgggagacttccgggggcctcactgctcctagagccctcttcgctgactgccaatatgaaggaggtacctctgttcaggctacgtcacttcccttgtgggaatgtcaattacggctaccagcaacagggcttgcccttagaagccgctactgcccctggagctggtcattacgaggataccattctgaaaagcaagaatagcatgaaccagcctgggccctgagctcggtcgcacactcacttctcttccttgggatccctaagaccgtggaggagagagaggcaatggctccttcacaaaccagagaccaaatgtcacgttttgttttgtgccaacctattttgaagtaccaccaaaaaagctgtattttgaaaatgctttagaaaggttttgagcatgggttcatcctattctttcgaaagaagaaaatatcataaaaatgagtgataaatacaaggcccagatgtggttgcataaggtttttatgcatgtttgttgtatacttccttatgcttctttcaaattgtgtgtgctctgcttcaatgtagtcagaattagctgcttctatgtttcatagttggggtcatagatgtttccttgccttgttgatgtggacatgagccatttgaggggagagggaacggaaataaaggagttatttgtaatgactaa

SEQ ID NO: 999 - DNA, 2520 bp, Homo sapiens
  source 1..2520: mol_type = unassigned DNA
caatgaccccgaaatggatggggaagatggggtttccttcatcagtccactgggcatcctgtacaccccagctttaaaagtgatggaaggccacggggaagtgaatattaagcattatctaaactgcagtcactgtgaggtagacgaatgtcacatggaccctgaaagccacaaggtcatctgcttctgtgaccacgggacggtgctggctgaggatggcgtctcctgcattgtgtcacccaccccggagccacacctgccactctcgctgatcctctctgtggtgacctctgccctcgtggccgccctggtcctggctttctccggcatcatgattggtaaccctaatctgatcacggtcggtccattgcatagaggagggaactgagcacatagcggtgtaccgccggaagcaccaggagctgcaagccatgcagatggagctgcagagccctgagtacaagctgagcaagctccgcacctcgaccatcatgaccgactacaaccccaactactgctttgctggcaagacctcctccatcagtgacctgaaggaggtgccgcggaaaaacatcaccctcattcggggtctgggccatggcgcctttggggaggtgtatgaaggccaggtgtccggaatgcccaacgacccaagccccctgcaagtggctgtgaagacgctgcctgaagtgtgctctgaacaggacgaactggatttcctcatggaagccctgatcatcagcaaattcaaccaccagaacattgttcgctgcattggggtgagcctgcaatccctgccccggttcatcctgctggagctcatggcggggggagacctcaagtccttcctccgagagacccgccctcgcccgagccagccctcctccctggccatgctggaccttctgcacgtggctcgggacattgcctgtggctgtcagtatttggaggaaaaccacttcatccaccgagacattgctgccagaaactgcctcttgacctgtccaggccctggaagagtggccaagattggagacttcgggatggcccgagacatctacagggcgagctactatagaaagggaggctgtgccatgctgccagttaagtggatgcccccagaggccttcatggaaggaatattcacttctaaaacagacacatggtcctttggagtgctgctatgggaaatcttttctcttggatatatgccataccccagcaaaagcaaccaggaagttctggagtttgtcaccagtggaggccggatggacccacccaagaactgccctgggcctgtataccggataatgactcagtgctggcaacatcagcctgaagacaggcccaactttgccatcattttggagaggattgaatactgcacccaggacccggatgtaatcaacaccgctttgccgatagaatatggtccacttgtggaagaggaagagaaagtgcctgtgaggcccaaggaccctgagggggttcctcctctcctggtctctcaacaggcaaaacgggaggaggagcgcagcccagctgccccaccacctctgcctaccacctcctctggcaaggctgcaaagaaacccacagctgcagagatctctgttcgagtccctagagggccggccgtggaagggggacacgtgaatatggcattctctcagtccaaccctccttcggagttgcacaaggtccacggatccagaaacaagcccaccagcttgtggaacccaacgtacggctcctggtttacagagaaacccaccaaaaagaataatcctatagcaaagaaggagccacacgacaggggtaacctggggctggagggaagctgtactgtcccacctaacgttgcaactgggagacttccgggggcctcactgctcctagagccctcttcgctgactgccaatatgaaggaggtacctctgttcaggctacgtcacttcccttgtgggaatgtcaattacggctaccagcaacagggcttgcccttagaagccgctactgcccctggagctggtcattacgaggataccattctgaaaagcaagaatagcatgaaccagcctgggccctgagctcggtcgcacactcacttctcttccttgggatccctaagaccgtggaggagagagaggcaatggctccttcacaaaccagagaccaaatgtcacgttttgttttgtgccaacctattttgaagtaccaccaaaaaagctgtattttgaaaatgctttagaaaggttttgagcatgggttcatcctattctttcgaaagaagaaaatatcataaaaatgagtgataaatacaaggcccagatgtggttgcataaggtttttatgcatgtttgttgtatacttccttatgcttctttcaaattgtgtgtgctctgcttcaatgtagtcagaattagctgcttctatgtttcatagttggggtcatagatgtttccttgccttgttgatgtggacatgagccatttgaggggagagggaacggaaataaag

SEQ ID NO: 1000 - DNA, 1757 bp, Homo sapiens
  source 1..1757: mol_type = unassigned DNA
gttactacgtgctcggcaatttacacatttcaattcattcgatcctcagtgtaccgccggaagcaccaggagctgcaagccatgcagatggagctgcagagccctgagtacaagctgagcaagctccgcacctcgaccatcatgaccgactacaaccccaactactgctttgctggcaagacctcctccatcagtgacctgaaggaggtgccgcggaaaaacatcaccctcattcggggtctgggccatggcgcctttggggaggtgtatgaaggccaggtgtccggaatgcccaacgacccaagccccctgcaagtggctgtgaagacgctgcctgaagtgtgctctgaacaggacgaactggatttcctcatggaagccctgatcatcagcaaattcaaccaccagaacattgttcgctgcattggggtgagcctgcaatccctgccccggttcatcctgctggagctcatggcggggggagacctcaagtccttcctccgagagacccgccctcgcccgagccagccctcctccctggccatgctggaccttctgcacgtggctcgggacattgcctgtggctgtcagtatttggaggaaaaccacttcatccaccgagacattgctgccagaaactgcctcttgacctgtccaggccctggaagagtggccaagattggagacttcgggatggcccgagacatctacagggcgagctactatagaaagggaggctgtgccatgctgccagttaagtggatgcccccagaggccttcatggaaggaatattcacttctaaaacagacacatggtcctttggagtgctgctatgggaaatcttttctcttggatatatgccataccccagcaaaagcaaccaggaagttctggagtttgtcaccagtggaggccggatggacccacccaagaactgccctgggcctgtataccggataatgactcagtgctggcaacatcagcctgaagacaggcccaactttgccatcattttggagaggattgaatactgcacccaggacccggatgtaatcaacaccgctttgccgatagaatatggtccacttgtggaagaggaagagaaagtgcctgtgaggcccaaggaccctgagggggttcctcctctcctggtctctcaacaggcaaaacgggaggaggagcgcagcccagctgccccaccacctctgcctaccacctcctctggcaaggctgcaaagaaacccacagctgcagagatctctgttcgagtccctagagggccggccgtggaagggggacacgtgaatatggcattctctcagtccaaccctccttcggagttgcacaaggtccacggatccagaaacaagcccaccagcttgtggaacccaacgtacggctcctggtttacagagaaacccaccaaaaagaataatcctatagcaaagaaggagccacacgacaggggtaacctggggctggagggaagctgtactgtcccacctaacgttgcaactgggagacttccgggggcctcactgctcctagagccctcttcgctgactgccaatatgaaggaggtacctctgttcaggctacgtcacttcccttgtgggaatgtcaattacggctaccagcaacagggcttgcccttagaagccgctactgcccctggagctggtcattacgaggataccattctgaaaagcaagaatagcatgaaccagcctgggccctgagctcggtcgcacactca

SEQ ID NO: 1001 - DNA, 577 bp, Homo sapiens
  source 1..577: mol_type = unassigned DNA
tcctccatcagtgacctgaaggaggtgccgcggaaaaacatcaccctcattcggggtctgggccatggcgcctttggggaggtgtatgaaggccaggtgtccggaatgcccaacgacccaagccccctgcaagtggctgtgaagacgctgcctgaagtgtgctctgaacaggacgaactggatttcctcatggaagccctgatcatcagtctctcttggaagcagttgttttgcttcaccttctgcctgaggccttcctgggagaaatcgaccatgaattctagcacccagtccacgcaccagtatctgagaaagacactctcctgccccctgagacacttcctcacccaagtgcctgagcaacatcctcacagctccagccactctcctgcaaatggaactcctgtggagcctgctgtggttcttcccacctgctcaccagcaagattctgggtttaggctcagcccgggacccctgctgcccatgtttacagaatgcctttatacattgtagctgctgaaaatgtaactttgtatcctgttcctcccagtttaagatttgcccagactcagctca

SEQ ID NO: 1002 - DNA, 560 bp, Homo sapiens
  source 1..560: mol_type = unassigned DNA
accctgaaagtttgcagatgcttcttcccaccaccacgtgtggatgggagcccctgttctcccagattttcaggcagagccatgcttagaaaatataagaaaccatgctctattgctcagtaccactgatgtccccgcttctgaaagtgctacagtgaccagtgctacgtttcctgcaccgatcaagagctctccatgtgagctccgaatgtcctggctcattcgtggagtcttgaggggaaacgtgtccttggtgctagtggagaacaaaaccgggaaggagcaaggcaggatggtctggcatgtcgccgcctatgaaggcttgagcctgtggcagtggatggtgttgcctctcctcgatgtgtctgacagctatgctgagcattgatcacgcttcttctccacaaagcctcataactcaaggctgaaatcaattccaggttctattctaagagccccagatctcatacacaaagattctgattcacagatgacatattgggaccaggaatctgtattttttaaagttccccagttgactttcatgcgtaaccacattt

SEQ ID NO: 1003 - DNA, 4646 bp, Homo sapiens
  source 1..4646: mol_type = unassigned DNA
caggtcatagctccttggaatcaccaacaaacatgccttctccttctcctgattattttacatggaatctcacctggataatgaaagactccttccctttcctgtctcatcgcagccgatatggtctggagtgcagctttgacttcccctgtgagctggagtattcccctccactgcatgacctcaggaaccagagctggtcctggcgccgcatcccctccgaggaggcctcccagatggacttgctggatgggcctggggcagagcgttctaaggagatgcccagaggctcctttctccttctcaacacctcagctgactccaagcacaccatcctgagtccgtggatgaggagcagcagtgagcactgcacactggccgtctcggtgcacaggcacctgcagccctctggaaggtacattgcccagctgctgccccacaacgaggctgcaagagagatcctcctgatgcccactccagggaagcatggttggacagtgctccagggaagaatcgggcgtccagacaacccatttcgagtggccctggaatacatctccagtggaaaccgcagcttgtctgcagtggacttctttgccctgaagaactgcagtgaaggaacatccccaggctccaagatggccctgcagagctccttcacttgttggaatgggacagtcctccagcttgggcaggcctgtgacttccaccaggactgtgcccagggagaagatgagagccagatgtgccggaaactgcctgtgggtttttactgcaactttgaagatggcttctgtggctggacccaaggcacactgtcaccccacactcctcaatggcaggtcaggaccctaaaggatgcccggttccaggaccaccaagaccatgctctattgctcagtaccactgatgtccccgcttctgaaagtgctacagtgaccagtgctacgtttcctgcaccgatcaagagctctccatgtgagctccgaatgtcctggctcattcgtggagtcttgaggggaaacgtgtccttggtgctagtggagaacaaaaccgggaaggagcaaggcaggatggtctggcatgtcgccgcctatgaaggcttgagcctgtggcagtggatggtgttgcctctcctcgatgtgtctgacaggttctggctgcagatggtcgcatggtggggacaaggatccagagccatcgtggcttttgacaatatctccatcagcctggactgctacctcaccattagcggagaggacaagatcctgcagaatacagcacccaaatcaagaaacctgtttgagagaaacccaaacaaggagctgaaacccggggaaaattcaccaagacagacccccatctttgaccctacagttcattggctgttcaccacatgtggggccagcgggccccatggccccacccaggcacagtgcaacaacgcctaccagaactccaacctgagcgtggaggtggggagcgagggccccctgaaaggcatccagatctggaaggtgccagccaccgacacctacagcatctcgggctacggagctgctggcgggaaaggcgggaagaacaccatgatgcggtcccacggcgtgtctgtgctgggcatcttcaacctggagaaggatgacatgctgtacatcctggttgggcagcagggagaggacgcctgccccagtacaaaccagttaatccagaaagtctgcattggagagaacaatgtgatagaagaagaaatccgtgtgaacagaagcgtgcatgagtgggcaggaggcggaggaggagggggtggagccacctacgtatttaagatgaaggatggagtgccggtgcccctgatcattgcagccggaggtggtggcagggcctacggggccaagacagacacgttccacccagagagactggagaataactcctcggttctagggctaaacggcaattccggagccgcaggtggtggaggtggctggaatgataacacttccttgctctgggccggaaaatctttgcaggagggtgccaccggaggacattcctgcccccaggccatgaagaagtgggggtgggagacaagagggggtttcggagggggtggaggggggtgctcctcaggtggaggaggcggaggatatataggcggcaatgcagcctcaaacaatgaccccgaaatggatggggaagatggggtttccttcatcagtccactgggcatcctgtacaccccagctttaaaagtgatggaaggccacggggaagtgaatattaagcattatctaaactgcagtcactgtgaggtagacgaatgtcacatggaccctgaaagccacaaggtcatctgcttctgtgaccacgggacggtgctggctgaggatggcgtctcctgcattgtgtcacccaccccggagccacacctgccactctcgctgatcctctctgtggtgacctctgccctcgtggccgccctggtcctggctttctccggcatcatgattgtgtaccgccggaagcaccaggagctgcaagccatgcagatggagctgcagagccctgagtacaagctgagcaagctccgcacctcgaccatcatgaccgactacaaccccaactactgctttgctggcaagacctcctccatcagtgacctgaaggaggtgccgcggaaaaacatcaccctcattcggggtctgggccatggcgcctttggggaggtgtatgaaggccaggtgtccggaatgcccaacgacccaagccccctgcaagtggctgtgaagacgctgcctgaagtgtgctctgaacaggacgaactggatttcctcatggaagccctgatcatcagcaaattcaaccaccagaacattgttcgctgcattggggtgagcctgcaatccctgccccggttcatcctgctggagctcatggcggggggagacctcaagtccttcctccgagagacccgccctcgcccgagccagccctcctccctggccatgctggaccttctgcacgtggctcgggacattgcctgtggctgtcagtatttggaggaaaaccacttcatccaccgagacattgctgccagaaactgcctcttgacctgtccaggccctggaagagtggccaagattggagacttcgggatggcccgagacatctacagggcgagctactatagaaagggaggctgtgccatgctgccagttaagtggatgcccccagaggccttcatggaaggaatattcacttctaaaacagacacatggtcctttggagtgctgctatgggaaatcttttctcttggatatatgccataccccagcaaaagcaaccaggaagttctggagtttgtcaccagtggaggccggatggacccacccaagaactgccctgggcctgtataccggataatgactcagtgctggcaacatcagcctgaagacaggcccaactttgccatcattttggagaggattgaatactgcacccaggacccggatgtaatcaacaccgctttgccgatagaatatggtccacttgtggaagaggaagagaaagtgcctgtgaggcccaaggaccctgagggggttcctcctctcctggtctctcaacaggcaaaacgggaggaggagcgcagcccagctgccccaccacctctgcctaccacctcctctggcaaggctgcaaagaaacccacagctgcagagatctctgttcgagtccctagagggccggccgtggaagggggacacgtgaatatggcattctctcagtccaaccctccttcggagttgcacaaggtccacggatccagaaacaagcccaccagcttgtggaacccaacgtacggctcctggtttacagagaaacccaccaaaaagaataatcctatagcaaagaaggagccacacgacaggggtaacctggggctggagggaagctgtactgtcccacctaacgttgcaactgggagacttccgggggcctcactgctcctagagccctcttcgctgactgccaatatgaaggaggtacctctgttcaggctacgtcacttcccttgtgggaatgtcaattacggctaccagcaacagggcttgcccttagaagccgctactgcccctggagctggtcattacgaggataccattctgaaaagcaagaatagcatgaaccagcctgggccctgagctcggtcgcacactcacttctcttccttgggatccctaagaccgtggaggagagagaggcaatggctccttcacaaaccagagaccaaatgtcacgttttgttttgtgccaacctattttgaagtaccaccaaaaaagctgtattttgaaaatgctttagaaaggttttgagcatgggttcatcctattctttcgaaagaagaaaatatcataaaaatgagtgataaatacaaggcccagatgtggttgcataaggtttttatgcatgtttgttgtatacttccttatgcttctttcaaattgtgtgtgctctgcttcaatgtagtcagaattagctgcttctatgtttcatagttggggtcatagatgtttccttgccttgttgatgtggacatgagccatttgaggggagagggaacggaaataaaggagttatttgtaatgac

SEQ ID NO: 1004 - DNA, 2504 bp, Homo sapiens
  source 1..2504: mol_type = unassigned DNA
cctggaccgccgcgccgaggctcccggcgctcgctgctcccgcggcccgcgccatgccctcctacacggtcaccgtggccactggcagccagtggttcgccggcactgacgactacatctacctcagcctcgtgggctcggcgggctgcagcgagaagcacctgctggacaagcccttctacaacgacttcgagcgtggcgcggtggattcatacgacgtgactgtggacgaggaactgggcgagatccagctggtcagaatcgagaagcgcaagtactggctgaatgacgactggtacctgaagtacatcacgctgaagacgccccacggggactacatcgagttcccctgctaccgctggatcaccggcgatgtcgaggttgtcctgagggatggacgcgcaaagttggcccgagatgaccaaattcacattctcaagcaacaccgacgtaaagaactggaaacacggcaaaaacaatatcgatggatggagtggaaccctggcttccccttgagcatcgatgccaaatgccacaaggatttaccccgtgatatccagtttgatagtgaaaaaggagtggactttgttctgaattactccaaagcgatggagaacctgttcatcaaccgcttcatgcacatgttccagtcttcttggaatgacttcgccgactttgagaaaatctttgtcaagatcagcaacactatttctgagcgggtcatgaatcactggcaggaagacctgatgtttggctaccagttcctgaatggctgcaaccctgtgttgatccggcgctgcacagagctgcccgagaagctcccggtgaccacggagatggtagagtgcagcctggagcggcagctcagcttggagcaggaggtccagcaagggaacattttcatcgtggactttgagctgctggatggcatcgatgccaacaaaacagacccctgcacactccagttcctggccgctcccatctgcttgctgtataagaacctggccaacaagattgtccccattgccatccagctcaaccaaatcccgggagatgagaaccctattttcctcccttcggatgcaaaatacgactggcttttggccaaaatctgggtgcgttccagtgacttccacgtccaccagaccatcacccaccttctgcgaacacatctggtgtctgaggtttttggcattgcaatgtaccgccagctgcctgctgtgcaccccattttcaagctgctggtggcacacgtgagattcaccattgcaatcaacaccaaggcccgtgagcagctcatctgcgagtgtggcctctttgacaaggccaacgccacagggggcggtgggcacgtgcagatggtgcagagggccatgaaggacctgacctatgcctccctgtgctttcccgaggccatcaaggcccggggcatggagagcaaagaagacatcccctactacttctaccgggacgacgggctcctggtgtgggaagccatcaggacgttcacggccgaggtggtagacatctactacgagggcgaccaggtggtggaggaggacccggagctgcaggacttcgtgaacgatgtctacgtgtacggcatgcggggccgcaagtcctcaggcttccccaagtcggtcaagagccgggagcagctgtcggagtacctgaccgtggtgatcttcaccgcctccgcccagcacgccgcggtcaacttcggccagtacgactggtgctcctggatccccaatgcgcccccaaccatgcgagccccgccaccgactgccaagggcgtggtgaccattgagcagatcgtggacacgctgcccgaccgcggccgctcctgctggcatctgggtgcagtgtgggcgctgagccagttccaggaaaacgagctgttcctgggcatgtacccagaagagcattttatcgagaagcctgtgaaggaagccatggcccgattccgcaagaacctcgaggccattgtcagcgtgattgctgagcgcaacaagaagaagcagctgccatattactacttgtccccagaccggattccgaacagtgtggccatctgagcacactgccagtctcactgtgggaaggccagctgccccagccagatggactccagcctgcctggcaggctgtctggccaggcctcttggcagtcacatctcttcctccgaggccagtacctttccatttattctttgatcttcagggaactgcatagattgatcaaagtgtaaacaccatagggacccattctacacagagcaggactgcacagcgtcctgtccacacccagctcagcatttccacaccaagcagcaacagcaaatcacgaccactgatagatgtctattcttgttggagacatgggatgattattttctgttctatttgtgcttagtccaattccttgcacatagtaggtacccaattcaattactattgaatgaattaagaattggttgccataaaaataaatcagttcattt

SEQ ID NO: 1005 - DNA, 604 bp, Homo sapiens
  source 1..604: mol_type = unassigned DNA
cggccgaggtggtagacatctactacgagggcgaccaggtggtggaggaggacccggagctgcaggacttcgtgaacgatgtctacgtgtacggcatgcggggccgcaagtcctcaggcttccccaagtcggtcaagagccgggagcagctgtcggagtacctgaccgtggtgatcttcaccgcctccgcccagcacgccgcggtcaacttcggccaggtaggcagggccgggcccgctgggcagggctcccttctcaaggccgctgcctcctcccccgccccggttctgcacgcgtactgcaccctcggacagcctcggggcctggcacgggacttgcaggatggattctgcccgctcagccaagggcgctggccgcggggaaagaggatggacggactgcagggcccgctggagttggggggcacggggaggacggggcccagggggcagctgggcagcagggcttcgggggtgcccacgcttgctggcggtcgtctccgcagtacgactggtgctcctggatccccaatgcgcccccaaccatgcgagccccgccaccgactgccaagggcgtggtgaccattgagcagatcgtggacacg

SEQ ID NO: 1006 - DNA, 356 bp, Homo sapiens
  source 1..356: mol_type = unassigned DNA
ggaatgacttcgccgactttgagaaaatctttgtcaagatcagcaacactatttctgagcgggtcatgaatcactggcaggaagacctgatgtttggctaccagttcctgaatggctgcaaccctgtgttgatccggcgctgcacagagctgcccgagaagctcccggtgaccacggagatggtagagtgcagcctggagcggcagctcagcttggagcaggaggtccagtcaagcaggtttcagacaccacaaatgccgaatgagctgctgccattccttcatcttaccccgaactgccacaacctgtgaacaccttccatgtgaatcaatcagccttggagtcagaggagagaa

SEQ ID NO: 1007 - DNA, 446 bp, Homo sapiens
  source 1..446: mol_type = unassigned DNA
ctcaaccaaatcccgggagatgagaaccctattttcctcccttcggatgcaaaatacgactggcttttggccaaaatctgggtgcgttccagtgacttccacgtccaccagaccatcacccaccttctgcgaacacatctggtgtctgaggtttttggcattgcaatgtaccgccagctgcctgctgtgcaccccattttcaagctgctggtggcacacgtgagattcaccattgcaatcaacaccaaggcccgtgagcagctcatctgcgagtgtggcctctttgacaaggtgggtgccctcctaccctacttgttgcctggaagagcccagcctggccgccttcactccctatctgagatctagacaccctttcaggaggcctggaagggtgaaggctggagtctgctcagagcactggctccagcatcctcctgatgtctcca

SEQ ID NO: 1008 - DNA, 636 bp, Homo sapiens
  source 1..636: mol_type = unassigned DNA
caggccctcaacagagttgcatgggtcctggaaactgagggtcactgagagcaatgactgagggtcgtgtgctcagcactagagcagacttcacagcccaggcccgctggtgctggggtcccccacacacctgcccacgcctgctgccctcctgtggctgggagcgcacccttccctcttgtactctgcagccccacggttcagtcccttgcattggattgggcgggaggctcctccctagcacctctccacccggctgcccttgtcattctctgcgttaaacatccctcccccatctcacaggacaagggcttgcacctctgcctgcctggcctcctcgcctcccctggcacatttcctcagggatgggtctggacagctgtgggaggagccacccgctcagggcactctacctcccactccaggccaacgccacagggggcggtgggcacgtgcagatggtgcagagggccatgaaggacctgacctatgcctccctgtgctttcccgaggccatcaaggcccggggcatggagagcaaagaagacatcccctactacttctaccgggacgacgggctcctggtgtgggaagccatcaggacgttcacggccgaggtggtagacatctactacg

SEQ ID NO: 1009 - DNA, 514 bp, Homo sapiens
  source 1..514: mol_type = unassigned DNA
tgggggaggagccgggacccctgcctgactacctggggcgggcctggcccctccaccgctagcgctgaatggggacggggtgggggagtcccagcgtccgtgagggggttgccgccgggcaccgctccgcagacctggctgggtcgcccaccccggctgcgccccctgagccaggttcacggccgaggtggtagacatctactacgagggcgaccaggtggtggaggaggacccggagctgcaggacttcgtgaacgatgtctacgtgtacggcatgcggggccgcaagtcctcaggcttccccaagtcggtcaagagccgggagcagctgtcggagtacctgaccgtggtgatcttcaccgcctccgcccagcacgccgcggtcaacttcggccagtacgactggtgctcctggatccccaatgcgcccccaaccatgcgagccccgccaccgactgccaagggcgtggtgaccattgagcagatcgtggacacgctgcccgaccgcggccgc

SEQ ID NO: 1010 - DNA, 2390 bp, Homo sapiens
  source 1..2390: mol_type = unassigned DNA
ccggggccagggaccagtggtgggaggaggctgcggcgctagatgcggacacctggaccgccgcgccgaggctcccggcgctcgctgctcccgcggcccgcgccatgccctcctacacggtcaccgtggccactggcagccagtggttcgccggcactgacgactacatctacctcagcctcgtgggctcggcgggctgcagcgagaagcacctgctggacaagcccttctacaacgacttcgagcgtggcgcggtggattcatacgacgtgactgtggacgaggaactgggcgagatccagctggtcagaatcgagaagcgcaagtactggctgaatgacgactggtacctgaagtacatcacgctgaagacgccccacggggactacatcgagttcccctgctaccgctggatcaccggcgatgtcgaggttgtcctgagggatggacgcgcaaagttggcccgagatgaccaaattcacattctcaagcaacaccgacgtaaagaactggaaacacggcaaaaacaatatcgatggatggagtggaaccctggcttccccttgagcatcgatgccaaatgccacaaggatttaccccgtgatatccagtttgatagtgaaaaaggagtggactttgttctgaattactccaaagcgatggagaacctgttcatcaaccgcttcatgcacatgttccagtcttcttggaatgacttcgccgactttgagaaaatctttgtcaagatcagcaacactatttctgagcgggtcatgaatcactggcaggaagacctgatgtttggctaccagttcctgaatggctgcaaccctgtgttgatccggcgctgcacagagctgcccgagaagctcccggtgaccacggagatggtagagtgcagcctggagcggcagctcagcttggagcaggaggtccagcaagggaacattttcatcgtggactttgagctgctggatggcatcgatgccaacaaaacagacccctgcacactccagttcctggccgctcccatctgcttgctgtataagaacctggccaacaagattgtccccattgccatccagctcaaccaaatcccgggagatgagaaccctattttcctcccttcggatgcaaaatacgactggcttttggccaaaatctgggtgcgttccagtgacttccacgtccaccagaccatcacccaccttctgcgaacacatctggtgtctgaggtttttggcattgcaatgtaccgccagctgcctgctgtgcaccccattttcaagctgctggtggcacacgtgagattcaccattgcaatcaacaccaaggcccgtgagcagctcatctgcgagtgtggcctctttgacaaggccaacgccacagggggcggtgggcacgtgcagatggtgcagagggccatgaaggacctgacctatgcctccctgtgctttcccgaggccatcaaggcccggggcatggagagcaaagaagacatcccctactacttctaccgggacgacgggctcctggtgtgggaagccatcaggacgttcacggccgaggtggtagacatctactacgagggcgaccaggtggtggaggaggacccggagctgcaggacttcgtgaacgatgtctacgtgtacggcatgcggggccgcaagtcctcaggcttccccaagtcggtcaagagccgggagcagctgtcggagtacctgaccgtggtgatcttcaccgcctccgcccagcacgccgcggtcaacttcggccagctgttcctgggcatgtacccagaagagcattttatcgagaagcctgtgaaggaagccatggcccgattccgcaagaacctcgaggccattgtcagcgtgattgctgagcgcaacaagaagaagcagctgccatattactacttgtccccagaccggattccgaacagtgtggccatctgagcacactgccagtctcactgtgggaaggccagctgccccagccagatggactccagcctgcctggcaggctgtctggccaggcctcttggcagtcacatctcttcctccgaggccagtacctttccatttattctttgatcttcagggaactgcatagattgatcaaagtgtaaacaccatagggacccattctacacagagcaggactgcacagcgtcctgtccacacccagctcagcatttccacaccaagcagcaacagcaaatcacgaccactgatagatgtctattcttgttggagacatgggatgattattttctgttctatttgtgcttagtccaattccttgcacatagtaggtacccaattcaattactattgaatgaattaagaattggttgccataaaaataaatcagttcatttaaaatg

SEQ ID NO: 1011 - DNA, 1945 bp, Homo sapiens
  source 1..1945: mol_type = unassigned DNA
atgccctcctacacggtcaccgtggccactggcagccagtggttcgccggcactgacgactacatctacctcagcctcgtgggctcggcgggctgcagcgagaagcacctgctggacaagcccttctacaacgacttcgagcgtggcgcggtggattcatacgacgtgactgtggacgaggaactgggcgagatccagctggtcagaatcgagaagcgcaagtactggctgaatgacgactggtacctgaagtacatcacgctgaagacgccccacggggactacatcgagttcccctgctaccgctggatcaccggcgatgtcgaggttgtcctgagggatggacgcgagatggatggagtggaaccctggcttccccttgagcatcgatgccaaatgccacaaggatttaccccgtgatatccagtttgatagtgaaaaaggagtggactttgttctgaattactccaaagcgatggagaacctgttcatcaaccgcttcatgcacatgttccagtcttcttggaatgacttcgccgactttgagaaaatctttgtcaagatcagcaacactatttctgagcgggtcatgaatcactggcaggaagacctgatgtttggctaccagttcctgaatggctgcaaccctgtgttgatccggcgctgcacagagctgcccgagaagctcccggtgaccacggagatggtagagtgcagcctggagcggcagctcagcttggagcaggaggtccagcaagggaacattttcatcgtggactttgagctgctggatggcatcgatgccaacaaaacagacccctgcacactccagttcctggccgctcccatctgcttgctgtataagaacctggccaacaagattgtccccattgccatccagctcaaccaaatcccgggagatgagaaccctattttcctcccttcggatgcaaaatacgactggcttttggccaaaatctgggtgcgttccagtgacttccacgtccaccagaccatcacccaccttctgcgaacacatctggtgtctgaggtttttggcattgcaatgtaccgccagctgcctgctgtgcaccccattttcaagctgctggtggcacacgtgagattcaccattgcaatcaacaccaaggcccgtgagcagctcatctgcgagtgtggcctctttgacaaggccaacgccacagggggcggtgggcacgtgcagatggtgcagagggccatgaaggacctgacctatgcctccctgtgctttcccgaggccatcaaggcccggggcatggagagcaaagaagacatcccctactacttctaccgggacgacgggctcctggtgtgggaagccatcaggacgttcacggccgaggtggtagacatctactacgagggcgaccaggtggtggaggaggacccggagctgcaggacttcgtgaacgatgtctacgtgtacggcatgcggggccgcaagtcctcaggcttccccaagtcggtcaagagccgggagcagctgtcggagtacctgaccgtggtgatcttcaccgcctccgcccagcacgccgcggtcaacttcggccagtacgactggtgctcctggatccccaatgcgcccccaaccatgcgagccccgccaccgactgccaagggcgtggtgaccattgagcagatcgtggacacgctgcccgaccgcggccgctcctgctggcatctgggtgcagtgtgggcgctgagccagttccaggaaaacgagctgttcctgggcatgtacccagaagagcattttatcgagaagcctgtgaaggaagccatggcccgattccgcaagaacctcgaggccattgtcagcgtgattgctgagcgcaacaagaagaagcagctgccatattactacttgtccccagaccggattccgaacagtgtggccatctga

SEQ ID NO: 1012 - DNA, 2506 bp, Homo sapiens
  source 1..2506: mol_type = unassigned DNA
cctggaccgccgcgccgaggctcccggcgctcgctgctcccgcggcccgcgccatgccctcctacacggtcaccgtggccactggcagccagtggttcgccggcactgacgactacatctacctcagcctcgtgggctcggcgggctgcagcgagaagcacctgctggacaagcccttctacaacgacttcgagcgtggcgcggtggattcatacgacgtgactgtggacgaggaactgggcgagatccagctggtcagaatcgagaagcgcaagtactggctgaatgacgactggtacctgaagtacatcacgctgaagacgccccacggggactacatcgagttcccctgctaccgctggatcaccggcgatgtcgaggttgtcctgagggatggacgcgcaaagttggcccgagatgaccaaattcacattctcaagcaacaccgacgtaaagaactggaaacacggcaaaaacaatatcgatggatggagtggaaccctggcttccccttgagcatcgatgccaaatgccacaaggatttaccccgtgatatccagtttgatagtgaaaaaggagtggactttgttctgaattactccaaagcgatggagaacctgttcatcaaccgcttcatgcacatgttccagtcttcttggaatgacttcgccgactttgagaaaatctttgtcaagatcagcaacactatttctgagcgggtcatgaatcactggcaggaagacctgatgtttggctaccagttcctgaatggctgcaaccctgtgttgatccggcgctgcacagagctgcccgagaagctcccggtgaccacggagatggtagagtgcagcctggagcggcagctcagcttggagcaggaggtccagcaagggaacattttcatcgtggactttgagctgctggatggcatcgatgccaacaaaacagacccctgcacactccagttcctggccgctcccatctgcttgctgtataagaacctggccaacaagattgtccccattgccatccagctcaaccaaatcccgggagatgagaaccctattttcctcccttcggatgcaaaatacgactggcttttggccaaaatctgggtgcgttccagtgacttccacgtccaccagaccatcacccaccttctgcgaacacatctggtgtctgaggtttttggcattgcaatgtaccgccagctgcctgctgtgcaccccattttcaagctgctggtggcacacgtgagattcaccattgcaatcaacaccaaggcccgtgagcagctcatctgcgagtgtggcctctttgacaaggccaacgccacagggggcggtgggcacgtgcagatggtgcagagggccatgaaggacctgacctatgcctccctgtgctttcccgaggccatcaaggcccggggcatggagagcaaagaagacatcccctactacttctaccgggacgacgggctcctggtgtgggaagccatcaggacgttcacggccgaggtggtagacatctactacgagggcgaccaggtggtggaggaggacccggagctgcaggacttcgtgaacgatgtctacgtgtacggcatgcggggccgcaagtcctcaggcttccccaagtcggtcaagagccgggagcagctgtcggagtacctgaccgtggtgatcttcaccgcctccgcccagcacgccgcggtcaacttcggccagtacgactggtgctcctggatccccaatgcgcccccaaccatgcgagccccgccaccgactgccaagggcgtggtgaccattgagcagatcgtggacacgctgcccgaccgcggccgctcctgctggcatctgggtgcagtgtgggcgctgagccagttccaggaaaacgagctgttcctgggcatgtacccagaagagcattttatcgagaagcctgtgaaggaagccatggcccgattccgcaagaacctcgaggccattgtcagcgtgattgctgagcgcaacaagaagaagcagctgccatattactacttgtccccagaccggattccgaacagtgtggccatctgagcacactgccagtctcactgtgggaaggccagctgccccagccagatggactccagcctgcctggcaggctgtctggccaggcctcttggcagtcacatctcttcctccgaggccagtacctttccatttattctttgatcttcagggaactgcatagattgatcaaagtgtaaacaccatagggacccattctacacagagcaggactgcacagcgtcctgtccacacccagctcagcatttccacaccaagcagcaacagcaaatcacgaccactgatagatgtctattcttgttggagacatgggatgattattttctgttctatttgtgcttagtccaattccttgcacatagtaggtacccaattcaattactattgaatgaattaagaattggttgccataaaaataaatcagttcatttaa

SEQ ID NO: 1013 - DNA, 363 bp, Homo sapiens
  source 1..363: mol_type = unassigned DNA
tcttcttggaatgacttcgccgactttgagaaaatctttgtcaagatcagcaacactatttctgagcgggtcatgaatcactggcaggaagacctgatgtttggctaccagttcctgaatggctgcaaccctgtgttgatccggcgctgcacagagctgcccgagaagctcccggtgaccacggagatggtagagtgcagcctggagcggcagctcagcttggagcaggaggtccagtcaagcaggtttcagacaccacaaatgccgaatgagctgctgccattccttcatcttaccccgaactgccacaacctgtgaacaccttccatgtgaatcaatcagccttggagtcagaggagagaa

SEQ ID NO: 1014 - DNA, 446 bp, Homo sapiens; identical to SEQ ID NO: 1007
  source 1..446: mol_type = unassigned DNA

SEQ ID NO: 1015 - DNA, 636 bp, Homo sapiens; identical to SEQ ID NO: 1008
  source 1..636: mol_type = unassigned DNA

SEQ ID NO: 1016 - DNA, 514 bp, Homo sapiens; identical to SEQ ID NO: 1009
  source 1..514: mol_type = unassigned DNA

SEQ ID NO: 1017 - DNA, 604 bp, Homo sapiens; identical to SEQ ID NO: 1005
  source 1..604: mol_type = unassigned DNA

SEQ ID NO: 1018 - DNA, 2390 bp, Homo sapiens; identical to SEQ ID NO: 1010
  source 1..2390: mol_type = unassigned DNA

SEQ ID NO: 1019 - DNA, 1945 bp, Homo sapiens; identical to SEQ ID NO: 1011
  source 1..1945: mol_type = unassigned DNA

SEQ ID NO: 1020 - DNA, 6644 bp, Homo sapiens
  source 1..6644: mol_type = unassigned DNA
aagcgcatctcaggactgatagctccgccctaaactaagggagagactgtgctcccaagtacgtagcctgcagtgcctaacgcattctcagcaattttgacccccaacagacgccgtcgacagtctcccaagaacaattcccaggagctcggattccaagagccgcccgcgccctcgtttaccttcgctagtcgccctgcagccccgccctgtccggaggccccgccctccatgaatcagctgatcccgcggacccactgggttgccaagctcgcgccggatgcggagcgcggtgctgccggtggagcttcaggtcttgatagactttctgtaaagaaggaatgatttggtgatggagtgttcccactgaccgatggactcaaagaagagaagctcaacagaggcagaaggatccaaggaaagaggcctggtccatatctggcaggcaggatcctttcccataacaccagagagattgccaggctggggaggaaagactgttttgcaggcagccctcggagtgaaacatggagttcttctgactgaagatggtgaggtctacagctttgggactcttccctggagaagtggaccagtggagatttgtccaagtagccccattctagaaaatgccctggttgggcaatatgttattactgtggcaacaggaagcttccatagtggagcagtgacagacaatggtgtcgcgtacatgtggggagagaattctgctggccagtgtgcagtagccaaccagcagtatgtgccggaaccaaatcctgtcagcattgctgattctgaggccagccctttgttagcagtcaggattttacagttggcgtgtggcgaggagcacactctggcattgtcaataagcagagagatttgggcatggggtaccggttgtcagttgggtctcattaccactgccttcccagtgacaaagccgcaaaaggtagaacatcttgctgggcgagtggtgcttcaagttgcctgtggtgctttccacagcttagcccttgtacaatgcctcccttcccaggatctgaagccagtcccagaacgatgcaaccagtgcagccagctcttgattactatgactgacaaagaagaccatgtgattatatcagacagtcattgttgcccattaggtgtgacactgacagaatctcaggcagaaaaccatgccagcactgctctcagcccctccactgaaacccttgacaggcaggaagaagtatttgagaacactcttgtagcaaatgatcagtctgttgctactgaactgaatgcagtaagtgctcagatcacaagcagcgatgccatgtcctctcaacaaaatgtcatgggaacaactgaaatttcctctgccagaaacataccatcataccctgacacccaagcagtcaatgaatacctacggaaactgtcagatcattcagtaagagaggactcagagcatggtgaaaagccagtgccatctcagcctcttttagaagaagcaattcctaatctccacagcccgcctaccacaagcacctcagccctaaacagcctggtggtctcttgtgcatctgctgttggtgtgagagtggctgctacttatgaagctggtgccttgtcactgaagaaagttatgaacttttatagtacaaccccttgtgaaactggagctcaggcaggcagtagtgccattggccccgaaggtttgaaagatagcagggaagaacaggttaaacaggaatcaatgcaaggaaagaaaagttcaagtcttgtggatatcagagaagaagaaacagagggaggcagtcgaagactctccctccctggattgttgtcacaagtttcccccaggctcttaagaaaggctgcacgggtgaaaacgaggacagtggttctgacccccacatacagtggagaagcagatgcgctcctgccttctctgagaacagaagtgtggacctgggggaaagggaaggaagggcagctggggcacggcgatgttctgcctaggcttcaaccgttgtgtgtaaaatgtctggatggcaaagaagtaatccatctggaggcaggtggttaccattctcttgcacttactgcgaaatcccaggtttactcatggggtagcaatacctttggtcaacttgggcattccgattttccaacaacagttcctcgtcttgcaaagataagcagtgaaaatggagtctggagcatagctgcaggcagggattattccctgtttttagtggatacagaagacttccagcctgggttatattacagtggccgacaggaccctacagaaggtgacaaccttccagagaatcacagtggttctaagactccagtacttctctcctgtagtaagcttggatatataagcagagtgacagcaggaaaagatagctatttagccttggtggataaaaacattatggggtatattgccagtctccacgagttagctactacagaaagacgattctattcaaaactaagtgatatcaaatctcagattctcaggcctcttctcagtttagaaaatttgggcactacaactacagtccagctgttgcaggaggtggctagccgattcagcaagctgtgttacctcattggtcagcatggagcctcattgagcagcttccttcatggggtaaaggaagccaggagtttggtcatcctgaagcattcaagtctcttcttggatagttatacagagtattgcacatctattacaaatttcctggttatgggaggattccagcttcttgctaagcctgccattgatttcctaaataaaaaccaagagctgttgcaagatttgtcagaagtgaatgacgaaaacactcagttgatggaaatactgaatactttgtttttcttgccaatcagacgacttcataattacgcaaaagttttgctaaagcttgctacttgttttgaagtggcatctccagaatatcagaaactgcaggattccagttcttgttatgagtgtcttgctctccatctcggcaggaaaaggaaggaagcagaatacacactgggcttctggaagaccttccccggaaaaatgacggattccttgaggaagccagagcgtcgactgctgtgtgagagtagtaaccgagccctgtctctgcagcatgctgggaggttttccgtgaattggttcattctctttaatgatgccctggtccatgcccagttctccacgcaccatgttttccctctggccacgctgtgggcagagccactgtctgaagaagctggtggtgtgaatggcttaaagataactacacctgaggagcagttcactctcatttcatctacaccccaggaaaagacaaagtggctacgagctataagccaagccgtagatcaggctttgagagggatgtctgatctccccccttatggaagtggtagcagtgttcagagacaggaaccacccatttcacgcagtgccaaatatactttctacaaggatcctcgcctaaaggatgccacctatgatggacgctggctttcagggaagcctcatggcagaggggttttgaagtggcctgatggaaagatgtattctggcatgttcaggaatggcttggaagatgggtatggagaatacagaatcccaaacaaggcaatgaacaaagaagaccattatgtgggccattggaaagaaggaaaaatgtgcggtcaaggagtctacagctatgcttctggtgaagtatttgagggctgttttcaagataatatgcgtcatggtcatggtcttctacgaagtgggaaattgacgtcctcttctcctagtatgttcattggccagtgggtaatggataagaaagcaggatatggtgtctttgatgatatcactaggggggaaaagtatatgggaatgtggcaagatgatgtgtgtcaagggaatggtgtggtggttacccagtttggattatactacgagggcaactttcaccttaataaaatgatgggaaatggggttttgctttccgaagatgatactatctatgaaggagaattttcagatgactggactcttagtggaaagggaacactgactatgccaaatggagactacattgaaggttattttagtggagaatggggatctgggataaaaatcactggaacctacttcaaacctagtctatatgagagtgataaagacagacctaaagttttcaggaagctaggaaacctggcagtgccagctgatgagaagtggaaagcggtgtttgacgaatgttggcgccaactgggctgtgagggcccaggccaaggggaagtttggaaagcatgggacaatattgctgtggccttgaccaccagtcggcgccagcacagagacagtccagaaatactgagtcgttcacagactcagacactagagagtttggaattcattccacagcatgttggtgccttctctgtggagaaatatgatgacatcaggaaatatttaataaaggcctgtgacactcctctgcaccccctgggcaggcttgtggagacactggttgcagtgtatagaatgacatacgtgggcgtaggagccaaccgcaggttattgcaggaggctgtaaaggagattaagtcctatcttaagcgaattttccagctggtgaggttcttatttcctgagctgcctgaagaaggcagcacaattcctctctctgctcctctgccaaccgaaaggaagtctttttgcactgggaagtcagattcccgatctgaatcaccagagccaggttatgtagtaacgagttctggattattgcttcctgtgctgctacctcggctctacccaccgctgtttatgctttatgctttggataatgatcgcgaggaagacatttactgggaatgtgtccttcgactaaataagcagccagatattgctctcctgggctttcttggggtgcagaggaaattttggccagcaaccttgtcaatccttggagagagtaaaaaggttttgccaaccacgaaagatgcttgttttgcctcagcagtagaatgtctgcagcagatcagcacaacatttaccccatcagacaaacttaaggtcatccagcagacttttgaggagatctctcagagtgtcctggcgtcactccacgaagacttcttgtggtccatggatgacttgtttcctgttttcttatatgtggtgctacgggccaggattaggaatttaggctctgaggtacacctcattgaggatctaatggacccctatcttcagcatggggaacagggtataatgttcaccaccttgaaggcatgttactaccagattcagcgtgagaagcttaactaggctgcataacagcttgaaaactggattatctactacagagtgttataacaccatctggagtcttcctgtagtggcaaaaaagaacagtgttgaaattggaaaggactttgtgttatttaggttgttagaatgagccttaccaataataagagccctgagcccagaaaaaaggactgtatagtttaaagggaggattgaaagggaggtaaaaaatcagattagaccagttcttggcctatgataagttccaaaaataccatttatctactatttgaaaaaagaagaggatatcccttcctacagtaaagggtatgtcagctacatgaagttgtaagaaaagcttccagtagagcttcttatattaaagaagttgatggatatttttgaatttctggtttgcctgaatccacctgcagttaccccgatccgtttgcaagaaccagatcgtacttgaaactatagtggccacactctgccttcctgagtcccttccagtcatgtgtgcatcatgtctctttgccaagggaggggagaaaggaacttttaaactgcagttttaactttttctaagctgtttcttgatgggagaggttctgtgcaaaactaccacattctgtccccaaaatgtggaatgcatccaaataggagtcttctgcctcttaacttaaaagaacataggaattttgtttttggtttctttatcatgctacagagagtgaatacactggaattcagacaccgactctgagctgctaggaacctcatttgtccatgtgcaaacgctgtattccaaggcctgtgaatggcagcctgaggaagttttgcatgcaggctgtgttttcgagcaggactaacaactgggaaataagcaaaaaactgcatcgatccccagcctggtgttgttcttccctatacttcacactgaactcaggatgggaagaaaaaggaaacaagctttggctttttccatctcaaaagtattgtggcacctcaacatttcagtgttttgctttttaaaaaatgccctattgtaagttgttggtttatactgtataagtaacactagtagctgttttgaataacataggtgctcttcctcatctcatctcctacaccgtggtgagcatacagagtgtcctgatttgtgttaagtgactgagaagatgttaattacttttgaaaaaggatcatggtttttgctctactttataatcaagacaagtgtttattaaaatactgttttggaatgttggctgtaatgtaacagcaattttcataataaaaggcattcatcttt

SEQ ID NO: 1021 - DNA, 3242 bp, Homo sapiens
  source 1..3242: mol_type = unassigned DNA
tttagccttggtggataaaaacattatggggtatattgccagtctccacgagttagctactacagaaagacgattctattcaaaactaagtgatatcaaatctcagattctcaggcctcttctcagtttagaaaatttgggcactacaactacagtccagctgttgcaggaggtggctagccgattcagcaagctgtgttacctcattggtcagcatggagcctcattgagcagcttccttcatggggtaaaggaagccaggagtttggtcatcctgaagcattcaagtctcttcttggatagttatacagagtattgcacatctattacaaatttcctggttatgggaggattccagcttcttgctaagcctgccattgatttcctaaataaaaaccaagagctgttgcaagatttgtcagaagtgaatgacgaaaacactcagttgatggaaatactgaatactttgtttttcttgccaatcagacgacttcataattacgcaaaagttttgctaaagcttgctacttgttttgaagtggcatctccagaatatcagaaactgcaggattccagttcttgttatgagtgtcttgctctccatctcggcaggaaaaggaaggaagcagaatacacactgggcttctggaagaccttccccggaaaaatgacggattccttgaggaagccagagcgtcgactgctgtgtgagagtagtaaccgagccctgtctctgcagcatgctgggaggttttccgtgaattggttcattctctttaatgatgccctggtccatgcccagttctccacgcaccatgttttccctctggccacgctgtgggcagagccactgtctgaagaagctggtggtgtgaatggcttaaagataactacacctgaggagcagttcactctcatttcatctacaccccaggaaaagacaaagtggctacgagctataagccaagccgtagatcaggctttgagagggatgtctgatctccccccttatggaagtggtagcagtgttcagagacaggaaccacccatttcacgcagtgccaaatatactttctacaaggatcctcgcctaaaggatgccacctatgatggacgctggctttcagggaagcctcatggcagaggggttttgaagtggcctgatggaaagatgtattctggcatgttcaggaatggcttggaagatgggtatggagaatacagaatcccaaacaaggcaatgaacaaagaagaccattatgtgggccattggaaagaaggaaaaatgtgcggtcaaggagtctacagctatgcttctggtgaagtatttgagggctgttttcaagataatatgcgtcatggtcatggtcttctacgaagtgggaaattgacgtcctcttctcctagtatgttcattggccagtgggtaatggataagaaagcaggatatggtgtctttgatgatatcactaggggggaaaagtatatgggaatgtggcaagatgatgtgtgtcaagggaatggtgtggtggttacccagtttggattatactacgagggcaactttcaccttaataaaatgatgggaaatggggttttgctttccgaagatgatactatctatgaaggagaattttcagatgactggactcttagtggaaaggataattctggcctcatagaacaagttgggaagtgttccctcctcccctattttctgaaagtttgcgaagctttggtattatttcttctttgaatgtttgggagaattcaccaatgaagtcttctgggcctaagcattactttggaacactgactatgccaaatggagactacattgaaggttattttagtggagaatggggatctgggataaaaatcactggaacctacttcaaacctagtctatatgagagtgataaagacagacctaaagttttcaggaagctaggaaacctggcagtgccagctgatgagaagtggaaagcggtgtttgacgaatgttggcgccaactgggctgtgagggcccaggccaaggggaagtttggaaagcatgggacaatattgctgtggccttgaccaccagtcggcgccagcacagagacagtccagaaatactgagtcgttcacagactcagacactagagagtttggaattcattccacagcatgttggtgccttctctgtggagaaatatgatgacatcaggaaatatttaataaaggcctgtgacactcctctgcaccccctgggcaggcttgtggagacactggttgcagtgtatagaatgacatacgtgggcgtaggagccaaccgcaggttattgcaggaggctgtaaaggagattaagtcctatcttaagcgaattttccagctggtgaggttcttatttcctgagctgcctgaagaaggcagcacaattcctctctctgctcctctgccaaccgaaaggaagtctttttgcactgggaagtcagattcccgatctgaatcaccagagccaggttatgtagtaacgagttctggattattgcttcctgtgctgctacctcggctctacccaccgctgtttatgctttatgctttggataatgatcgcgaggaagacatttactgggaatgtgtccttcgactaaataagcagccagatattgctctcctgggctttcttggggtgcagaggaaattttggccagcaaccttgtcaatccttggagagagtaaaaaggttttgccaaccacgaaagatgcttgttttgcctcagcagtagaatgtctgcagcagatcagcacaacatttaccccatcagacaaacttaaggtcatccagcagacttttgaggagatctctcagagtgtcctggcgtcactccacgaagacttcttgtggtccatggatgacttgtttcctgttttcttatatgtggtgctacgggccaggattaggaatttaggctctgaggtacacctcattgaggatctaatggacccctatcttcagcatggggaacagggtataatgttcaccaccttgaaggcatgttactaccagattcagcgtgagaagcttaactaggctgcataacagcttgaaaactggattatctactacagagtgttataacaccatctggagtcttcctgtagtggcaaaaaagaacagtgttgaaattggaaaggactttgtgttatttaggttgttagaatgagccttaccaataataagagccctgagcccag

SEQ ID NO: 1022 - DNA, 727 bp, Homo sapiens
  source 1..727: mol_type = unassigned DNA
cagaggggttttgaagtggcctgatggaaagatgtattctggcatgttcaggaatggcttggaagatgggtatggagaatacagaatcccaaacaaggcaatgaacaaagaagaccattatgtgggccattggaaagaaggaaaaatgtgcggtcaaggagtctacagctatgcttctggtgaagtatttgagggctgttttcaagataatatgcgtcatggtcatggtcttctacgaagtgggaaattgacgtcctcttctcctagtatgttcattggccagtgggtaatggataagaaagcaggatatggtgtctttgatgatatcactaggggggaaaagtatatgggaatgtggcaagatgatgtgtgtcaagggaatggtgtggtggttacccagtttggattatactacgagggcaactttcaccttaataaaatgatgggaaatggggttttgctttccgaagatgatactatctatgaaggagaattttcagatgactggactcttagtggaaagggaacactgactatgccaaatggagactacattgaaggttattttagtggagaatggggatctgggataaaaatcactggaacctacttcaaacctagtctatatgagagtgataaagacagacctaaagttttatggagtctcactttgtcacccaggctggactgcagtggcgtgatctcagctcactgcaacctgcacctc

SEQ ID NO: 1023 - DNA, 4895 bp, Homo sapiens
  source 1..4895: mol_type = unassigned DNA
gaatcagctgatcccgcggacccactgggttgccaagctcgcgccggatgcggagcgcggtgctgccggtggagcttcaggtcttgatagactttctgtaaagaaggaatgatttggtgatggagtgttcccactgaccgatggactcaaagaagagaagctcaacagaggcagaaggatccaaggaaagaggcctggtccatatctggcaggcaggatcctttcccataacaccagagagattgccaggctggggaggaaagactgttttgcaggcagccctcggagtgaaacatggagttcttctgactgaagatggtgaggtctacagctttgggactcttccctggagaagtggaccagtggagatttgtccaagtagccccattctagaaaatgccctggttgggcaatatgttattactgtggcaacaggaagcttccatagtggagcagtgacagacaatggtgtcgcgtacatgtggggagagaattctgctggccagtgtgcagtagccaaccagcagtatgtgccggaaccaaatcctgtcagcattgctgattctgaggccagccctttgttagcagtcaggattttacagttggcgtgtggcgaggagcacactctggcattgtcaataagcagagagatttgggcatggggtaccggttgtcagttgggtctcattaccactgccttcccagtgacaaagccgcaaaaggtagaacatcttgctgggcgagtggtgcttcaagttgcctgtggtgctttccacagcttagcccttgtacaatgcctcccttcccaggatctgaagccagtcccagaacgatgcaaccagtgcagccagctcttgattactatgactgacaaagaagaccatgtgattatatcagacagtcattgttgcccattaggtgtgacactgacagaatctcaggcagaaaaccatgccagcactgctctcagcccctccactgaaacccttgacaggcaggaagaagtatttgagaacactcttgtagcaaatgatcagtctgttgctactgaactgaatgcagtaagtgctcagatcacaagcagcgatgccatgtcctctcaacaaaatgtcatgggaacaactgaaatttcctctgccagaaacataccatcataccctgacacccaagcagtcaatgaatacctacggaaactgtcagatcattcagtaagagaggactcagagcatggtgaaaagccagtgccatctcagcctcttttagaagaagcaattcctaatctccacagcccgcctaccacaagcacctcagccctaaacagcctggtggtctcttgtgcatctgctgttggtgtgagagtggctgctacttatgaagctggtgccttgtcactgaagaaagttatgaacttttatagtacaaccccttgtgaaactggagctcaggcaggcagtagtgccattggccccgaaggtttgaaagatagcagggaagaacaggttaaacaggaatcaatgcaaggaaagaaaagttcaagtcttgtggatatcagagaagaagaaacagagggaggcagtcgaagactctccctccctggattgttgtcacaagtttcccccaggctcttaagaaaggctgcacgggtgaaaacgaggacagtggttctgacccccacatacagtggagaagcagatgcgctcctgccttctctgagaacagaagtgtggacctgggggaaagggaaggaagggcagctggggcacggcgatgttctgcctaggcttcaaccgttgtgtgtaaaatgtctggatggcaaagaagtaatccatctggaggcaggtggttaccattctcttgcacttactgcgaaatcccaggtttactcatggggtagcaatacctttggtcaacttgggcattccgattttccaacaacagttcctcgtcttgcaaagataagcagtgaaaatggagtctggagcatagctgcaggcagggattattccctgtttttagtggatacagaagacttccagcctgggttatattacagtggccgacaggaccctacagaaggtgacaaccttccagagaatcacagtggttctaagactccagtacttctctcctgtagtaagcttggatatataagcagagtgacagcaggaaaagatagctatttagccttggtggataaaaacattatggggtatattgccagtctccacgagttagctactacagaaagacgattctattcaaaactaagtgatatcaaatctcagattctcaggcctcttctcagtttagaaaatttgggcactacaactacagtccagctgttgcaggaggtggctagccgattcagcaagctgtgttacctcattggtcagcatggagcctcattgagcagcttccttcatggggtaaaggaagccaggagtttggtcatcctgaagcattcaagtctcttcttggatagttatacagagtattgcacatctattacaaatttcctggttatgggaggattccagcttcttgctaagcctgccattgatttcctaaataaaaaccaagagctgttgcaagatttgtcagaagtgaatgacgaaaacactcagttgatggaaatactgaatactttgtttttcttgccaatcagacgacttcataattacgcaaaagttttgctaaagcttgctacttgttttgaagtggcatctccagaatatcagaaactgcaggattccagttcttgttatgagtgtcttgctctccatctcggcaggaaaaggaaggaagcagaatacacactgggcttctggaagaccttccccggaaaaatgacggattccttgaggaagccagagcgtcgactgctgtgtgagagtagtaaccgagccctgtctctgcagcatgctgggaggttttccgtgaattggttcattctctttaatgatgccctggtccatgcccagttctccacgcaccatgttttccctctggccacgctgtgggcagagccactgtctgaagaagctggtggtgtgaatggcttaaagataactacacctgaggagcagttcactctcatttcatctacaccccaggaaaagacaaagtggctacgagctataagccaagccgtagatcaggctttgagagggatgtctgatctccccccttatggaagtggtagcagtgttcagagacaggaaccacccatttcacgcagtgccaaatatactttctacaaggatcctcgcctaaaggatgccacctatgatggacgctggctttcagggaagcctcatggcagaggggttttgaagtggcctgatggaaagatgtattctggcatgttcaggaatggcttggaagatgggtatggagaatacagaatcccaaacaaggcaatgaacaaagaagaccattatgtgggccattggaaagaaggaaaaatgtgcggtcaaggagtctacagctatgcttctggtgaagtatttgagggctgttttcaagataatatgcgtcatggtcatggtcttctacgaagtgggaaattgacgtcctcttctcctagtatgttcattggccagtgggtaatggataagaaagcaggatatggtgtctttgatgatatcactaggggggaaaagtatatgggaatgtggcaagatgatgtgtgtcaagggaatggtgtggtggttacccagtttggattatactacgagggcaactttcaccttaataaaatgatgggaaatggggttttgctttccgaagatgatactatctatgaaggagaattttcagatgactggactcttagtggaaaggttggaaactagctttctttttttttctccctaataaattcttttactaatttttttttactttaaaaatagctgatttacatgccataaaattcacccctttcaagtgcacgtttcagtgatttttggtcaacatggctgtacaaaccaccaccacaatccagtttcagaacatttccatcgcccaagaaaatcccttctgctcattcagtgacttccatttccacctaaagtcccagccaaccactaatcacccttaatcactctatagatttgccttttttgggccttttgtataaatggaatcatacatgcaatctcctctatgtggcttcttacacttagtataatgtttttgttttttccatattgtggcatgtatagtatttgttcctttttatggctgaatagtgttccaaaactacattttgtttatccttttaccagttgatggacattgggttatttccaactttagactattgtaaataatgctgctataaacttttgaatgcagtttcttgtgtagacatatgttttcattttcatttctcaagtagatgcctggagtgtaattgctaagttgtatggtaaattgatgtttaacatattaagaaactgtcgaacttttttccaaagtgtctgtaccattttacattcccatcagcaatgtctgaggatactaatttctccatatcaaaaaatatttcttattttctgtcttttttcttatagccattccaatgggtatgaagtggtatctcctggttttaatttgcattccctagtgactaatgatgtagaacatgcttattagtgattcatatatcttctttgatgaaatgtctattcagatcttggcctatttctaaaattttgtttgtactcttgttgaattgtatgggttctttctgtattctggatacatgtcctttatcagatatgatttgtaaatattttcttgcagtctgacttgtcttttattttcttaatagtgtcttttgaaatagaaaagtttttcattttaataaactctataaaaaattttatgaa

SEQ ID NO: 1024 - DNA, 537 bp, Homo sapiens
  source 1..537: mol_type = unassigned DNA
ttcctctgcctctagtgatttcctaaataaaaaccaagagctgttgcaagatttgtcagaagtgaatgacgaaaacactcagttgatggaaatactgaatactttgtttttcttgccaatcagacgacttcataattacgcaaaagttttgctaaagcttgctacttgttttgaagtggcatctccagaatatcagaaactgcaggattccagttcttgttatgagtgtcttgctctccatctcggcaggaaaaggaaggaagcagaatacacactgggcttctggaagaccttccccggaaaaatgacggattccttgaggaagccagagcgtcgactgctgtgtgagagtagtaaccgagccctgtctctgcagcatgctgggaggttttccgtgaattggttcattctctttaatgatgccctggtccatgcccaggaatggcttaaagataactacacctgaggagcagttcactctcatttcatctacaccccaggaaaagacaaagtggctacgagctataagccaagccg

SEQ ID NO: 1025 - DNA, 505 bp, Homo sapiens
  source 1..505: mol_type = unassigned DNA
ctattacaaatttcctggttatgggaggattccagcttcttgctaagcctgccatgtaagcaaacccacaccttccagttatcattctctccgccaaagatgacattttatagtgctctgttttcgagtgctcagggaaagctttgacttcatcattttaccaaacaagtcaaaatataaactttcatgatttcctaaataaaaaccaagagctgttgcaagatttgtcagaagtgaatgacgaaaacactcagttgatggaaatactgaatactttgtttttcttgccaatcagacgacttcataattacgcaaaagttttgctaaagcttgctacttgttttgaagtggcatctccagaatatcagaaactgcaggattccagttcttgttatgagtgtcttgctctccatctcggcaggaaaaggaaggaagcagaatacacactgggcttctggaagaccttccccggaaaaatgacggattccttgaggaagccagagcg

SEQ ID NO: 1026 - DNA, 2981 bp, Homo sapiens
  source 1..2981: mol_type = unassigned DNA
gaatcagctgatcccgcggacccactgggttgccaagctcgcgccggatgcggagcgcggtgctgccggtggagcttcaggtcttgatagactttctgtaaagaaggaatgatttggtgatggagtgttcccactgaccgatggactcaaagaagagaagctcaacagaggcagaaggatccaaggaaagaggcctggtccatatctggcaggcaggatcctttcccataacaccagagagattgccaggctggggaggaaagactgttttgcaggcagccctcggagtgaaacatggagttcttctgactgaagatggtgaggtctacagctttgggactcttccctggagaagtggaccagtggagatttgtccaagtagccccattctagaaaatgccctggttgggcaatatgttattactgtggcaacaggaagcttccatagtggagcagtgacagacaatggtgtcgcgtacatgtggggagagaattctgctggccagtgtgcagtagccaaccagcagtatgtgccggaaccaaatcctgtcagcattgctgattctgaggccagccctttgttagcagtcaggattttacagttggcgtgtggcgaggagcacactctggcattgtcaataagcagagagatttgggcatggggtaccggttgtcagttgggtctcattaccactgccttcccagtgacaaagccgcaaaaggtagaacatcttgctgggcgagtggtgcttcaagttgcctgtggtgctttccacagcttagcccttgtacaatgcctcccttcccaggatctgaagccagtcccagaacgatgcaaccagtgcagccagctcttgattactatgactgacaaagaagaccatgtgattatatcagacagtcattgttgcccattaggtgtgacactgacagaatctcaggcagaaaaccatgccagcactgctctcagcccctccactgaaacccttgacaggcaggaagaagtatttgagaacactcttgtagcaaatgatcagtctgttgctactgaactgaatgcagtaagtgctcagatcacaagcagcgatgccatgtcctctcaacaaaatgtcatgggaacaactgaaatttcctctgccagaaacataccatcataccctgacacccaagcagtcaatgaatacctacggaaactgtcagatcattcagtaagagaggactcagagcatggtgaaaagccagtgccatctcagcctcttttagaagaagcaattcctaatctccacagcccgcctaccacaagcacctcagccctaaacagcctggtggtctcttgtgcatctgctgttggtgtgagagtggctgctacttatgaagctggtgccttgtcactgaagaaagttatgaacttttatagtacaaccccttgtgaaactggagctcaggcaggcagtagtgccattggccccgaaggtttgaaagatagcagggaagaacaggttaaacaggaatcaatgcaaggaaagaaaagttcaagtcttgtggatatcagagaagaagaaacagagggaggcagtcgaagactctccctccctggattgttgtcacaagtttcccccaggctcttaagaaaggctgcacgggtgaaaacgaggacagtggttctgacccccacatacagtggagaagcagatgcgctcctgccttctctgagaacagaagtgtggacctgggggaaagggaaggaagggcagctggggcacggcgatgttctgcctaggcttcaaccgttgtgtgtaaaatgtctggatggcaaagaagtaatccatctggaggcaggtggttaccattctcttgcacttactgcgaaatcccaggtttactcatggggtagcaatacctttggtcaacttgggcattccgattttccaacaacagttcctcgtcttgcaaagataagcagtgaaaatggagtctggagcatagctgcaggcagggattattccctgtttttagtggatacagaagacttccagcctgggttatattacagtggccgacaggaccctacagaaggtgacaaccttccagagaatcacagtggttctaagactccagtacttctctcctgtagtaagcttggatatataagcagagtgacagcaggaaaagatagctatttagccttggtggataaaaacattatggggtatattgccagtctccacgagttagctactacagaaagacgattctattcaaaactaagtgatatcaaatctcagattctcaggcctcttctcagtttagaaaatttgggcactacaactacagtccagctgttgcaggaggtggctagccgattcagcaagctgtgttacctcattggtcagcatggagcctcattgagcagcttccttcatggggtaaaggaagccaggagtttggtcatcctgaagcattcaagtctcttcttggatagttatacagagcaagtatccagtcccgtgtcatgttcaatctctgcagggttattctgccaaggagaacagctccttaatcagaagagactagattagggagagtgatataaggtaatagaaattgcaaagcagtattttaatcttaagccaactatagttctggattgctaaaatttagtcttctctaaatgaaaaaaaatttaaaaataatgaattatcatgttttcttctatattctagcagagtgatagcataatttacattaaatgtactataataagtctggttctttagaaaacaattttgtttacttaactaaattgtactaaaacttggaagaaattagtaactaaacaaattatttcaagaccaactgctgattgtaaatatggagctgttctgatgtctgcttttgacttttatataaatggaagttttaaaagacccaactatttttaacatgaagatgtttttccttaataaaacctggaatagtta

SEQ ID NO: 1027 - DNA, 2677 bp, Homo sapiens
  source 1..2677: mol_type = unassigned DNA
gaatcagctgatcccgcggacccactgggttgccaagctcgcgccggatgcggagcgcggtgctgccggtggagcttcaggtcttgatagactttctgtaaagaaggaatgatttggtgatggagtgttcccactgaccgatggactcaaagaagagaagctcaacagaggcagaaggatccaaggaaagaggcctggtccatatctggcaggcaggatcctttcccataacaccagagagattgccaggctggggaggaaagactgttttgcaggcagccctcggagtgaaacatggagttcttctgactgaagatggtgaggtctacagctttgggactcttccctggagaagtggaccagtggagatttgtccaagtagccccattctagaaaatgccctggttgggcaatatgttattactgtggcaacaggaagcttccatagtggagcagtgacagacaatggtgtcgcgtacatgtggggagagaattctgctggccagtgtgcagtagccaaccagcagtatgtgccggaaccaaatcctgtcagcattgctgattctgaggccagccctttgttagcagtcaggattttacagttggcgtgtggcgaggagcacactctggcattgtcaataagcagagagatttgggcatggggtaccggttgtcagttgggtctcattaccactgccttcccagtgacaaagccgcaaaaggtagaacatcttgctgggcgagtggtgcttcaagttgcctgtggtgctttccacagcttagcccttgtacaatgcctcccttcccaggatctgaagccagtcccagaacgatgcaaccagtgcagccagctcttgattactatgactgacaaagaagaccatgtgattatatcagacagtcattgttgcccattaggtgtgacactgacagaatctcaggcagaaaaccatgccagcactgctctcagcccctccactgaaacccttgacaggcaggaagaagtatttgagaacactcttgtagcaaatgatcagtctgttgctactgaactgaatgcagtaagtgctcagatcacaagcagcgatgccatgtcctctcaacaaaatgtcatgggaacaactgaaatttcctctgccagaaacataccatcataccctgacacccaagcagtcaatgaatacctacggaaactgtcagatcattcagtaagagaggactcagagcatggtgaaaagccagtgccatctcaggtacctgctcaattttataaaataaaagtgtgtctagagttgaactgtatgggcttttctttagaaactttaaaatgagtaaggcttggtagcattttttattttttgagtttgattataattttgttttatcaggcaagcctagataaaggaaagaacctggattaattcaaaatcactctttatgtttgttctggccctttatgatattgaaaggtgtcatgttgggcttgttttataagtaggagcatttcatttttttttcttgctagtactttttttctatggctaaagtactgaattttggtgggccctgaatagtttaatataactagagattcacaaagattcttcttacttgtgtttgtaacactcttcagaattctgtagagaaaagtcttttccttctttaacagggaagattgttttgtggcagatccttcaattgtaggcagatttaaaacttacaggcaattacatgtttcagtttttttcaattatagctgtggtccttactgggcttaatttgaagaggtggctaatattttatctttttgtttgtttgtttttgagatggggtcttgctctgtcacccaggctggagtgcagtaatgcgattgtggctcactgcagcctcgatctcccaggttcaagcgatcctcccatttcagccttccaagtagctgggactatacacatgccaccacacctgctgattttatttttaagtagagtagagcctgttgcccaggctcatctcaaactcctgagctcaagcaatcctcccacctcagcctcccaaagtgttgagattacaggcatgagccatcatgcccagcctattttatatatcttattaaaactattttcattttgaagatttgtggtagaatgaacaaaagttgtttatcagtagcacatggtaaagtttgagttcccgcttaaactaaattgttttaaaaggattatttctgtgttttactcttagtgtggccttttgattttgctttaccaaaactgtaagaaaacaaaacaaaagatcatactcataaaagatctgtcctgcagtgtttctttttaggtttttgaaaccacatagcctcttgattctcaattcttattgtttactctgtcagaatgtgaacatgaaggtatttttagaaatagtctttatttcacaatctattcactgaaacttgtgggtatttgaatttttaaaaaaatcaaggataagctgtttggagaaaggtattataaagtctgaacaaagcaaaagtagtagtttaacaagaatgcatgtagaaaattcttagactgtacatgcttatcacattttacttactttgttaaacattggaagtttttgttacttatgctagtaacaatgtgtgtgtttctattgaattaaatttaatttatttaaa

SEQ ID NO: 1028 - DNA, 768 bp, Homo sapiens
  source 1..768: mol_type = unassigned DNA
gaatcagctgatcccgcggacccactgggttgccaagctcgcgccggatgcggagcgcggtgctgccggtggagcttcaggtcttgatagactttctgtaaagaaggaatgatttggtgatggagtgttcccactgaccgatggactcaaagaagagaagctcaacagaggcagaaggatccaaggaaagaggcctggtccatatctggcaggcaggatcctttcccataacaccagagagattgccaggctggggaggaaagactgttttgcaggcagccctcggagtgaaacatggagttcttctgactgaaggcatgaatagcaattcacaatgcatattataaaatctatggtgaggtctacagctttgggactcttccctggagaagtggaccagtggagatttgtccaagtagccccattctagaaaatgccctggttgggcaatatgttattactgtggcaacaggaagcttccatagtggagcagtgacagacaatggtgtcgcgtacatgtggggagagaattctgctggccagtgtgcagtagccaaccagcagtatgtgccggaaccaaatcctgtcagcattgctgattctgaggccagccctttgttagcagtcaggattttacagttggcgtgtggcgaggagcacactctggcattgtcaataagcagagagatttgggcatggggtaccggttgtcagttgggtctcattaccactgccttcccagtgacaaagccgcaaaaggtagaacat

SEQ ID NO: 1029 - DNA, 571 bp, Homo sapiens
  source 1..571: mol_type = unassigned DNA
aagctcgcgccggatgcggagcgcggtgctgccggtggagcttcagcttatgtcttgatgtttgcctgcatgtagctgaactgattgatccaggtcttgatagactttctgtaaagaaggaatgatttggtgatggagtgttcccactgaccgatggactcaaagaagagaagctcaacagaggcagaaggatccaaggaaagaggcctggtccatatctggcaggcaggatcctttcccataacaccagagagattgccaggctggggaggaaagactgttttgcaggcagccctcggagtgaaacatggagttcttctgactgaagatggtgaggtctacagctttgggactcttccctggagaagtggaccagtggagatttgtccaagtagccccattctagaaaatgccctggttgggcaatatgttattactgtggcaacaggaagcttccatagtggagcagtgacagacaatggtgtcgcgtacatgtggggagagaattctgctggccagtgtgcagtagccaaccagcagtatgtgccggaaccaaatcctgtcagcattg

SEQ ID NO: 1030 - DNA, 559 bp, Homo sapiens
  source 1..559: mol_type = unassigned DNA
agctgatcccgcggacccactgggttgccaagctcgcgccggatgcggagcgcggtgctgccggtggagcttcaggatggagaaggaactgactgctgtacccaagtgaagatctttactcagttacccttatatttggctatatggaataaaattgtgtgatatgtttattctgagcaggtcttgatagactttctgtaaagaaggaatgatttggtgatggagtgttcccactgaccgatggactcaaagaagagaagctcaacagaggcagaaggatccaaggaaagaggcctggtccatatctggcaggcaggatcctttcccataacaccagagagattgccaggctggggaggaaagactgttttgcaggcagccctcggagtgaaacatggagttcttctgactgaagatggtgaggtctacagctttgggactcttccctggagaagtggaccagtggagatttgtccaagtagccccattctagaaaatgccctggttgggcaatatgttattactgtggcaacaggaagcttccatagtggagcagtga

SEQ ID NO: 1031 - DNA, 491 bp, Homo sapiens
  source 1..491: mol_type = unassigned DNA
ggatgcggagcgcggtgctgccggtggagcttcaggtcttgatagactttctgtaaagaaggaatgatttggtgatggagtgttcccactgaccgatggactcaaagaagagaagctcaacagaggcagaaggatccaaggaaagaggcctggtccatatctggcaggcaggatcctttcccataacaccagagagattgccaggctggggaggaaagactgttttgcaggcagccctcggagtgaaacatggagttcttctgactgaaggaactaaaggaagacaaattctaggaaacaaggattaaatctggtcctggtggttgtatgggataaacatggatttctttctagtttgtcttatatcagttttattataatattattcttcaggactttaaaaacaatcttactttaaaagtgtgaactatattcaatacctgtcctatgagatttaaaatatatagttctcaagcaaatataagtggaat

SEQ ID NO: 1032 - DNA, 1769 bp, Homo sapiens
  source 1..1769: mol_type = unassigned DNA
caagagcctcctgatctagcagccaagactccccctgacctttggccatgtaccccaaccctctcatctactgcacctgctgggacccctggaacttgggaccacggaagctaatcaagacccctcaactaccacgcaagaactccacagggagttccaagctaactcctcttgtaccagctccaaaaaatcacaattacctccaaccaacaaaacctgttgtttccccaaaaatgaaaatccattcagcaaggcaagaagagactaataaatcattttatgaagtgatcaacgtgtcacctggctatcaacttgttcggaatcgggaacagatttctgtcaccttaggggatgagatgtttgataggaaaaagcggtgggaatcggagatcccggacaaaggcagattttccaggaccaacatcatttctgacctagaagagcaaatctcagagctgacagcaataattgaacaaatgaacagagaccaccagtctgcccagaaattgctctccagtgaaatggatctccgctgtgctgagatgaaacagaactttgaaaacaagaacagggagctcaaagaggcccatgaagcagaactcagtgagttggagaacaactacaaagcagccttgaaggcagagaagttggctgcccaagagaagctagaggagatgggaaaagaatacaagtatttgaagaatatgtttcgtacgtatcaggacagtatttatgatgaaatggaagagaagtggtcaaaacagaaggcgaaatggaagaaggatgagaagttcgagcgagaaaatatcctgctacagcaaaaaaaaaagatgaccaaaaaattcgaaatggagtcaggagaagaagataagaaaataaatgaatcctgcagtgctgtctttgagaacttcattcaagagaaggaggagctcttgaaacaacatcaaagtgacaccttgcaattagaagagctgagaaaaaccaaagaggtgccctggagaagagaccaaataaatagacattggcatgatgtcctgcaacagcttcttcttatgcaggtcatgcaggaagaattgcatgcacaagcccttatcctagagtcactgaacacaaacctctactatacccagttggaactccagaaagagaaagctatagtgggaaatctggagaaaatgcttcaaaccaagtttgctgaaactgaagaaaagtataagcacaccatacagatcctgacggaagagaacattcatctgaagcaaaagataatttctaagaatgaagaaatttgtgaaggatgttctgggagattggcctctattactgtttctaaggatgattctgacactgtgcaagatggtagcaagaaaggacaagaatcataaacaaaaagttgctctgcattgttgaagatggttggcacaccatttctgtaggcccaggaaactcctgggagggttttcttgagaaaatgcatataatgagtttagttcttgggttgctctgactctctgaatgtctgaaaatgtttgaattcgcatctgaatttcacagcttatcacggactcttcactgaaaaatgatgctctccatactgggagctgagctttctctgagttttgtactatttttcttctaccttgacgtatttcgttagaaagaaactgatttgaaggccttcttcatattgaacttttactatatttgggaggtgtacctttgtcccctggggcatttaggtagcaaaaaaagatgatgtgttgatttta

SEQ ID NO: 1033 - DNA, 782 bp, Homo sapiens
  source 1..782: mol_type = unassigned DNA
acagtatttatgatgaaatggaagagaagtggtcaaaacagaaggcgaaatggaagaaggatgagaagttcgagcgagaaaatatcctgctacagcaaaaaaaaaagatgaccaaaaaattcgaaatggagtcaggagaagaagataagaaaataaatgaatcctgcagtgctgtctttgagaacttcattcaagagaaggaggagctcttgaaacaacatcaaagtgacaccttgcaattagaagagctgagaaaaaccaaagaggtcatgcaggaagaattgcatgcacaagcccttatcctagagtcactgaacacaaacctctactatacccagttggaactccagaaagaggcaaaagataatttctaagaatgaagaaatttgtgaaggatgttctgggagattggcctctattactgtttctaaggatgattctgacactgtgcaagatggtagcaagaaaggacaagaatcataaacaaaaagttgctctgcattgttgaagatggttggcacaccatttctgtaggcccaggaaactcctgggagggttttcttgagaaaatgcatataatgagtttagttcttgggttgctctgactctctgaatgtctgaaaatgtttgaattcgcatctgaatttcacagcttatcacggactcttcactgaaaaatgatgctctccatactgggagctgagctttctctgagttttgtactatttttcttctaccttgacgtatttcgttagaaagaaactgatttgaaggccttcttc

SEQ ID NO: 1034 - DNA, 2075 bp, Homo sapiens
  source 1..2075: mol_type = unassigned DNA
aactcaggcccaagtcacaggaatctgaatggtggggtgaccttctcctctagtttaatttcattgcaatactgagaaacttcaactgttttgtctttagaagggaaattcatgtttgtgccaggccagcctttgtaaaagcctttgattggattcactagaagtctgtcttcccgcagtacatatactgtgaattttctccttcggcatttcaaccacttggaatggccactaaagtggcttttgatctaaagtaaactctgattctgtgttgatggggaaccatttctctctaacatggtggtttctttaagatgtttgacttgggccacatgagaataacagatctttgggcagtccaagcaagagcctcctgatctagcagccaagactccccctgacctttggccatgtaccccaaccctctcatctactgcacctgctgggacccctggaacttgggaccacggaagctaatcaagacccctcaactaccacgcaagaactccacagggagttccaagctaactcctcttgtaccagctccaaaaaatcacaattacctccaaccaacaaaacctgttgtttccccaaaaatgaaaatccattcagcaaggcaagaagagactaataaatcattttatgtgagtaaaggcaggagagggcggtgggactaaaatttattgagtgcctactatgtgcaagcatgggccctttacatttttatacttaccttgtcgaatcttcacaaagatcctgggaggaggtgctgttaatattgcacattatgcacggcaggaagtgatcaacgtgtcacctggctatcaacttgttcggaatcgggaacagatttctgtcaccttaggggatgagatgtttgataggaaaaagcggtgggaatcggagatcccggacaaaggcagattttccaggaccaacatcatttctgacctagaagagcaaatctcagagctgacagcaataattgaacaaatgaacagagaccaccagtctgcccagaaattgggagctcaaagaggcccatgaagcagaactcagtgagttggagaacaactacaaagcagccttgaaggcagagaagttggctgcccaagagaagctagaggagatgggaaaagaatacaagtatttgaagaatatgtttcgtacgtatcaggacagtatttatgatgaaatggaagagaagtggtcaaaacagaaggcgaaatggaagaaggatgagaagttcgagcgagaaaatatcctgctacagcaaaaaaaaaagatgaccaaaaaattcgaaatggagtcaggagaagaagataagaaaataaatgaatcctgcagtgctgtctttgagaacttcattcaagagaaggaggagctcttgaaacaacatcaaagtgacaccttgcaattagaagagctgagaaaaaccaaagagtccaggtgccctggagaagagaccaaataaatagacattggcatgatgtcctgcaacagcttcttcttatgcaggtcatgcaggaagaattgcatgcacaagcccttatcctagagtcactgaacacaaacctctactatacccagttggaactccagaaagagaaagctatagtgggaaatctggagaaaatgcttcaaaccaagtttgctgaaactgaagaaaagtataagcacaccatacagatcctgacggaagagaacattcatctgaagcaaaagataatttctaagaatgaagaaatttgtgaaggatgttctgggagattggcctctattactgtttctaaggatgattctgacactgtgcaagatggtagcaagaaaggacaagaatcataaacaaaaagttgctctgcattgttgaagatggttggcacaccatttctgtaggcccaggaaactcctgggagggttttcttgagaaaatgcatataatgagtttagttcttgggttgctctgactctctgaatgtctgaaaatgtttgaattcgcatctgaatttcacagcttatcacggactcttcactgaaaaatgatgctctccatactgggagctgagctttctctg

SEQ ID NO: 1035 - DNA, 1943 bp, Homo sapiens
  source 1..1943: mol_type = unassigned DNA
ctttggcctgccatctcccaagggcaaacctcacaactcaggcccaagtcacaggaatctgaatggtggggtgaccttctcctctagtttaatttcattgcaatactgagaaacttcaactgttttgtctttagaagggaaattcatgtttgtgccaggccagcctttgtaaaagcctttgattggattcactagaagtctgtcttcccgcagtacatatactgtgaattttctccttcggcatttcaaccacttggaatggccactaaagtggcttttgatctaaagtaaactctgattctgtgttgatggggaaccatttctctctaacatggtggtttctttaagatgtttgacttgggccacatgagaataacagatctttgggcagtccaagcaagagcctcctgatctagcagccaagactccccctgacctttggccatgtaccccaaccctctcatctactgcacctgctgggacccctggaacttgggaccacggaagctaatcaagacccctcaactaccacgcaagaactccacagggagttccaagctaactcctcttgtaccagctccaaaaaatcacaattacctccaaccaacaaaacctgttgtttccccaaaaatgaaaatccattcagcaaggcaagaagagactaataaatcattttatgaagtgatcaacgtgtcacctggctatcaacttgttcggaatcgggaacagatttctgtcaccttaggggatgagatgtttgataggaaaaagcggtgggaatcggagatcccggacaaaggcagattttccaggaccaacatcatttctgacctagaagagcaaatctcagagctgacagcaataattgaacaaatgaacagagaccaccagtctgcccagaaattgctctccagtgaaatggatctccgctgtgctgagatgaaacagaactttgaaaacaagaacagggagctcaaagaggcccatgaagcagaactcagtgagttggagaacaactacaaagcagccttgaaggcagagaagttggctgcccaagagaagctagaggagatgggaaaagaatacaagtatttgaagaatatgtttcgtacgtatcaggacagtatttatgatgaaatggaagagaagtggtcaaaacagaaggcgaaatggaagaaggatgagaagttcgagcgagaaaatatcctgctacagcaaaaaaaaaagatgaccaaaaaattcgaaatggagtcaggagaagaagataagaaaataaatgaatcctgcagtgctgtctttgagaacttcattcaagagaaggaggagctcttgaaacaacatcaaagtgacaccttgcaattagaagagctgagaaaaaccaaagaggtcatgcaggaagaattgcatgcacaagcccttatcctagagtcactgaacacaaacctctactatacccagttggaactccagaaagagaaagctatagtgggaaatctggagaaaatgcttcaaaccaagtttgctgaaactgaagaaaagtataagcacaccatacagatcctgacggaagagaacattcatctgaagcaaaagataatttctaagaatgaagaaatttgtgaaggatgttctgggagattggcctctattactgtttctaaggatgattctgacactgtgcaagatggtagcaagaaaggacaagaatcataaacaaaaagttgctctgcattgttgaagatggttggcacaccatttctgtaggcccaggaaactcctgggagggttttcttgagaaaatgcatataatgagtttagttcttgggttgctctgactctctgaatgtctgaaaatgtttgaattcgcatctgaatttcacagcttatcacggactcttcactgaaaaatgatgctctccatactgggagctgagctttctctg

SEQ ID NO: 1036 - DNA, 1626 bp, Homo sapiens
  source 1..1626: mol_type = unassigned DNA
atagcaacaaaataaacaaactttggcctgccatctcccaagggcaaacctcacaactcaggcccaagtcacaggaatctgaatgcaagagcctcctgatctagcagccaagactccccctgacctttggccatgtaccccaaccctctcatctactgcacctgctgggacccctggaacttgggaccacggaagctaatcaagacccctcaactaccacgcaagaactccacagggagttccaagctaactcctcttgtaccagctccaaaaaatcacaattacctccaaccaacaaaacctgttgtttccccaaaaatgaaaatccattcagcaaggcaagaagagactaataaatcattttatgaagtgatcaacgtgtcacctggctatcaacttgttcggaatcgggaacagatttctgtcaccttaggggatgagatgtttgataggaaaaagcggtgggaatcggagatcccggacaaaggcagattttccaggaccaacatcatttctgacctagaagagcaaatctcagagctgacagcaataattgaacaaatgaacagagaccaccagtctgcccagaaattgctctccagtgaaatggatctccgctgtgctgagatgaaacagaactttgaaaacaagaacagggagctcaaagaggcccatgaagcagaactcagtgagttggagaacaactacaaagcagccttgaaggcagagaagttggctgcccaagagaagctagaggagatgggaaaagaatacaagtatttgaagaatatgtttcgtacgtatcaggacagtatttatgatgaaatggaagagaagtggtcaaaacagaaggcgaaatggaagaaggatgagaagttcgagcgagaaaatatcctgctacagcaaaaaaaaaagatgaccaaaaaattcgaaatggagtcaggagaagaagataagaaaataaatgaatcctgcagtgctgtctttgagaacttcattcaagagaaggaggagctcttgaaacaacatcaaagtgacaccttgcaattagaagagctgagaaaaaccaaagaggtcatgcaggaagaattgcatgcacaagcccttatcctagagtcactgaacacaaacctctactatacccagttggaactccagaaagagaaagctatagtgggaaatctggagaaaatgcttcaaaccaagtttgctgaaactgaagaaaagtataagcacaccatacagatcctgacggaagagaacattcatctgaagcaaaagataatttctaagaatgaagaaatttgtgaaggatgttctgggagattggcctctattactgtttctaaggatgattctgacactgtgcaagatggtagcaagaaaggacaagaatcataaacaaaaagttgctctgcattgttgaagatggttggcacaccatttctgtaggcccaggaaactcctgggagggttttcttgagaaaatgcatataatgagtttagttcttgggttgctctgactctctgaatgtctgaaaatgtttgaattcgcatctgaatttcacagcttatcacggactcttcactgaaaaatgatgctctccatactgggagctgagcttt

SEQ ID NO: 1037 - DNA, 394 bp, Homo sapiens
  source 1..394: mol_type = unassigned DNA
tatacccagttggaactccagaaagagaaagctatagtgggaaatctggagaaaatgcttcaaaccaagtttgctgaaactgaagaaaagtataagcacaccatacagatcctgacggaagagaacattcatctgaagtgcggctgctgctgaaaaagacatagcaaaagataatttctaagaatgaagaaatttgtgaaggatgttctgggagattggcctctattactgtttctaaggatgattctgacactgtgcaagatggtagcaagaaaggacaagaatcataaacaaaaagttgctctgcattgttgaagatggttggcacaccatttctgtaggcccaggaaactcctgggagggttttcttgagaaaatgcatataatgagttta

SEQ ID NO: 1038 - DNA, 430 bp, Homo sapiens
  source 1..430: mol_type = unassigned DNA
atgaaaatccattcagcaaggcaagaagagactaataaatcattttatgaagtgatcaacgtgtcacctggctatcaacttgttcggaatcgggaacagatttctgtcaccttaggggatgagatgtttgataggaaaaagcggtgggaatcggagatcccggacaaaggcagattttccagggagctcaaagaggcccatgaagcagaactcagtgagttggagaacaactacaaagcagccttgaaggcagagaagttggctgcccaagagaagctagaggagatgggaaaagaatacaagtatttgaagaatatgtttcgtacgtatcaggacagtatttatgatgaaatggaagagaagtggtcaaaacagaaggcgaaatggaagaaggatgagaagttcgagcgagaaaatatcctgctacagc

SEQ ID NO: 1039 - DNA, 721 bp, Homo sapiens
  source 1..721: mol_type = unassigned DNA
caagagcctcctgatctagcagccaagactccccctgacctttggccatgtaccccaaccctctcatctactgcacctgctgggacccctggaacttgggaccacggaagctaatcaagacccctcaactaccacgcaagaactccacagggagttccaagctaactcctcttgtaccagctccaaaaaatcacaattacctccaaccaacaaaacctgttgtttccccaaaaatgaaaatccattcagcaaggcaagaagagactaataaatcattttatgaagtgatcaacgtgtcacctggctatcaacttgttcggaatcgggaacagatttctgtcaccttaggggatgagatgtttgataggaaaaagcggtgggaatcggagatcccggacaaaggcagattttccaggaccaacatcatttctgacctagaagagcaaatctcagagctgacagcaataattgaacaaatgaacagagaccaccagtctgcccagaaattgctctccagtgaaatggatctccgctgtgctgagatgaaacagaactttgaaaacaagaacagaggagatgggaaaagaatacaagtatttgaagaatatgtttcgtacgtatcaggacagtatttatgatgaaatggaagagaagtggtcaaaacagaaggcgaaatggaagaaggatgagaagttcgagcgagaaaatatcctgctacagc

SEQ ID NO: 1040 - DNA, 458 bp, Homo sapiens
  source 1..458: mol_type = unassigned DNA
ctcagtagcttcatctatagtatcagcataacaataattgagcagttttacctggctcacagcaaggactcggctatggcaaattttattttattttaattattttgttttatttttatttgtatcttattttattttttgagacgaagtctcactcttcacccaggctggagtgcagtggcacaatctcagctcactgcaacctctgcctcccaggttcaagcaatcctcccacctcagcctcctgagtagctgggactatagcaagagcctcctgatctagcagccaagactccccctgacctttggccatgtaccccaaccctctcatctactgcacctgctgggacccctggaacttgggaccacggaagctaatcaagacccctcaactaccacgcaagaactccacagggagttccaagctaactcctcttgtaccagctccaaaaaatcac

SEQ ID NO: 1041 - DNA, 2013 bp, Homo sapiens
  source 1..2013: mol_type = unassigned DNA
ctttggcctgccatctcccaagggcaaacctcacaactcaggcccaagtcacaggaatctgaatggtggggtgaccttctcctctagtttaatttcattgcaatactgagaaacttcaactgttttgtctttagaagggaaattcatgtttgtgccaggccagcctttgtaaaagcctttgattggattcactagaagtctgtcttcccgcagtacatatactgtgaattttctccttcggcatttcaaccacttggaatggccactaaagtggcttttgatctaaagtaaactctgattctgtgttgatggggaaccatttctctctaacatggtggtttctttaagatgtttgacttgggccacatgagaataacagatctttgggcagtccaagcaagagcctcctgatctagcagccaagactccccctgacctttggccatgtaccccaaccctctcatctactgcacctgctgggacccctggaacttgggaccacggaagctaatcaagacccctcaactaccacgcaagaactccacagggagttccaagctaactcctcttgtaccagctccaaaaaatcacaattacctccaaccaacaaaacctgttgtttccccaaaaatgaaaatccattcagcaaggcaagaagagactaataaatcattttatgaagtgatcaacgtgtcacctggctatcaacttgttcggaatcgggaacagatttctgtcaccttaggggatgagatgtttgataggaaaaagcggtgggaatcggagatcccggacaaaggcagattttccaggaccaacatcatttctgacctagaagagcaaatctcagagctgacagcaataattgaacaaatgaacagagaccaccagtctgcccagaaattgctctccagtgaaatggatctccgctgtgctgagatgaaacagaactttgaaaacaagaacagggagctcaaagaggcccatgaagcagaactcagtgagttggagaacaactacaaagcagccttgaaggcagagaagttggctgcccaagagaagctagaggagatgggaaaagaatacaagtatttgaagaatatgtttcgtacgtatcaggacagtatttatgatgaaatggaagagaagtggtcaaaacagaaggcgaaatggaagaaggatgagaagttcgagcgagaaaatatcctgctacagcaaaaaaaaaagatgaccaaaaaattcgaaatggagtcaggagaagaagataagaaaataaatgaatcctgcagtgctgtctttgagaacttcattcaagagaaggaggagctcttgaaacaacatcaaagtgacaccttgcaattagaagagctgagaaaaaccaaagaggtgccctggagaagagaccaaataaatagacattggcatgatgtcctgcaacagcttcttcttatgcaggtcatgcaggaagaattgcatgcacaagcccttatcctagagtcactgaacacaaacctctactatacccagttggaactccagaaagagaaagctatagtgggaaatctggagaaaatgcttcaaaccaagtttgctgaaactgaagaaaagtataagcacaccatacagatcctgacggaagagaacattcatctgaagcaaaagataatttctaagaatgaagaaatttgtgaaggatgttctgggagattggcctctattactgtttctaaggatgattctgacactgtgcaagatggtagcaagaaaggacaagaatcataaacaaaaagttgctctgcattgttgaagatggttggcacaccatttctgtaggcccaggaaactcctgggagggttttcttgagaaaatgcatataatgagtttagttcttgggttgctctgactctctgaatgtctgaaaatgtttgaattcgcatctgaatttcacagcttatcacggactcttcactgaaaaatgatgctctccatactgggagctgagctttctctga

SEQ ID NO: 1042 - DNA, 583 bp, Homo sapiens
  source 1..583: mol_type = unassigned DNA
cttttttcatttttttcttcacttttctccagccttcctctctctctctccttccttcctccttgctttctttatatgccttatcttctgagaaggttgaccccagttccggcgatagacggacactaagccccccttgagtgactagaaaggcaggggacataggaacagttaggacataagggaagagtaaagagagggacccctgattttgatttcagggtgccctgtttgtctcatccaatatcctgaagacccaagatggagaccagctacttgtcccttccaaaaagcttccctggccttaatgtcagtgcttgtaggtgatctcagaaacctccctggtgaagaaaacctgaagacggggtcttgctctgttgcctggctggagtgcagtggtgctaacatgactcactgcacccttgacctcctggactcaagtgatcctcccacctcagcctcccaagtagctgggactccaagtgggtgccactacagccaaaccttcagacctgtagatgggctcttcttggacattctggagtccctgggggaaagggaagtctgaagctcagttggccac

SEQ ID NO: 1043 - DNA, 576 bp, Homo sapiens
  source 1..576: mol_type = unassigned DNA
cacagagaggaggacatcagcatggagagactgcagatcagtcccagcaaacctgtggaggccagttaaatgcctggagctcatcccctgccattcaaacggggtcttgctctgttgcctggctggagtgcagtggtgctaacatgactcactgcacccttgacctcctggactcaagtgatcctcccacctcagcctcccaagtagctgggactccaagtgggtgccactacagccactgagatgccgcggcagtttcccaagctgaacatctctgaagtggatgagcaagtccggctcctggcggagaaggtgtttgctaaagtgctccgagaagaggacagcaaagatgccctgtccctgttcactgtcccagaggactgccccatcgggcaaaaggaagccaaggagagggagctgcagaaggagctggcagagcagaagtctgtggagaccgcaaaaagaaagaaaagtttcaagatgattcggtcccagtccctgtctctgcaaatgccgccacagcaagattggaagggccccccggcagccagtccggccatgtctcccacaacccct

SEQ ID NO: 1044 - DNA, 256 bp, Homo sapiens
  source 1..256: mol_type = unassigned DNA
acctcagcctcccaagtagctgggactccaagtgggtgccactacagccatggtgtctttaactgagatatgaagatcacaagcagagaagcttccgagttcagggaggaaatccagagttcggatttgagcatgttaagtttgagatctccgttagacatccacgaaggtcagaaccttcagacctgtagatgggctcttcttggacattctggagtccctgggggaaagggaagtctgaagctcagttggccac

SEQ ID NO: 1045 - DNA, 201 bp, Homo sapiens
  source 1..201: mol_type = unassigned DNA
agagcctctctgcatgagataaggaaaggaatttatgtctgactttggagagattggatggagaagaaagaacagaggaaagagaagacagaaggaagacagaagaaccagaggagcataaccttcagacctgtagatgggctcttcttggacattctggagtccctgggggaaagggaagtctgaagctcagttggccac

SEQ ID NO: 1046 - DNA, 204 bp, Homo sapiens
  source 1..204: mol_type = unassigned DNA
ctttggtctagagcaagtgttggcgaactattctgtaaagggctagatagtaaatgtctgaggttcgtaggatcatatggtgtctgtcacaactactcgactctgccattgcagtggaaaagcagccaaggacaatggaaccttcagacctgtagatgggctcttcttggacattctggagtccctgggggaaagggaagtctg

SEQ ID NO: 1047 - DNA, 527 bp, Homo sapiens
  source 1..527: mol_type = unassigned DNA
gtggacggttggcgagggagtgtgtgtgtgtgtgtgtgtgtgtgtgtgtgtgtgtatccaagtgaccagaaggacgcctggaagaaaccaatgcttgcgggttgctgcaactacagggagcaagtcacctgtgcggggccgagacccccagagtctcgcgctgggaaaagttgtgcggggaggggaggacgtcggctgagatgccgcggcagtttcccaagctgaacatctctgaagtggatgagcaagtccggctcctggcggagaaggtgtttgctaaagtgctccgagaagaggacagcaaagatgccctgtccctgttcactgtcccagaggactgccccatcgggcaaaaggaagccaaggagagggagctgcagaaggagctggcagagcagaagtctgtggagaccgcaaaaagatcactttggaggactatgagcaggcagccaagagtctggccaaggccctaatgatccgggagaagtatgcgcggctcgcctaccaccgcttcccgcggatcacat

SEQ ID NO: 1048 - DNA, 3806 bp, Homo sapiens
  source 1..3806: mol_type = unassigned DNA
tgctgctctcaagtttcccgttggcggcgcggcccgggcgcttcaggtagcctctcggctctctctgctccgctccgcgcccaggtagggcaccgacgggggctgcacgcggctggccggcttcctccctgctgaggcggccctccctcctcccgcggggccctcctggccggggatccgcagcgctgcgccctctgaacgcccggcccccgcgcctgctgcggggcgcggcctggccgggccctggccccggctggcctcagtgcccagcagccccgctccgctctgcccagcgcgtcccctttgctccagccctgcggccgtccctttcggccggcggcatggccctgtcgtccgaacccgctgagatgccgcggcagtttcccaagctgaacatctctgaagtggatgagcaagtccggctcctggcggagaaggtgtttgctaaagtgctccgagaagaggacagcaaagatgccctgtccctgttcactgtcccagaggactgccccatcgggcaaaaggaagccaaggagagggagctgcagaaggagctggcagagcagaagtctgtggagaccgcaaaaagaaagaaaagtttcaagatgattcggtcccagtccctgtctctgcaaatgccgccacagcaagattggaagggccccccggcagccagtccggccatgtctcccacaacccctgtggtcactggagccacttccctgcccacgccagcaccctatgccatgcctgagttccagcgggtcaccatcagcggagattactgtgccgggatcactttggaggactatgagcaggcagccaagagtctggccaaggccctaatgatccgggagaagtatgcgcggctcgcctaccaccgcttcccgcggatcacatcccagtacctgggtcatccgcgggcggatactgcacctccggaagagggccttccagacttccaccctcctccactgccccaggaagacccctactgcctggatgatgcaccccccaacctggattacttggtccacatgcaggggggcatcctctttgtgtatgataacaagaagatgctggagcaccaggagccgcacagcctaccctaccccgacctggagacctacacggtggacatgagccacatcctggctctcatcaccgatggccccacgaaaacctattgtcaccggcgactgaactttctggaatccaagttcagccttcatgagatgttaaacgaaatgtccgagttcaaagagttgaagagtaacccccaccgggacttctataacgtgagaaaggtggacacacacatccatgcggccgcctgcatgaaccaaaagcatctgctgcgcttcatcaagcacacataccagacggagcctgacaggactgtggcagagaagcggggccggaagatcaccctgcggcaggtgtttgacggcctgcacatggacccctacgacctcactgtggactcactggatgtccacgcgggccggcagacattccaccgctttgacaagttcaactccaaatacaaccctgtgggggccagtgagctgcgtgacctgtatttgaaaactgaaaactatctgggaggagagtactttgctcggatggtcaaggaggttgcccgggagctggaggagagcaagtaccagtactcagagccacggctctccatctacggccgcagtcctgaggagtggcccaacctggcctactggttcatccagcacaaggtctactctcccaacatgcgctggatcatccaggtgccccggatttatgacatatttaggtcaaagaagctgctgccaaactttgggaagatgctggagaacatcttcctgccccttttcaaggccactatcaacccccaagatcatcgagagcttcacctcttccttaaatatgtgacggggtttgacagcgtggatgatgagtccaagcacagcgaccacatgttttccgacaagagcccaaacccggacgtctggaccagtgagcagaacccaccctacagctactacctgtactacatgtatgccaacatcatggtgctcaacaacctccgcagggagcgcggcctgagcacgttcctgttccggccgcactgtggggaagccggctccatcacccacctggtgtctgccttcctcactgctgacaacatttcccacgggctgctcctcaagaagagtccggtattgcagtatctctactaccttgctcagatccccattgccatgtctcctcttagcaacaacagtttgttcctcgaatattccaagaaccctctgagggaattcctacacaagggactgcatgtttctctttccaccgatgaccccatgcagttccactacacgaaggaagcacttatggaagaatatgccattgcagctcaagtgtggaagctgagcacctgcgacctgtgtgagatcgccaggaacagcgtgctgcagagcggcctctcgcatcaggaaaagcaaaagtttctgggacaaaattattataaagaaggacctgaaggaaatgatattcgaaagacaaatgtggctcagatccggatggcattccgatatgagaccttatgcaatgagctcagcttcctgtctgatgctatgaaatcagaagagatcaccgccttgaccaactaggtccagcatttgacatgcattttaactttttggttcaatttcaagtctgctgtggctaatagtggtcaagattccgaactaggactttcctctgtgaagaggatgcctctgaagaaattttaaactggtgattttggttgcactgctcactttaagagttaacatgctcacttgttagtatttctgagtaacaagatggtgacttctccttggggatctgggagctgagcacttgtctatacttgttcctaattttccaagtatttctcttgaaactgccagtgcctgaactgttggggccaggattttccctggtcagatgccaagtaacatgtggttttctgccatacttttctccattggcccaggtaggctaattggtagttgttcatttcagcctctggatggctggctgccttaaacacaatcaatttcaaagctccatttcataaaggggctactttgaaggagttaagatggaagacttccttcttgacaaattgtgtttttagtgaatttcttaaaccgttttatttagccctccttccctctttctagttggaagccaaatgtactcatgaaaacagccactcctattctgagtcttggtttcttcacctagaaagtgagggtttggactagatgagtggctttcagggtgttctgtgaatctcctcatgaatactttagggtaggggagggaagggagtgagtgatgctcaggggctgtcaaagtgactgcgttcatcagttttacactggggctgctacataatattttcatttgaacgaagaacttcaaaaagcacaggactagatgatctctgttccttttggctctaatatgctacaactgtaggccaattatcactttaccaattaagagttaggccagataagtgaaatttaacttaagggcacacagctaataagtaataggcctaaactggatttccttattccaaatcctgtcttttccccactattccattagaccccacaaatgttagttgtgtgtgtgtgtgtgtgtgtttttaatcactgtaaccggatgcatttttttaaggcaaaatttctcccttatctactatgatgacttcagaagatacaatggtcccaggggccaagtagaaa

SEQ ID NO: 1049 - DNA, 980 bp, Homo sapiens
  source 1..980: mol_type = unassigned DNA
gttggcggcgcggcccgggcgcttcaggtagcctctcggctctctctgctccgctccgcgcccagaggattgctcctgtgggtcacttgaggcaggctccaccttccccaggaggagtggcagagtccagccagcgctcggagctggaggcccacgtgggagcagtgagcggctctgagatgccgcggcagtttcccaagctgaacatctctgaagtggatgagcaagtccggctcctggcggagaaggtgtttgctaaagtgctccgagaagaggacagcaaagatgccctgtccctgttcactgtcccagaggactgccccatcgggcaaaaggaagccaaggagagggagctgcagaaggagctggcagagcagaagtctgtggagaccgcaaaaagaaagaaaagtttcaagatgattcggtcccagtccctgtctctgcaaatgccgccacagcaagattggaagggccccccggcagccagtccggccatgtctcccacaacccctgtggtcactggagccacttccctgcccacgccagcaccctatgccatgcctgagttccagcgggtcaccatcagcggagattactgtgccgggatcactttggaggactatgagcaggcagccaagagtctggccaaggccctaatgatccgggagaagtatgcgcggctcgcctaccaccgcttcccgcggatcacatcccagtacctgggtcatccgcgggcggatactgcacctccggaagagggccttccagacttccaccctcctccactgccccaggaagacccctactgcctggatgatgcaccccccaacctggattacttggtccacatgcaggggggcatcctctttgtgtatgataacaagaagatgctggagcaccaggagccgcacagcctaccctaccccgacctggagacctacacggtggacatgagccacatcctggctctcatcaccgat

SEQ ID NO: 1050 - DNA, 2376 bp, Homo sapiens
  source 1..2376: mol_type = unassigned DNA
agtgcccagcagccccgctccgctctgcccagcgcgtcccctttgctccagccctgcggccgtccctttcggccggcggcatggccctgtcgtccgaacccgctgagatgccgcggcagtttcccaagctgaacatctctgaagtggatgagcaagtccggctcctggcggagaaggtgtttgctaaagtgctccgagaagaggacagcaaagatgccctgtccctgttcactgtcccagaggactgccccatcgggcaaaaggaagccaaggagagggagctgcagaaggagctggcagagcagaagtctgtggagaccgcaaaaagaaagaaaagtttcaagatgattcggtcccagtccctgtctctgcaaatgccgccacagcaagattggaagggccccccggcagccagtccggccatgtctcccacaacccctgtggtcactggagccacttccctgcccacgccagcaccctatgccatgcctgagttccagcgggtcaccatcagcggagattactgtgccgggatcactttggaggactatgagcaggcagccaagagtctggccaaggccctaatgatccgggagaagtatgcgcggctcgcctaccaccgcttcccgcggatcacatcccagtacctgggtcatccgcgggcggatactgcacctccggaagagggccttccaggggggcatcctctttgtgtatgataacaagaagatgctggagcaccaggagccgcacagcctaccctaccccgacctggagacctacacggtggacatgagccacatcctggctctcatcaccgatggccccacgaaaacctattgtcaccggcgactgaactttctggaatccaagttcagccttcatgagatgttaaacgaaatgtccgagttcaaagagttgaagagtaacccccaccgggacttctataacgtgagaaaggtggacacacacatccatgcggccgcctgcatgaaccaaaagcatctgctgcgcttcatcaagcacacataccagacggagcctgacaggactgtggcagagaagcggggccggaagatcaccctgcggcaggtgtttgacggcctgcacatggacccctacgacctcactgtggactcactggatgtccacgcgggccggcagacattccaccgctttgacaagttcaactccaaatacaaccctgtgggggccagtgagctgcgtgacctgtatttgaaaactgaaaactatctgggaggagagtactttgctcggatggtcaaggaggttgcccgggagctggaggagagcaagtaccagtactcagagccacggctctccatctacggccgcagtcctgaggagtggcccaacctggcctactggttcatccagcacaaggtctactctcccaacatgcgctggatcatccaggtgccccggatttaggcagcaggctgttggatccacctgacaagcgagtctttgctgtcccccagtgacatatttaggtcaaagaagctgctgccaaactttgggaagatgctggagaacatcttcctgccccttttcaaggccactatcaacccccaagatcatcgagagcttcacctcttccttaaatatgtgacggggtttgacagcgtggatgatgagtccaagcacagcgaccacatgttttccgacaagagcccaaacccggacgtctggaccagtgagcagaacccaccctacagctactacctgtactacatgtatgccaacatcatggtgctcaacaacctccgcagggagcgcggcctgagcacgttcctgttccggccgcactgtggggaagccggctccatcacccacctggtgtctgccttcctcactgctgacaacatttcccacgggctgctcctcaagaagagtccggtattgcagtatctctactaccttgctcagatccccattgccatgtctcctcttagcaacaacagtttgttcctcgaatattccaagaaccctctgagggaattcctacacaagggactgcatgtttctctttccaccgatgaccccatgcagttccactacacgaaggaagcacttatggaagaatatgccattgcagctcaagtgtggaagctgagcacctgcgacctgtgtgagatcgccaggaacagcgtgctgcagagcggcctctcgcatcaggaaaagcaaaagtttctgggacaaaattattataaagaaggacctgaaggaaatgatattcgaaagacaaatgtggctcagatccggatggcattccgatatgagaccttatgcaatgagctcagcttcctgtctgatgctatgaaatcagaagagatcaccgccttgaccaactag

SEQ ID NO: 1051 - DNA, 3680 bp, Homo sapiens
  source 1..3680: mol_type = unassigned DNA
tcaaccctgcttggttttagaggattgctcctgtgggtcacttgaggcaggctccaccttccccaggaggagtggcagagtccagccagcgctcggagctggaggcccacgtgggagcagtgagcggctctgagatgccgcggcagtttcccaagctgaacatctctgaagtggatgagcaagtccggctcctggcggagaaggtgtttgctaaagtgctccgagaagaggacagcaaagatgccctgtccctgttcactgtcccagaggactgccccatcgggcaaaaggaagccaaggagagggagctgcagaaggagctggcagagcagaagtctgtggagaccgcaaaaagaaagaaaagtttcaagatgattcggtcccagtccctgtctctgcaaatgccgccacagcaagattggaagggccccccggcagccagtccggccatgtctcccacaacccctgtggtcactggagccacttccctgcccacgccagcaccctatgccatgcctgagttccagcgggtcaccatcagcggagattactgtgccgggatcactttggaggactatgagcaggcagccaagagtctggccaaggccctaatgatccgggagaagtatgcgcggctcgcctaccaccgcttcccgcggatcacatcccagtacctgggtcatccgcgggcggatactgcacctccggaagagggccttccagacttccaccctcctccactgccccaggaagacccctactgcctggatgatgcaccccccaacctggattacttggtccacatgcaggggggcatcctctttgtgtatgataacaagaagatgctggagcaccaggagccgcacagcctaccctaccccgacctggagacctacacggtggacatgagccacatcctggctctcatcaccgatggccccacgaaaacctattgtcaccggcgactgaactttctggaatccaagttcagccttcatgagatgttaaacgaaatgtccgagttcaaagagttgaagagtaacccccaccgggacttctataacgtgagaaaggtggacacacacatccatgcggccgcctgcatgaaccaaaagcatctgctgcgcttcatcaagcacacataccagacggagcctgacaggactgtggcagagaagcggggccggaagatcaccctgcggcaggtgtttgacggcctgcacatggacccctacgacctcactgtggactcactggatgtccacgcgggccggcagacattccaccgctttgacaagttcaactccaaatacaaccctgtgggggccagtgagctgcgtgacctgtatttgaaaactgaaaactatctgggaggagagtactttgctcggatggtcaaggaggttgcccgggagctggaggagagcaagtaccagtactcagagccacggctctccatctacggccgcagtcctgaggagtggcccaacctggcctactggttcatccagcacaaggtctactctcccaacatgcgctggatcatccaggtgccccggatttatgacatatttaggtcaaagaagctgctgccaaactttgggaagatgctggagaacatcttcctgccccttttcaaggccactatcaacccccaagatcatcgagagcttcacctcttccttaaatatgtgacggggtttgacagcgtggatgatgagtccaagcacagcgaccacatgttttccgacaagagcccaaacccggacgtctggaccagtgagcagaacccaccctacagctactacctgtactacatgtatgccaacatcatggtgctcaacaacctccgcagggagcgcggcctgagcacgttcctgttccggccgcactgtggggaagccggctccatcacccacctggtgtctgccttcctcactgctgacaacatttcccacgggctgctcctcaagaagagtccggtattgcagtatctctactaccttgctcagatccccattgccatgtctcctcttagcaacaacagtttgttcctcgaatattccaagaaccctctgagggaattcctacacaagggactgcatgtttctctttccaccgatgaccccatgcagttccactacacgaaggaagcacttatggaagaatatgccattgcagctcaagtgtggaagctgagcacctgcgacctgtgtgagatcgccaggaacagcgtgctgcagagcggcctctcgcatcaggaaaagcaaaagtttctgggacaaaattattataaagaaggacctgaaggaaatgatattcgaaagacaaatgtggctcagatccggatggcattccgatatgagaccttatgcaatgagctcagcttcctgtctgatgctatgaaatcagaagagatcaccgccttgaccaactaggtccagcatttgacatgcattttaactttttggttcaatttcaagtctgctgtggctaatagtggtcaagattccgaactaggactttcctctgtgaagaggatgcctctgaagaaattttaaactggtgattttggttgcactgctcactttaagagttaacatgctcacttgttagtatttctgagtaacaagatggtgacttctccttggggatctgggagctgagcacttgtctatacttgttcctaattttccaagtatttctcttgaaactgccagtgcctgaactgttggggccaggattttccctggtcagatgccaagtaacatgtggttttctgccatacttttctccattggcccaggtaggctaattggtagttgttcatttcagcctctggatggctggctgccttaaacacaatcaatttcaaagctccatttcataaaggggctactttgaaggagttaagatggaagacttccttcttgacaaattgtgtttttagtgaatttcttaaaccgttttatttagccctccttccctctttctagttggaagccaaatgtactcatgaaaacagccactcctattctgagtcttggtttcttcacctagaaagtgagggtttggactagatgagtggctttcagggtgttctgtgaatctcctcatgaatactttagggtaggggagggaagggagtgagtgatgctcaggggctgtcaaagtgactgcgttcatcagttttacactggggctgctacataatattttcatttgaacgaagaacttcaaaaagcacaggactagatgatctctgttccttttggctctaatatgctacaactgtaggccaattatcactttaccaattaagagttaggccagataagtgaaatttaacttaagggcacacagctaataagtaataggcctaaactggatttccttattccaaatcctgtcttttccccactattccattagaccccacaaatgttagttgtgtgtgtgtgtgtgtgtgtttttaatcactgtaaccggatgcatttttttaaggcaaaatttctcccttatctactatgatgacttcagaagatacaatggtcccaggggccaagtagaaagcatttttaaagattaatctgaattaagctttatcagtgtactctttatctgtgttactagtgcctggtatgtagtaggtgctcaataaatgcatattgaataactaa

SEQ ID NO: 1052 - DNA, 2248 bp, Homo sapiens
  source 1..2248: mol_type = unassigned DNA
agcgctcggagctggaggcccacgtgggagcagtgagcggctctgagatgccgcggcagtttcccaagctgaacatctctgaagtggatgagcaagtccggctcctggcggagaaggtgtttgctaaagtgctccgagaagaggacagcaaagatgccctgtccctgttcactgtcccagaggactgccccatcgggcaaaaggaagccaaggagagggagctgcagaaggagctggcagagcagaagtctgtggagaccgcaaaaagaaagaaaagtttcaagatgattcggtcccagtccctgtctctgcaaatgccgccacagcaagattggaagggccccccggcagccagtccggccatgtctcccacaacccctgtggtcactggagccacttccctgcccacgccagcaccctatgccatgcctgagttccagcgggtcaccatcagcggagattactgtgccgggatcactttggaggactatgagcaggcagccaagagtctggccaaggccctaatgatccgggagaagtatgcgcggctcgcctaccaccgcttcccgcggatcacatcccagtacctgggtcatccgcgggcggatactgcacctccggaagagggccttccagacttccaccctcctccactgccccaggaagacccctactgcctggatgatgcaccccccaacctggattacttggtccacatgcaggggggcatcctctttgtgtatgataacaagaagatgctggagcaccaggagccgcacagcctaccctaccccgacctggagacctacacggtggacatgagccacatcctggctctcatcaccgatggccccacgaaaacctattgtcaccggcgactgaactttctggaatccaagttcagccttcatgagatgttaaacgaaatgtccgagttcaaagagttgaagagtaacccccaccgggacttctataacgtgagaaaggtggacacacacatccatgcggccgcctgcatgaaccaaaagcatctgctgcgcttcatcaagcacacataccagacggagcctgacaggactgtggcagagaagcggggccggaagatcaccctgcggcaggtgtttgacggcctgcacatggacccctacgacctcactgtggactcactggatgtccacgcgggccggcagacattccaccgctttgacaagttcaactccaaatacaaccctgtgggggccagtgagctgcgtgacctgtatttgaaaactgaaaactatctgggaggagagtactttgctcggatggtcaaggaggttgcccgggagctggaggagagcaagtaccagtactcagagccacggctctccatctacggccgcagtcctgaggagtggcccaacctggcctactggttcatccagcacaaggtctactctcccaacatgcgctggatcatccaggtgccccggatttatgacatatttaggtcaaagaagctgctgccaaactttgggaagatgctggagaacatcttcctgccccttttcaaggccactatcaacccccaagatcatcgagagcttcacctcttccttaaatatgtgacggggtttgacagcgtggatgatgagtccaagcacagcgaccacatgttttccgacaagagcccaaacccggacgtctggaccagtgagcagaacccaccctacagctactacctgtactacatgtatgccaacatcatggtgctcaacaacctccgcagggagcgcggcctgagcacgttcctgttccggccgcactgtggggaagccggctccatcacccacctggtgtctgccttcctcactgctgacaacatttcccacgggctgctcctcaagaagagtccggtattgcagtatctctactaccttgctcagatccccattgccatgtctcctcttagcaacaacagtttgttcctcgaatattccaagaaccctctgagggaattcctacacaagggactgcatgtttctctttccaccgatgaccccatgcagttccactacacgaagctcaagtgtggaagctgagcacctgcgacctgtgtgagatcgccaggaacagcgtgctgcagagcggcctctcgcatcaggaaaagcaaaagtttctgggacaaaattattataaagaaggacctgaaggaaatgatattcgaaagacaaatgtggctcagatccggatggcattccgatatgag

SEQ ID NO: 1053 - DNA, 2753 bp, Homo sapiens
  source 1..2753: mol_type = unassigned DNA
attcacgagagaatttccagcccaggcttttcctgctctggctcactgctgctcacagatatgcaaaacagagacctcctactccagccggcagacaggacccagccagctgcacgcacgcactgactcagctgagcctcctgggtggcaggcagcacctcacccgggtgcatcacttgagtggcatcttcaggaccagtcatggagccaggctcagctgagatgccgcggcagtttcccaagctgaacatctctgaagtggatgagcaagtccggctcctggcggagaaggtgtttgctaaagtgctccgagaagaggacagcaaagatgccctgtccctgttcactgtcccagaggactgccccatcgggcaaaaggaagccaaggagagggagctgcagaaggagctggcagagcagaagtctgtggagaccgcaaaaagaaagaaaagtttcaagatgattcggtcccagtccctgtctctgcaaatgccgccacagcaagattggaagggccccccggcagccagtccggccatgtctcccacaacccctgtggtcactggagccacttccctgcccacgccagcaccctatgccatgcctgagttccagcgggtcaccatcagcggagattactgtgccgggatcactttggaggactatgagcaggcagccaagagtctggccaaggccctaatgatccgggagaagtatgcgcggctcgcctaccaccgcttcccgcggatcacatcccagtacctgggtcatccgcgggcggatactgcacctccggaagagggccttccagacttccaccctcctccactgccccaggaagacccctactgcctggatgatgcaccccccaacctggattacttggtccacatgcaggggggcatcctctttgtgtatgataacaagaagatgctggagcaccaggagccgcacagcctaccctaccccgacctggagacctacacggtggacatgagccacatcctggctctcatcaccgatggccccacgaaaacctattgtcaccggcgactgaactttctggaatccaagttcagccttcatgagatgttaaacgaaatgtccgagttcaaagagttgaagagtaacccccaccgggacttctataacgtgagaaaggtggacacacacatccatgcggccgcctgcatgaaccaaaagcatctgctgcgcttcatcaagcacacataccagacggagcctgacaggactgtggcagagaagcggggccggaagatcaccctgcggcaggtgtttgacggcctgcacatggacccctacgacctcactgtggactcactggatgtccacgcgggccggcagacattccaccgctttgacaagttcaactccaaatacaaccctgtgggggccagtgagctgcgtgacctgtatttgaaaactgaaaactatctgggaggagagtactttgctcggatggtcaaggaggttgcccgggagctggaggagagcaagtaccagtactcagagccacggctctccatctacggccgcagtcctgaggagtggcccaacctggcctactggttcatccagcacaaggtctactctcccaacatgcgctggatcatccaggtgccccggatttatgacatatttaggtcaaagaagctgctgccaaactttgggaagatgctggagaacatcttcctgccccttttcaaggccactatcaacccccaagatcatcgagagcttcacctcttccttaaatatgtgacggggtttgacagcgtggatgatgagtccaagcacagcgaccacatgttttccgacaagagcccaaacccggacgtctggaccagtgagcagaacccaccctacagctactacctgtactacatgtatgccaacatcatggtgctcaacaacctccgcagggagcgcggcctgagcacgttcctgttccggccgcactgtggggaagccggctccatcacccacctggtgtctgccttcctcactgctgacaacatttcccacgggctgctcctcaagaagagtccggtattgcagtatctctactaccttgctcagatccccattgccatgtctcctcttagcaacaacagtttgttcctcgaatattccaagaaccctctgagggaattcctacacaagggactgcatgtttctctttccaccgatgaccccatgcagttccactacacgaaggaagcacttatggaagaatatgccattgcagctcaagtgtggaagctgagcacctgcgacctgtgtgagatcgccaggaacagcgtgctgcagagcggcctctcgcatcaggaaaagcaaaagtttctgggacaaaattattataaagaaggacctgaaggaaatgatattcgaaagacaaatgtggctcagatccggatggcattccgatatgagaccttatgcaatgagctcagcttcctgtctgatgctatgaaatcagaagagatcaccgccttgaccaactaggtccagcatttgacatgcattttaactttttggttcaatttcaagtctgctgtggctaatagtggtcaagattccgaactaggactttcctctgtgaagaggatgcctctgaagaaattttaaactggtgattttggttgcactgctcactttaagagttaacatgctcacttgttagtatttctgagtaacaagatggtgacttctccttggggatctgggagctg

SEQ ID NO: 1054 - DNA, 3156 bp, Homo sapiens
  source 1..3156: mol_type = unassigned DNA
atagtctggaggagggagagctgaactctctcttgtcccttctcaaacatgggaacaaagtcaggagggcagggctgccaggtgctgcagattccctgagtttgggaaaatggaagcccacctagttgaacagttcattctttgaattttgaacacttgctttctcctgacacctaagtggccctacatgcttcacatccagttacttattgagctaattttgaaattggcatgctgggtttggtctggggcattcctaagtagacagctgaccccaagtaccagctgagatgccgcggcagtttcccaagctgaacatctctgaagtggatgagcaagtccggctcctggcggagaaggtgtttgctaaagtgctccgagaagaggacagcaaagatgccctgtccctgttcactgtcccagaggactgccccatcgggcaaaaggaagccaaggagagggagctgcagaaggagctggcagagcagaagtctgtggagaccgcaaaaagaaagaaaagtttcaagatgattcggtcccagtccctgtctctgcaaatgccgccacagcaagattggaagggccccccggcagccagtccggccatgtctcccacaacccctgtggtcactggagccacttccctgcccacgccagcaccctatgccatgcctgagttccagcgggtcaccatcagcggagattactgtgccgggatcactttggaggactatgagcaggcagccaagagtctggccaaggccctaatgatccgggagaagtatgcgcggctcgcctaccaccgcttcccgcggatcacatcccagtacctgggtcatccgcgggcggatactgcacctccggaagagggccttccagacttccaccctcctccactgccccaggaagacccctactgcctggatgatgcaccccccaacctggattacttggtccacatgcaggggggcatcctctttgtgtatgataacaagaagatgctggagcaccaggagccgcacagcctaccctaccccgacctggagacctacacggtggacatgagccacatcctggctctcatcaccgatggccccacgaaaacctattgtcaccggcgactgaactttctggaatccaagttcagccttcatgagatgttaaacgaaatgtccgagttcaaagagttgaagagtaacccccaccgggacttctataacgtgagaaaggtggacacacacatccatgcggccgcctgcatgaaccaaaagcatctgctgcgcttcatcaagcacacataccagacggagcctgacaggactgtggcagagaagcggggccggaagatcaccctgcggcaggtgtttgacggcctgcacatggacccctacgacctcactgtggactcactggatgtccacgcgggccggcagacattccaccgctttgacaagttcaactccaaatacaaccctgtgggggccagtgagctgcgtgacctgtatttgaaaactgaaaactatctgggaggagagtactttgctcggatggtcaaggaggttgcccgggagctggaggagagcaagtaccagtactcagagccacggctctccatctacggccgcagtcctgaggagtggcccaacctggcctactggttcatccagcacaaggtctactctcccaacatgcgctggatcatccaggtgccccggatttatgacatatttaggtcaaagaagctgctgccaaactttgggaagatgctggagaacatcttcctgccccttttcaaggccactatcaacccccaagatcatcgagagcttcacctcttccttaaatatgtgacggggtttgacagcgtggatgatgagtccaagcacagcgaccacatgttttccgacaagagcccaaacccggacgtctggaccagtgagcagaacccaccctacagctactacctgtactacatgtatgccaacatcatggtgctcaacaacctccgcagggagcgcggcctgagcacgttcctgttccggccgcactgtggggaagccggctccatcacccacctggtgtctgccttcctcactgctgacaacatttcccacgggctgctcctcaagaagagtccggtattgcagtatctctactaccttgctcagatccccattgccatgtctcctcttagcaacaacagtttgttcctcgaatattccaagaaccctctgagggaattcctacacaagggactgcatgtttctctttccaccgatgaccccatgcagttccactacacgaaggaagcacttatggaagaatatgccattgcagctcaagtgtggaagctgagcacctgcgacctgtgtgagatcgccaggaacagcgtgctgcagagcggcctctcgcatcaggaaaagcaaaagtttctgggacaaaattattataaagaaggacctgaaggaaatgatattcgaaagacaaatgtggctcagatccggatggcattccgatatgagaccttatgcaatgagctcagcttcctgtctgatgctatgaaatcagaagagatcaccgccttgaccaactaggtccagcatttgacatgcattttaactttttggttcaatttcaagtctgctgtggctaatagtggtcaagattccgaactaggactttcctctgtgaagaggatgcctctgaagaaattttaaactggtgattttggttgcactgctcactttaagagttaacatgctcacttgttagtatttctgagtaacaagatggtgacttctccttggggatctgggagctgagcacttgtctatacttgttcctaattttccaagtatttctcttgaaactgccagtgcctgaactgttggggccaggattttccctggtcagatgccaagtaacatgtggttttctgccatacttttctccattggcccaggtaggctaattggtagttgttcatttcagcctctggatggctggctgccttaaacacaatcaatttcaaagctccatttcataaaggggctactttgaaggagttaagatggaagacttccttcttgacaaattgtgtttttagtgaatttcttaaaccgttttatttagccctccttccctctttctagttgg

SEQ ID NO: 1055 - DNA, 545 bp, Homo sapiens
  source 1..545: mol_type = unassigned DNA
gtttgtacaagtagtttaggtgcaatgaaccactcttattggtcaaggagtggtgagaaccctcctgaaatctaggttcccagataccaggcaagggccaatcttgcaagcacatctttccaaggatggcagtctcaggcctgctgcatgaaccctttcctgcctgcctcccttctgcagatcactttggaggactatgagcaggcagccaagagtctggccaaggccctaatgatccgggagaagtatgcgcggctcgcctaccaccgcttcccgcggatcacatcccagtacctgggtcatccgcgggcggatactgcacctccggaagagggccttccagacttccaccctcctccactgccccaggaagacccctactgcctggatgatgcaccccccaacctggattacttggtccacatgcaggggggcatcctctttgtgtatgataacaagaagatgctggagcaccaggagccgcacagcctaccctaccccgacctggagacctacacggtggacatgagccacatcctggctct

SEQ ID NO: 1056 - DNA, 531 bp, Homo sapiens
  source 1..531: mol_type = unassigned DNA
gcggccgcctgcatgaaccaaaagcatctgctgcgcttcatcaagcacacataccagacggagcctgacaggactgtggcagagaagcggggccggaagatcaccctgcggcaggtgtttgacggcctgcacatggacccctacgacctcactgtggactcactggatgtccacgcggtgagtgagcttctgctccagtgccgccagcagacagcagccctggctggggactcagccccctggaaagccaccatgattgtgcttgccgggaggtgctacggaagcagctttctcttctatctgactgagaggtcatgcggcctcagagaataacagggccggcagacattccaccgctttgacaagttcaactccaaatacaaccctgtgggggccagtgagctgcgtgacctgtatttgaaaactgaaaactatctgggaggagagtactttgctcggatggtcaaggaggttgcccgggagctggaggagagcaagtaccagtactcagagccacggctctccatctac

SEQ ID NO: 1057 - DNA, 717 bp, Homo sapiens
  source 1..717: mol_type = unassigned DNA
acgcattttgcacccgaggctgtgggagatgcagtgatggagtcttgctctgtcacccaggctggtgcgatctcggctcactgcaacctccacctccggggttcaagtgattcttctgccttagcctcctgagtagctgagattacaggtgacggggtttgacagcgtggatgatgagtccaagcacagcgaccacatgttttccgacaagagcccaaacccggacgtctggaccagtgagcagaacccaccctacagctactacctgtactacatgtatgccaacatcatggtgctcaacaacctccgcagggagcgcggcctgagcacgttcctgttccggccgcactgtggggaagccggctccatcacccacctggtgtctgccttcctcactgctgacaacatttcccacgggctgctcctcaagaagagtccggtattgcagtatctctactaccttgctcagatccccattgccatgtctcctcttagcaacaacagtttgttcctcgaatattccaagaaccctctgagggaattcctacacaagggactgcatgtttctctttccaccgatgaccccatgcagttccactacacgaaggaagcacttatggaagaatatgccattgcagctcaagtgtggaagctgagcacctgcgacctgtgtgagatcgccaggaacagcgtgctgcagagcggcctctcgcatca

SEQ ID NO: 1058 - DNA, 593 bp, Homo sapiens
  source 1..593: mol_type = unassigned DNA
ccaccctacagctactacctgtactacatgtatgccaacatcatggtgctcaacaacctccgcagggagcgcggcctgagcacgttcctgttccggccgcactgtggggaagccggctccatcacccacctggtgtctgccttcctcactgctgacaacatttcccacgggctgctcctcaagaagcaacaacagtttgttcctcgaatattccaagaaccctctgagggaattcctacacaagggactgcatgtttctctttccaccgatgaccccatgcagttccactacacgaaggaagcacttatggaagaatatgccattgcagctcaagtgtggaagctgagcacctgcgacctgtgtgagatcgccaggaacagcgtgctgcagagcggcctctcgcatcaggaaaagcaaaagtttctgggacaaaattattataaagaaggacctgaaggaaatgatattcgaaagacaaatgtggctcagatccggatggcattccgatatgagaccttatgcaatgagctcagcttcctgtctgatgctatgaaatcagaagagatcaccgccttgaccaactaggtccagc

SEQ ID NO: 1059 - DNA, 3994 bp, Homo sapiens
  source 1..3994: mol_type = unassigned DNA
gtggacggttggcgagggagtgtgtgtgtgtgtgtgtgtgtgtgtgtgtgtgtgtatccaagtgaccagaaggacgcctggaagaaaccaatgcttgcgggttgctgcaactacagggagcaagtcacctgtgcggggccgagacccccagagtctcgcgctgggaaaagttgtgcggggaggggaggacgtcggctgagatgccgcggcagtttcccaagctgaacatctctgaagtggatgagcaagtccggctcctggcggagaaggtgtttgctaaagtgctccgagaagaggacagcaaagatgccctgtccctgttcactgtcccagaggactgccccatcgggcaaaaggaagccaaggagagggagctgcagaaggagctggcagagcagaagtctgtggagaccgcaaaaagatcactttggaggactatgagcaggcagccaagagtctggccaaggccctaatgatccgggagaagtatgcgcggctcgcctaccaccgcttcccgcggatcacatcccagtacctgggtcatccgcgggcggatactgcacctccggaagagggccttccagacttccaccctcctccactgccccaggaagacccctactgcctggatgatgcaccccccaacctggattacttggtccacatgcaggggggcatcctctttgtgtatgataacaagaagatgctggagcaccaggagccgcacagcctaccctaccccgacctggagacctacacggtggacatgagccacatcctggctctcatcaccgatggccccacgaaaacctattgtcaccggcgactgaactttctggaatccaagttcagccttcatgagatgttaaacgaaatgtccgagttcaaagagttgaagagtaacccccaccgggacttctataacgtgagaaaggtggacacacacatccatgcggccgcctgcatgaaccaaaagcatctgctgcgcttcatcaagcacacataccagacggagcctgacaggactgtggcagagaagcggggccggaagatcaccctgcggcaggtgtttgacggcctgcacatggacccctacgacctcactgtggactcactggatgtccacgcgggccggcagacattccaccgctttgacaagttcaactccaaatacaaccctgtgggggccagtgagctgcgtgacctgtatttgaaaactgaaaactatctgggaggagagtactttgctcggatggtcaaggaggttgcccgggagctggaggagagcaagtaccagtactcagagccacggctctccatctacggccgcagtcctgaggagtggcccaacctggcctactggttcatccagcacaaggtctactctcccaacatgcgctggatcatccaggtgccccggatttatgacatatttaggtcaaagaagctgctgccaaactttgggaagatgctggagaacatcttcctgccccttttcaaggccactatcaacccccaagatcatcgagagcttcacctcttccttaaatatgtgacggggtttgacagcgtggatgatgagtccaagcacagcgaccacatgttttccgacaagagcccaaacccggacgtctggaccagtgagcagaacccaccctacagctactacctgtactacatgtatgccaacatcatggtgctcaacaacctccgcagggagcgcggcctgagcacgttcctgttccggccgcactgtggggaagccggctccatcacccacctggtgtctgccttcctcactgctgacaacatttcccacgggctgctcctcaagaagagtccggtattgcagtatctctactaccttgctcagatccccattgccatgtctcctcttagcaacaacagtttgttcctcgaatattccaagaaccctctgagggaattcctacacaagggactgcatgtttctctttccaccgatgaccccatgcagttccactacacgaaggaagcacttatggaagaatatgccattgcagctcaagtgtggaagctgagcacctgcgacctgtgtgagatcgccaggaacagcgtgctgcagagcggcctctcgcatcaggaaaagcaaaagtttctgggacaaaattattataaagaaggacctgaaggaaatgatattcgaaagacaaatgtggctcagatccggatggcattccgatatgagaccttatgcaatgagctcagcttcctgtctgatgctatgaaatcagaagagatcaccgccttgaccaactaggtccagcatttgacatgcattttaactttttggttcaatttcaagtctgctgtggctaatagtggtcaagattccgaactaggactttcctctgtgaagaggatgcctctgaagaaattttaaactggtgattttggttgcactgctcactttaagagttaacatgctcacttgttagtatttctgagtaacaagatggtgacttctccttggggatctgggagctgagcacttgtctatacttgttcctaattttccaagtatttctcttgaaactgccagtgcctgaactgttggggccaggattttccctggtcagatgccaagtaacatgtggttttctgccatacttttctccattggcccaggtaggctaattggtagttgttcatttcagcctctggatggctggctgccttaaacacaatcaatttcaaagctccatttcataaaggggctactttgaaggagttaagatggaagacttccttcttgacaaattgtgtttttagtgaatttcttaaaccgttttatttagccctccttccctctttctagttggaagccaaatgtactcatgaaaacagccactcctattctgagtcttggtttcttcacctagaaagtgagggtttggactagatgagtggctttcagggtgttctgtgaatctcctcatgaatactttagggtaggggagggaagggagtgagtgatgctcaggggctgtcaaagtgactgcgttcatcagttttacactggggctgctacataatattttcatttgaacgaagaacttcaaaaagcacaggactagatgatctctgttccttttggctctaatatgctacaactgtaggccaattatcactttaccaattaagagttaggccagataagtgaaatttaacttaagggcacacagctaataagtaataggcctaaactggatttccttattccaaatcctgtcttttccccactattccattagaccccacaaatgttagttgtgtgtgtgtgtgtgtgtgtttttaatcactgtaaccggatgcatttttttaaggcaaaatttctcccttatctactatgatgacttcagaagatacaatggtcccaggggccaagtagaaagcatttttaaagattaatctgaattaagctttatcagtgtactctttatctgtgttactagtgcctggtatgtagtaggtgctcaataaatgcatattgaataactaagtgaatttcttttggcaactttttaaggacatgtgctcttagtacttaagaggctgctcaaggaccttcctatctatttctgtggtcaaattcagactacaggaggtctttttgaatcattatagttagaagaagaatccagtttctgcctgtgaacttatttgactttagattgtctcatcttgtgactttataatgcctgtcccctccactggtcaattcagcatatggaagtataaatgcagtctttttactaggcagatatatatgctatcttacagctaattatgaaattgaatgaaaatccattgttatcttagggattagttttgaaaagcccccgtttatatacatttgccctaacataggaagtattgtgtagtttctcattgtcattttatctgtatcaagtatctttttttaaattgttaaataaagtcagctaggactgtg

SEQ ID NO: 1060 - DNA, 5516 bp, Homo sapiens
  source 1..5516: mol_type = unassigned DNA
gattggtgctgtgacctgcggcagcacagccgcctgcgttgagcgcccacggtgggctggactttgcactaggtgctgacaggaccggcagaggtggccactgccctcgtccccagcctgcactcctgggcgaaggctgacgctgaacagggtgctgtgggcccagaagcgcccatgcctgagagcgtccaggaccaggcagagctgggccttaagggcccttggaccagtgtctgtctgcagggagcccccggtagccactcggatcagcccgagggaagattctggacgagaccgtggccgtcccccgggtggcccatggacagcagcaggggctcccaggagtggccaggccctgcccgcccaccatgctgcagtgtagacccgcacaggagttcagcttcgggccccgggccttgaaggacgctctggtctccactgacgcagccctgcagcagctgtatgtgtccgccttctcccctgccgagcggctcttcctggccgaggcctacaacccgcagaggacgctcttctgcaccctgctcatccgcacgggcttcgactggctcctgagccgacccgaggctcccgaggacttccagaccttccacgcctccctgcagcaccggaagccccgcctggctcggaagcacatctacctacagccgatagacctgagcgaggagccggtgggaagctccctgctgcaccagctgtgcagctgcacagaggccttcttcctgggcctgcgcgtcaagtgcctgccgtcggtggcagccgcgtccatccgctgctcctcgcggcccagccgggactctgacaggctccagctccacacagacggcatcctgtccttcttgaagaacaacaagccaggggacgcgctgtgtgtgctgggcctcacactgtctgacctgtacccccatgaggcctggagcttcaccttcagcaagttccttccagggcacgaagtgggcgtctgcagcttcgcccggttctcaggggaattcccgaagtcggggcccagcgcccctgatctggccctggtagaggcagcagcagacggccccgaggcccccctgcaggacaggggctgggccctgtgcttcagtgccctggggatggttcagtgctgcaaggtcacgtgccacgagctctgccaccttctgggcctggggaactgccgctggctccgctgcctcatgcagggtgcgctcagcctggacgaggccctgcggcggcccctggacctctgtcccatctgcctgaggaagctgcagcatgtcctgggtttcaggctcatcgagaggtaccagagactctacacctggactcaggcggtggtggggacgtggcccagccaggaggcgggggagccgtcagtgtgggaggacaccccgcctgccagcgccgactcgggcatgtgctgtgagagtgactcggagcccggcaccagtgtgtcggagcccctcacccctgatgccgggagtcacaccttcgcctcggggccagaggaagggctgagctacctggcagcctcagaggctccgctgccacctgggggccctgcggaggccatcaaggagcatgaacggtggctggccatgtgcatccaggccctgcagcgggaagtggcagaggaggacctggtgcaggtggacagagccgtggacgccctcgaccgctgggagatgttcacgggccagctcccggccaccaggcaggacccacccagcagcagggacagcgtggggctgcgcaaggtgctgggggacaagttctcctccctgaggaggaagctgagtgcccgaaaactcgccagagcagagtcggccccccgtccctgggatggggaagagagttagtacagcaggggctgccctacgtctccttccctaaggatgctggccagcactgtccagtagctgaggccactactgacctgccagggataaagaggaagggtctgcctgggtggtggctcaggcctgtcatcccatcactttgagaggccaggagtttgagaccagactgggcaacatggtgagactctgcctctacaaaagaaaaattaaaaaattagctggatgaagtggttcatgcctgtgttcccagctattcaggaggctgaggtgggaggattgcttgagcctaggaggtcgaggctgcagtgggatgtgatcataccactgtactgcagtctgggccacacagaaagactgtctccagaaaaaaaaaagttctttggagaagccacagaccacctgtcttcaggcgcctccttcaactcctgagtcccagccagccgctcccaggggcctgcacacatggagaggcctccctgatcctgggtgcttctcgtggagtacaagccggactgtgctgaggttgggacagagccccctcccctgcagaggcagaaggaagcagcgtgcgtcctgtctccttccaggctgtgggcctgcccttcagttatttatagctggagctggagaggctggctcagatgaggagtgaccccgggggcacacaggctccacactgccacccagcttccaaggctgagtctcctccctaacggggaagtgacggggttttgtctctatcatctcaggcgtcaaccacatgcacacacacactgtcacgttctgtggcgctaacagcatcctgatcctgacggacttcaccggggctctccaggcatctcttctgacaaacactgcaggaggtgagggtgtctgacgtgcactgagggcagaggcccccttattcctgaggcggctacagctcaccgtggggaagatcaactgtggtgatgtttttgggacagtttcttggcaaaggtggccgcgctgtcagtaccaagtagctggaggtggtgatcagatgatctgtctttcctttttttttcggtctagttctgtcagttgctgagagaggggtattattgccatggctgggcgtttgatctgtctccctttagttttgccggattttgcttcctgcactttgaagctcctttacgtccctgcacatttgattgttgtgtcttcctgaggaattgacccttttattgtcacacgtaccccctcagcctgtggtggagggtctctgggagagagacttccggttctgacagcggaatcccttcggagtgacgagggcggggtcacagctcgcgcaccctcatctggagagaggcaagaacagggcagcttggaccttttgtgggtgggtggctcacacggttatggagggcttctaagaaaaacaaaatacaaaactaaaactagaagggctatgcaggtgaggtgggctgaggcttccttgtgaatctgacattggtggaggccgactgaaggctcccggtcctggtcccactccgtgttgacttcagagaagcaaagatgcagctcagaagtagcattaggatcttcgtcccgttctcttttgcgtagcttcaaaaaggcgtaacagtgacctgggaggggagatgaagagctaggcctttcagaaagtgaccaatggaaggtgccggcagagcaccctgcagtaacagaaggtgaaagccggagcctggtggctgttgctgcaaacaaccacccaaaacttagtggcttaaaatcaccacagtctagctcatgaatctgtaacttgggcagagctcggtggagacggtttgcccctgtggctcgactggagtgttcgttcacacggctgccaagtggaatttggctgggaatctcaggccttggttcctgcccacgtgagactctccatggaggaggggcatcttcttaggaaggcagctgccataccgtgaggaaacccgacaaacagggcagccagagccagacagcaggctcctggtcccagtcccggaaaatgcaaagggacaagtatgtgttgatttcagagaagctcagatgtagcattaggaccttcatccatacccttctcttttgcatggcttctaaagggcatgacagtgacctgggaggtaactgtgccagaataaagaggggagacgaaaaaaagagggtcactttcagaaagggacctgggcttcctcacaatatggcggttgccctcctaaggtggacatcgggagggtcagatggaagctctgtggcctttcctaactcggcctcacgtcacagagcgtcacctttcctgcactccacggcggcagtgacaaggaccccaccccaggttcacggggaggggacgtggcagggaatgtgagacaacacaatattgctgtggccattcatgaacagtcagtcagccccactcggcgttcactgtggggatttggctggtgcacctgcgaggtggcctgacctgttttccgatttccttcatcttctgcaaaaggttaaccgctggagtgatgcgagattaaacagaggtgataaaaatagaatgcctggctcatgctgagggtgggagcccactggggttatgaccaaagcctcggcgctctctgtacccgtgtcctttgaccctcagctgtgatgtgtgtcccaaaaaagcgttttgaagtgggaaggagcaaaccactaaaaaaaactccttttatccgcagcgtttaccaacttgcagatgtcagtgaaattttttaagacagctgttagaaggactgttttgaaatgcaactttgaggaagagaaattggtttccctcctctcccccgtgttagccccaggttctgtctgtgctgtggtgaagagtgacttgggacagtcaccaggaaagacgcaaggcagaggagagagaatgagggctgccttctcgaggaaggtcacagctcacgaatctttctaaacttaagtgctgcagaagttgaactgagattaaatttagagatgatggtttccaagacacacagggccacggttctttcagtttttaaacacgtgcaaagtccactgaattgctttctcgtctcatctgtcagaagcccctgcattcacaaggatgggtcttccagcttgacgatgacctctcttcggagagcctcacccatcttggtaagccaagtcagcggggcctcatggagctaaaaatagtttcaggtcatgacagatgttatctgtattgctgtgtgtgcgatgagtctggggaagctaacacatgccttctgaagtggctagaatacacactcccacgtcacagccatgctatgatgaaggggtgagaagcagtgtcccctctgaggcaaatctctcttcaggcagccccgcagtcctcttccgaaatctcattcttttccctctcttcctccccaaaaagcccaaactcattgtcagagtggggagaggggagaagcagcatcctgactcctgtccatggtgtgaaccctgagggcacgggacagtgagtggagctctgccaccacccgtttccagagcatgggtgaggagggagggatgccgacctgttaatatttgcttcagacctttccccgatgaacgaaatctccaaaagccttaaacataaaatggcttagtcaa

SEQ ID NO: 1061 - DNA, 1862 bp, Homo sapiens
  source 1..1862: mol_type = unassigned DNA
gatcctcccggcccaggccgagctgcccacgctgctgcccggggctcggtgcccggcgcggcctctgccggctccggcgggcgcgggactgcgagggtgctgtgggcccagaagcgcccatgcctgagagcgtccaggaccaggcagagctgggccttaagggcccttggaccagtgtctgtctgcagggagcccccggtagccactcggatcagcccgagggaagattctggacgagaccgtggccgtcccccgggtggcccatggacagcagcaggggctcccaggagtggccaggccctgcccgcccaccatgctgcagtgtagacccgcacaggagttcagcttcgggccccgggccttgaaggacgctctggtctccactgacgcagccctgcagcagctgtatgtgtccgccttctcccctgccgagcggctcttcctggccgaggcctacaacccgcagaggacgctcttctgcaccctgctcatccgcacgggcttcgactggctcctgagccgacccgaggctcccgaggacttccagaccttccacgcctccctgcagcaccggaagccccgcctggctcggaagcacatctacctacagccgatagacctgagcgaggagccggtgggaagctccctgctgcaccagctgtgcagctgcacagaggccttcttcctgggcctgcgcgtcaagtgcctgccgtcggtggcagccgcgtccatccgctgctcctcgcggcccagccgggactctgacaggctccagctccacacagacggcatcctgtccttcttgaagaacaacaagccaggggacgcgctgtgtgtgctgggcctcacactgtctgacctgtacccccatgaggcctggagcttcaccttcagcaagttccttccagggcacggtcacgtgccacgagctctgccaccttctgggcctggggaactgccgctggctccgctgcctcatgcagggtgcgctcagcctggacgaggccctgcggcggcccctggacctctgtcccatctgcctgaggaagctgcagcatgtcctgggtttcaggctcatcgagaggtaccagagactctacacctggactcaggcggtggtggggacgtggcccagccaggaggcgggggagccgtcagtgtgggaggacaccccgcctgccagcgccgactcgggcatgtgctgtgagagtgactcggagcccggcaccagtgtgtcggagcccctcacccctgatgccgggagtcacaccttcgcctcggggccagaggaagggctgagctacctggcagcctcagaggctccgctgccacctgggggccctgcggaggccatcaaggagcatgaacggtggctggccatgtgcatccaggccctgcagcgggaagtggcagaggaggacctggtgcaggtggacagagccgtggacgccctcgaccgctgggagatgttcacgggccagctcccggccaccaggcaggacccacccagcagcagggacagcgtggggctgcgcaaggtgctgggggacaagttctcctccctgaggaggaagctgagtgcccgaaaactcgccagagcagagtcggccccccgtccctgggatggggaagagagttagtacagcaggggctgccctacgtctccttccctaaggatgctggccagcactgtccagtagctgaggccactactgacctgccagggataaagaggaagggtctgcctgggtggtggctcaggcctgtcatcccatcactttgagaggccaggagtttgagaccagactgggcaacatggtgagactctgcctctacaaaagaaaaattaaaaaattagctgg

SEQ ID NO: 1062 - DNA, 836 bp, Homo sapiens
  source 1..836: mol_type = unassigned DNA
ctctgcatttccctcctttcctgggtgaggctgatgctgctggcctggagtcctggcagctgatttctcactggtctcctggcctctacccttggtccttgtccatctgtcctcctgacctgtgatctggtgtgtgcatcccttcaggggctgccctgggagctccctgctgcctctccagcctcgacctgcacccttgtgtgctactctgccccagccaggctggcattttgcagccatgcagcctggctctgtgtcctgctgtctgccccagccaggctggcattttgcagccatgcagcctggctctgtgtcctgctgtctgccccagtcaggctggcattttgcagcgaggtggctcggctctgtgtgctgcctgctcagctgcagtgcctggcgctaaccctagaagtccctgtccctgacctgagcgaggagccggtgggaagctccctgctgcaccagctgtgcagctgcacagaggccttcttcctgggcctgcgcgtcaagtgcctgccgtcggtggcagccgcgtccatccgctgctcctcgcggcccagccgggactctgacaggctccagctccacacagacggcatcctgtccttcttgaagaacaacaagccaggggacgcgctgtgtgtgctgggcctcacactgtctgacctgtacccccatgaggcctggagcttcaccttcagcaagttccttccagggcacgaagtgggcgtctgcagcttcgcccggttctcaggggaattcccgaagtcggggcccagcgcccctgatctggccctggtagaggcagcagcagacggccccgaggcccccctgca

SEQ ID NO: 1063 - DNA, 583 bp, Homo sapiens
  source 1..583: mol_type = unassigned DNA
atatgcgattgtcactgctgtcctttcatctgtgcatgaatctttcctctgtgtccctcggtgtttgcccttttgaaaaagtcatgctttccatcccttttctaagcctgacgctctgcttgctgtcagggtaggtccacattggccttgttcacccagcaggccggtgtctgcgagtgattcccggggagagggtcccaggcgggcaggggcgtcgcagggctgacggtgctgctctcccaccagacctgagcgaggagccggtgggaagctccctgctgcaccagctgtgcagctgcacagaggccttcttcctgggcctgcgcgtcaagtgcctgccgtcggtggcagccgcgtccatccgctgctcctcgcggcccagccgggactctgacaggctccagctccacacagacggcatcctgtccttcttgaagaacaacaagccaggggacgcgctgtgtgtgctgggcctcacactgtctgacctgtacccccatgaggcctggagcttcaccttcagcaagttccttccagggcacgaagtgggcgtctgcagcttcgcccggttctcaggggaatt

SEQ ID NO: 1064 - DNA, 964 bp, Homo sapiens
  source 1..964: mol_type = unassigned DNA
ccctcggtgtttgcccttttgaaaaagtcatgctttccatcccttttctaagcctgacgctctgcttgctgtcaggacctgagcgaggagccggtgggaagctccctgctgcaccagctgtgcagctgcacagaggccttcttcctgggcctgcgcgtcaagtgcctgccgtcggtggcagccgcgtccatccgctgctcctcgcggcccagccgggactctgacaggctccagctccacacagacggcatcctgtccttcttgaagaacaacaagccaggggacgcgctgtgtgtgctgggcctcacactgtctgacctgtacccccatgaggcctggagcttcaccttcagcaagttccttccagggcacggtcacgtgccacgagctctgccaccttctgggcctggggaactgccgctggctccgctgcctcatgcagggtgcgctcagcctggacgaggccctgcggcggcccctggacctctgtcccatctgcctgaggaagctgcagcatgtcctgggtttcaggctcatcgagaggtaccaggtgagctgggtgaacccagtagcttcagccacagctgggaactgaagcagcatctgaagtccctctcattctcccagcgtgagccggcggaccctgaagggaacactgagactgaccacagctggacttgcgccgcctcgtcctcttagtgaatgaggtcctcagaggcttaagcacgcgttagttatccaaaatgcttctgttcaggtgaatgcacaaagcgttgaggtaggtcaactgcattttgtacggtggaaaagtaataagcagtttgctttttgtattataatgaaaatgaaaacctttccttaaaggaaaggaagcataatctcagaaatctgaatccagggaatcccaaataacccccccaaattttaatccttgacattcataatcacttggattaaaatctaa

SEQ ID NO: 1065 - DNA, 544 bp, Homo sapiens
  source 1..544: mol_type = unassigned DNA
gagccagggcctgtcagctggtctcatcagagctgaggctgccctcgaggtggggttctgtctgaatgcatctgagttttgctttatttctctgtaaactgtaggtgagctgggtgaacccagtagcttcagccacagctgggaactgaagcagcatctgaagtccctctcattctcccagcgtgagccggcggaccctgaagggaacactgagactgaccacagctggacttgcgccgcctcgtcctcttagtgaatgaggtcctcagaggcttaagcacgcgttagttatccaaaatgcttctgttcaggtgaatgcacaaagcgttgagcctcatttagggttagatacggtcatattaagttgatgggaaggagacagagccagcctgaatgtcctgggtgatgaggattgaagtcatggggtctaaaaaggttctggaagacgaagagtgggaacgacaaaccgagaggaggaaaatcatctgcaaataaagcctccattgctgatcccttctatctcagccacagcagctcaggagga

SEQ ID NO: 1066 - DNA, 4322 bp, Homo sapiens
  source 1..4322: mol_type = unassigned DNA
ttcctgtcaagtcatcttgtgaaaggctgcctgcttccagcttggcttggatgtgcaaccttaataaaactcactgaggtctgggagaaaatagcagatctgcagcagatagggtagaggaaagggtctagaatatgtacacgcagctgactcaggcaggctccatgctgaacggtcacacagagaggaaacaataaatctcagctactatgcaataaatatctcaagttttaacgaagaaaaacatcattgcagtgaaataaaaaattttaaaattttagaacaaagctaacaaatggctagttttctatgattcttcttcaaacgctttctttgagggggaaagagtcaaacaaacaagcagttttacctgaaataaagaactagttttagaggtcagaagaaaggagcaagttttgcgagaggcacggaaggagtgtgctggcagtacaatgacagttttcctttcctttgctttcctcgctgccattctgactcacatagggtgcagcaatcagcgccgaagtccagaaaacagtgggagaagatataaccggattcaacatgggcaatgtgcctacactttcattcttccagaacacgatggcaactgtcgtgagagtacgacagaccagtacaacacaaacgctctgcagagagatgctccacacgtggaaccggatttctcttcccagaaacttcaacatctggaacatgtgatggaaaattatactcagtggctgcaaaaacttgagaattacattgtggaaaacatgaagtcggagatggcccagatacagcagaatgcagttcagaaccacacggctaccatgctggagataggaaccagcctcctctctcagactgcagagcagaccagaaagctgacagatgttgagacccaggtactaaatcaaacttctcgacttgagatacagctgctggagaattcattatccacctacaagctagagaagcaacttcttcaacagacaaatgaaatcttgaagatccatgaaaaaaacagtttattagaacataaaatcttagaaatggaaggaaaacacaaggaagagttggacaccttaaaggaagagaaagagaaccttcaaggcttggttactcgtcaaacatatataatccaggagctggaaaagcaattaaacagagctaccaccaacaacagtgtccttcagaagcagcaactggagctgatggacacagtccacaaccttgtcaatctttgcactaaagaaggtgttttactaaagggaggaaaaagagaggaagagaaaccatttagagactgtgcagatgtatatcaagctggttttaataaaagtggaatctacactatttatattaataatatgccagaacccaaaaaggtgttttgcaatatggatgtcaatgggggaggttggactgtaatacaacatcgtgaagatggaagtctagatttccaaagaggctggaaggaatataaaatgggttttggaaatccctccggtgaatattggctggggaatgagtttatttttgccattaccagtcagaggcagtacatgctaagaattgagttaatggactgggaagggaaccgagcctattcacagtatgacagattccacataggaaatgaaaagcaaaactataggttgtatttaaaaggtcacactgggacagcaggaaaacagagcagcctgatcttacacggtgctgatttcagcactaaagatgctgataatgacaactgtatgtgcaaatgtgccctcatgttaacaggaggatggtggtttgatgcttgtggcccctccaatctaaatggaatgttctatactgcgggacaaaaccatggaaaactgaatgggataaagtggcactacttcaaagggcccagttactccttacgttccacaactatgatgattcgacctttagatttttgaaagcgcaatgtcagaagcgattatgaaagcaacaaagaaatccggagaagctgccaggtgagaaactgtttgaaaacttcagaagcaaacaatattgtctcccttccagcaataagtggtagttatgtgaagtcaccaaggttcttgaccgtgaatctggagccgtttgagttcacaagagtctctacttggggtgacagtgctcacgtggctcgactatagaaaactccactgactgtcgggctttaaaaagggaagaaactgctgagcttgctgtgcttcaaactactactggaccttattttggaactatggtagccagatgataaatatggttaatttcatgtaaaacagaaaaaaagagtgaaaaagagaatatacatgaagaatagaaacaagcctgccataatcctttggaaaagatgtattataccagtgaaaaggtgttatatctatgcaaacctactaacaaattatactgttgcacaattttgataaaaatttagaacagcattgtcctctgagttggttaaatgttaatggatttcagaagcctaattccagtatcatacttactagttgatttctgcttacccatcttcaaatgaaaattccatttttgtaagccataatgaactgtagtacatggacaataagtgtgtggtagaaacaaactccattactctgatttttgatacagttttcagaaaaagaaatgaacataatcaagtaaggatgtatgtggtgaaaacttaccacccccatactatggttttcatttactctaaaaactgattgaatgatatataaatatatttatagcctgagtaaagttaaaagaatgtaaaatatatcatcaagttcttaaaataatatacatgcatttaatatttcctttgatattatacaggaaagcaatattttggagtatgttaagttgaagtaaaagcaagtactctggagcagttcattttacagtatctacttgcatgtgtatacatacatgtaacttcattattttaaaaatatttttagaactccaatactcaccctgttatgtcttgctaatttaaattttgctaattaactgaaacatgcttaccagattcacactgttccagtgtctataaaagaaacactttgaagtctataaaaaataaaataattataaatatcattgtacatagcatgtttatatctgcaaaaaacctaatagctaattaatctggaatatgcaacattgtccttaattgatgcaaataacacaaatgctcaaagaaatctactatatcccttaatgaaatacatcattcttcatatatttctccttcagtccattcccttaggcaatttttaatttttaaaaattattatcaggggagaaaaattggcaaaactattatatgtaagggaaatatatacaaaaagaaaattaatcatagtcacctgactaagaaattctgactgctagttgccataaataactcaatggaaatattcctatgggataatgtattttaagtgaatttttggggtgcttgaagttactgcattattttatcaagaagtcttctctgcctgtaagtgtccaaggttatgacagtaaacagtttttattaaaacatgagtcactatgggatgagaaaattgaaataaagctactgggcctcctctcataaaagagacagttgttggcaaggtagcaataccagtttcaaacttggtgacttgatccactatgccttaatggtttcctccatttgagaaaataaagctattcacattgttaagaaaaatactttttaaagtttaccatcaagtcttttttatatttatgtgtctgtattctacccctttttgccttacaagtgatatttgcaggtattataccatttttctattcttggtggcttcttcatagcaggtaagcctctccttctaaaaacttctcaactgttttcatttaagggaaagaaaatgagtattttgtccttttgtgttcctacagacactttcttaaaccagtttttggataaagaatactatttccaaactcatattacaaaaacaaaataaaataataaaaaaagaaagcatgatatttactgttttgttgtctgggtttgagaaatgaaatattgtttccaattatttataataaatcagtataaaatgttttatgattgttatgtgtattatgtaatacgtacatgtttatggcaatttaacatgtgtattcttttaattgtttcagaataggataattaggtattcgaattttgtctttaaaattcatgtggtttctatgcaaagttcttcatatcatcacaacattatttgatttaaataaaattgaaagtaatatttgtgcaa

SEQ ID NO: 1067 - DNA, 4353 bp, Homo sapiens
  source 1..4353: mol_type = unassigned DNA
gccctaagccatcagcaatccttagtataggggcacactcatgcattcctgtcaagtcatcttgtgaaaggctgcctgcttccagcttggcttggatgtgcaaccttaataaaactcactgaggtctgggagaaaatagcagatctgcagcagatagggtagaggaaagggtctagaatatgtacacgcagctgactcaggcaggctccatgctgaacggtcacacagagaggaaacaataaatctcagctactatgcaataaatatctcaagttttaacgaagaaaaacatcattgcagtgaaataaaaaattttaaaattttagaacaaagctaacaaatggctagttttctatgattcttcttcaaacgctttctttgagggggaaagagtcaaacaaacaagcagttttacctgaaataaagaactagttttagaggtcagaagaaaggagcaagttttgcgagaggcacggaaggagtgtgctggcagtacaatgacagttttcctttcctttgctttcctcgctgccattctgactcacatagggtgcagcaatcagcgccgaagtccagaaaacagtgggagaagatataaccggattcaacatgggcaatgtgcctacactttcattcttccagaacacgatggcaactgtcgtgagagtacgacagaccagtacaacacaaacgctctgcagagagatgctccacacgtggaaccggatttctcttcccagaaacttcaacatctggaacatgtgatggaaaattatactcagtggctgcaaaaacttgagaattacattgtggaaaacatgaagtcggagatggcccagatacagcagaatgcagttcagaaccacacggctaccatgctggagataggaaccagcctcctctctcagactgcagagcagaccagaaagctgacagatgttgagacccaggtactaaatcaaacttctcgacttgagatacagctgctggagaattcattatccacctacaagctagagaagcaacttcttcaacagacaaatgaaatcttgaagatccatgaaaaaaacagtttattagaacataaaatcttagaaatggaaggaaaacacaaggaagagttggacaccttaaaggaagagaaagagaaccttcaaggcttggttactcgtcaaacatatataatccaggagctggaaaagcaattaaacagagctaccaccaacaacagtgtccttcagaagcagcaactggagctgatggacacagtccacaaccttgtcaatctttgcactaaagaagttttactaaagggaggaaaaagagaggaagagaaaccatttagagactgtgcagatgtatatcaagctggttttaataaaagtggaatctacactatttatattaataatatgccagaacccaaaaaggtgttttgcaatatggatgtcaatgggggaggttggactgtaatacaacatcgtgaagatggaagtctagatttccaaagaggctggaaggaatataaaatgggttttggaaatccctccggtgaatattggctggggaatgagtttatttttgccattaccagtcagaggcagtacatgctaagaattgagttaatggactgggaagggaaccgagcctattcacagtatgacagattccacataggaaatgaaaagcaaaactataggttgtatttaaaaggtcacactgggacagcaggaaaacagagcagcctgatcttacacggtgctgatttcagcactaaagatgctgataatgacaactgtatgtgcaaatgtgccctcatgttaacaggaggatggtggtttgatgcttgtggcccctccaatctaaatggaatgttctatactgcgggacaaaaccatggaaaactgaatgggataaagtggcactacttcaaagggcccagttactccttacgttccacaactatgatgattcgacctttagatttttgaaagcgcaatgtcagaagcgattatgaaagcaacaaagaaatccggagaagctgccaggtgagaaactgtttgaaaacttcagaagcaaacaatattgtctcccttccagcaataagtggtagttatgtgaagtcaccaaggttcttgaccgtgaatctggagccgtttgagttcacaagagtctctacttggggtgacagtgctcacgtggctcgactatagaaaactccactgactgtcgggctttaaaaagggaagaaactgctgagcttgctgtgcttcaaactactactggaccttattttggaactatggtagccagatgataaatatggttaatttcatgtaaaacagaaaaaaagagtgaaaaagagaatatacatgaagaatagaaacaagcctgccataatcctttggaaaagatgtattataccagtgaaaaggtgttatatctatgcaaacctactaacaaattatactgttgcacaattttgataaaaatttagaacagcattgtcctctgagttggttaaatgttaatggatttcagaagcctaattccagtatcatacttactagttgatttctgcttacccatcttcaaatgaaaattccatttttgtaagccataatgaactgtagtacatggacaataagtgtgtggtagaaacaaactccattactctgatttttgatacagttttcagaaaaagaaatgaacataatcaagtaaggatgtatgtggtgaaaacttaccacccccatactatggttttcatttactctaaaaactgattgaatgatatataaatatatttatagcctgagtaaagttaaaagaatgtaaaatatatcatcaagttcttaaaataatatacatgcatttaatatttcctttgatattatacaggaaagcaatattttggagtatgttaagttgaagtaaaagcaagtactctggagcagttcattttacagtatctacttgcatgtgtatacatacatgtaacttcattattttaaaaatatttttagaactccaatactcaccctgttatgtcttgctaatttaaattttgctaattaactgaaacatgcttaccagattcacactgttccagtgtctataaaagaaacactttgaagtctataaaaaataaaataattataaatatcattgtacatagcatgtttatatctgcaaaaaacctaatagctaattaatctggaatatgcaacattgtccttaattgatgcaaataacacaaatgctcaaagaaatctactatatcccttaatgaaatacatcattcttcatatatttctccttcagtccattcccttaggcaatttttaatttttaaaaattattatcaggggagaaaaattggcaaaactattatatgtaagggaaatatatacaaaaagaaaattaatcatagtcacctgactaagaaattctgactgctagttgccataaataactcaatggaaatattcctatgggataatgtattttaagtgaatttttggggtgcttgaagttactgcattattttatcaagaagtcttctctgcctgtaagtgtccaaggttatgacagtaaacagtttttattaaaacatgagtcactatgggatgagaaaattgaaataaagctactgggcctcctctcataaaagagacagttgttggcaaggtagcaataccagtttcaaacttggtgacttgatccactatgccttaatggtttcctccatttgagaaaataaagctattcacattgttaagaaaaatactttttaaagtttaccatcaagtcttttttatatttatgtgtctgtattctacccctttttgccttacaagtgatatttgcaggtattataccatttttctattcttggtggcttcttcatagcaggtaagcctctccttctaaaaacttctcaactgttttcatttaagggaaagaaaatgagtattttgtccttttgtgttcctacagacactttcttaaaccagtttttggataaagaatactatttccaaactcatattacaaaaacaaaataaaataataaaaaaagaaagcatgatatttactgttttgttgtctgggtttgagaaatgaaatattgtttccaattatttataataaatcagtataaaatgttttatgattgttatgtgtattatgtaatacgtacatgtttatggcaatttaacatgtgtattcttttaattgtttcagaataggataattaggtattcgaattttgtctttaaaattcatgtggtttctatgcaaagttcttcatatcatcacaacattatttgatttaaataaaattgaaagtaa

SEQ ID NO: 1068 - DNA, 1526 bp, Homo sapiens
  source 1..1526: mol_type = unassigned DNA
cggctaagtttttgtatttttagtagagacggggtttcaccatgtttgccaggatggtctcgatctcttgacctcgtgatccacccgccttggcctcccaaagtgctgggattacaggcgtgagccactgcgcccggcggtactaaatcaaacttctcgacttgagatacagctgctggagaattcattatccacctacaagctagagaagcaacttcttcaacagacaaatgaaatcttgaagatccatgaaaaaaacagtttattagaacataaaatcttagaaatggaaggaaaacacaaggaagagttggacaccttaaaggaagagaaagagaaccttcaaggcttggttactcgtcaaacatatataatccaggagctggaaaagcaattaaacagagctaccaccaacaacagtgtccttcagaagcagcaactggagctgatggacacagtccacaaccttgtcaatctttgcactaaagaaggtgttttactaaagggaggaaaaagagaggaagagaaaccatttagagactgtgcagatgtatatcaagctggttttaataaaagtggaatctacactatttatattaataatatgccagaacccaaaaaggtgttttgcaatatggatgtcaatgggggaggttggactgtaatacaacatcgtgaagatggaagtctagatttccaaagaggctggaaggaatataaaatgggttttggaaatccctccggtgaatattggctggggaatgagtttatttttgccattaccagtcagaggcagtacatgctaagaattgagttaatggactgggaagggaaccgagcctattcacagtatgacagattccacataggaaatgaaaagcaaaactataggttgtatttaaaaggtcacactgggacagcaggaaaacagagcagcctgatcttacacggtgctgatttcagcactaaagatgctgataatgacaactgtatgtgcaaatgtgccctcatgttaacaggaggatggtggtttgatgcttgtggcccctccaatctaaatggaatgttctatactgcgggacaaaaccatggaaaactgaatgggataaagtggcactacttcaaagggcccagttactccttacgttccacaactatgatgattcgacctttagatttttgaaagcgcaatgtcagaagcgattatgaaagcaacaaagaaatccggagaagctgccaggtgagaaactgtttgaaaacttcagaagcaaacaatattgtctcccttccagcaataagtggtagttatgtgaagtcaccaaggttcttgaccgtgaatctggagccgtttgagttcacaagagtctctacttggggtgacagtgctcacgtggctcgactatagaaaactccactgactgtcgggctttaaaaagggaagaaactgctgagcttgctgtgcttcaaactactactggaccttattttggaactatggtagccagatgataaatatggttaatttc

SEQ ID NO: 1069 - DNA, 1523 bp, Homo sapiens
  source 1..1523: mol_type = unassigned DNA
cggctaagtttttgtatttttagtagagacggggtttcaccatgtttgccaggatggtctcgatctcttgacctcgtgatccacccgccttggcctcccaaagtgctgggattacaggcgtgagccactgcgcccggcggtactaaatcaaacttctcgacttgagatacagctgctggagaattcattatccacctacaagctagagaagcaacttcttcaacagacaaatgaaatcttgaagatccatgaaaaaaacagtttattagaacataaaatcttagaaatggaaggaaaacacaaggaagagttggacaccttaaaggaagagaaagagaaccttcaaggcttggttactcgtcaaacatatataatccaggagctggaaaagcaattaaacagagctaccaccaacaacagtgtccttcagaagcagcaactggagctgatggacacagtccacaaccttgtcaatctttgcactaaagaagttttactaaagggaggaaaaagagaggaagagaaaccatttagagactgtgcagatgtatatcaagctggttttaataaaagtggaatctacactatttatattaataatatgccagaacccaaaaaggtgttttgcaatatggatgtcaatgggggaggttggactgtaatacaacatcgtgaagatggaagtctagatttccaaagaggctggaaggaatataaaatgggttttggaaatccctccggtgaatattggctggggaatgagtttatttttgccattaccagtcagaggcagtacatgctaagaattgagttaatggactgggaagggaaccgagcctattcacagtatgacagattccacataggaaatgaaaagcaaaactataggttgtatttaaaaggtcacactgggacagcaggaaaacagagcagcctgatcttacacggtgctgatttcagcactaaagatgctgataatgacaactgtatgtgcaaatgtgccctcatgttaacaggaggatggtggtttgatgcttgtggcccctccaatctaaatggaatgttctatactgcgggacaaaaccatggaaaactgaatgggataaagtggcactacttcaaagggcccagttactccttacgttccacaactatgatgattcgacctttagatttttgaaagcgcaatgtcagaagcgattatgaaagcaacaaagaaatccggagaagctgccaggtgagaaactgtttgaaaacttcagaagcaaacaatattgtctcccttccagcaataagtggtagttatgtgaagtcaccaaggttcttgaccgtgaatctggagccgtttgagttcacaagagtctctacttggggtgacagtgctcacgtggctcgactatagaaaactccactgactgtcgggctttaaaaagggaagaaactgctgagcttgctgtgcttcaaactactactggaccttattttggaactatggtagccagatgataaatatggttaatttc

SEQ ID NO: 1070 - DNA, 813 bp, Homo sapiens
  source 1..813: mol_type = unassigned DNA
agagctaccaccaacaacagtgtccttcagaagcagcaactggagctgatggacacagtccacaaccttgtcaatctttgcactaaagaaggtgttttgcaatatggatgtcaatgggggaggttggactgtaatacaacatcgtgaagatggaagtctagatttccaaagaggctggaaggaatataaaatggttgtatttaaaaggtcacactgggacagcaggaaaacagagcagcctgatcttacacggtgctgatttcagcactaaagatgctgataatgacaactgtatgtgcaaatgtgccctcatgttaacaggaggatggtggtttgatgcttgtggcccctccaatctaaatggaatgttctatactgcgggacaaaaccatggaaaactgaatgggataaagtggcactacttcaaagggcccagttactccttacgttccacaactatgatgattcgacctttagatttttgaaagcgcaatgtcagaagcgattatgaaagcaacaaagaaatccggagaagctgccaggtgagaaactgtttgaaaacttcagaagcaaacaatattgtctcccttccagcaataagtggtagttatgtgaagtcaccaaggttcttgaccgtgaatctggagccgtttgagttcacaagagtctctacttggggtgacagtgctcacgtggctcgactatagaaaactccactgactgtcgggctttaaaaagggaagaaactgctgagcttgctgtgcttcaaactactactggaccttattttggaactatggtagccagatgata

SEQ ID NO: 1071 - DNA, 1177 bp, Homo sapiens
  source 1..1177: mol_type = unassigned DNA
aaacagagctaccaccaacaacagtgtccttcagaagcagcaactggagctgatggacacagtccacaaccttgtcaatctttgcactaaagaagttttactaaagggaggaaaaagagaggaagagaaaccatttagagactgtgcagatgtatatcaagctggttttaataaaagtggaatctacactatttatattaataatatgccagaacccaaaaaggtgttttgcaatatggatgtcaatgggggaggttggactgtaatacaacatcgtgaagatggaagtctagatttccaaagaggctggaaggaatataaaatgggttttggaaatccctccggtgaatattggctggggaatgagtttatttttgccattaccagtcagaggcagtacatgctaagaattgagttaatggactgggaagggaaccgagcctattcacagtatgacagattccacataggaaatgaaaagcaaaactataggtaagtcatgctacagtgtagtgttcgactaccttttacctagccacttaataattgtagtgggaaaatatgaaaaaaagaaatgaaaatcatccttcaaaatgaaaattcttttttttttgtctagacctattacaaagaggtacaaaaaagcctgtaaagactttttcaaagatttaaatttcagttttcgtaggttgactatctttgatattggcttaaattttagggaatggtgaatgaagtcaagcatactgttgttctgtggttatcatgcagttgcagtgaattcatatatataaaactgataagtttcatactcaaactcattggcttaaataatctctttattctaaaaaaagattttctggttctactttttttgatgacctttcttgaattagcatttttcaaatgatcttgaagatgacaaaagtaaaatttttttatgtttgaatgatttacataaaagagaagatgaggcatgatttagagggttttcttggtaaatctaaaaagcaaaaataaattgtaataatggcatcaatatacataatacatgattgcagatgtaaaaatagataaactatacacttaatgatacatgtttccaattatcctttttcaatgagaagctcgtctactagggaaaaataaacacacaaaaatatggctaaggaaataa

SEQ ID NO: 1072 - DNA, 1936 bp, Homo sapiens
  source 1..1936: mol_type = unassigned DNA
gtcactattgaaacttggagatgtttgagtacctgacccatattttatttataataatacccccagttgtaagtgaaaactgatgcccaagaatggttgttgagtaaatcaaaaaataaatgaataaatgaagtagaattacggaaaataaaagtgtagctcgaggttatgttgactgagagcaggtgcagaaattaaaggaatagtggtggtggggactactgggacaggaatcaacatttcaaatgtacaatcttggaggtgagtcaattcctagggttaatgaagacatactgtatgtgtggctgttgtcaaagtagggcgagagccttgggaggagagttgtcctatttcatatgcccacaagtaggcatgtatatcttggacccttccactctgaggaagtacatggacaattcgctctttgaatgacatttcttgccactgcttttataccctttttgctacttgtgttccaaatgcaatgcctcagggaaaacacttgaggttttttctttaatcagggcttagctctgtgtcctcatagcctgcttgctgctgttgcatcatatcccacctttagccaagcttcaacatgctttagtattcagttgttgaggaaatagtgtttcccatagtccccgttgaataatcaagctgccacattcatgctacatcaattacagtgattgctctccgacgataatcccattacagatatgtttctcttcttgggtagaccctgggggaaatgagtcaatttctaaataaataccattgtattttgaataattaaaatatgcataagtctttgaaagatttgtataaattttccacatgggaaagaagttattgtcacagtcagaagagatacaatatgtcatgttctcctgttattgttcgtgactaaaatacaagcaaataatatattctacatatgctatgccacaaatgttgcctctaatgaaatattgactcaaggatatctactgtaacatgtacatatataagaattgataggcaatgaaatatgtgatagttaaagacattatattttaaaaattttttattcttattgtactcccatttcaatcaatttaaagttttaaaattctgagtcatgtgttttggcaatcaaatggtctgtaactttggaaatttggtagcatttccaaaactttgaacatactcaaatgcttattttcatttaaaacaaagattttttaaaatgttgtatagtctgagacaaagacttaattttcagctgactaaaatttgtgcatgtaatttattcatcattgatggaatttaatcagaaataactcaaatatgaatcagaggaagaaataaccaataatatatctaaattaacattgttcaatatagtaatttcggtttttgtaatctgcagacctgttcgccttattcctattttgaaacatgtaggatatatgttttttaaagtagaagtattttttacttgactttgttttccatttgtcaggtgttttgcaatatggatgtcaatgggggaggttggactgtaatacaacatcgtgaagatggaagtctagatttccaaagaggctggaaggaatataaaatgggttttggaaatccctccggtgaatattggctggggaatgagtttatttttgccattaccagtcagaggcagtacatgctaagaattgagttaatggactgggaagggaaccgagcctattcacagtatgacagattccacataggaaatgaaaagcaaaactataggtaagtcatgctacagtgtagtgttcgactaccttttacctagccacttaataattgtagtgggaaaatatgaaaaaaagaaatgaaaatcatccttcaaaatgaaaattcttttttttttgtctagacctattacaaagaggtacaaaaaagcctgtaaaga

SEQ ID NO: 1073 - DNA, 548 bp, Homo sapiens
  source 1..548: mol_type = unassigned DNA
tattacttctattttgattccaagtagttgccataggaagaagcaacaccctgcagaaactgaggctatcagtgtatgtaggtgaaattaatttatccatttatttggcaaaataattaatcaaagcatagtgattattatgcagctcatggcatcgctatcaggaaaggttttgaggcagaatagatgtgttatcaactctaaatgaagctatatgataattatgttaatccatcaccttccatgaagggaaacctccttcctcaacttttctggtcttgcaactgaacaggatgagaagcaaggcatgcaagggggcaaatgatttgtgggtcaccataaatactggaactgttatggcactgctttcttgatgtgatggatttaattcaaagaaatcaactttccataatcacttgtcgattaaaatgagcttgagaattacattgtggaaaacatgaagtcggagatggcccagatacagcagaatgcagttcagaaccacacggctaccatgctggagataggaaccagcctcctctctcaga

SEQ ID NO: 1074 - DNA, 2805 bp, Homo sapiens
  source 1..2805: mol_type = unassigned DNA
atatatagagttaagaagtctaggtctgcttccagaagaaaacagttccacgttgcttgaaattgaaaatcaagataaaaatgttcacaattaagctccttctttttattgttcctctagttatttcctccagaattgatcaagacaattcatcatttgattctctatctccagagccaaaatcaagatttgctatgttagacgatgtaaaaattttagccaatggcctccttcagttgggacatggtcttaaagactttgtccataagacgaagggccaaattaatgacatatttcaaaaactcaacatatttgatcagtctttttatgatctatcgctgcaaaccagtgaaatcaaagaagaagaaaaggaactgagaagaactacatataaactacaagtcaaaaatgaagaggtaaagaatatgtcacttgaactcaactcaaaacttgaaagcctcctagaagaaaaaattctacttcaacaaaaagtgaaatatttagaagagcaactaactaacttaattcaaaatcaacctgaaactccagaacacccagaagtaacttcacttaaaacttttgtagaaaaacaagataatagcatcaaagaccttctccagaccgtggaagaccaatataaacaattaaaccaacagcatagtcaaataaaagaaatagaaaatcagctcagaaggactagtattcaagaacccacagaaatttctctatcttccaagccaagagcaccaagaactactccctttcttcagttgaatgaaataagaaatgtaaaacatgatggcattcctgctgaatgtaccaccatttataacagaggtgaacatacaagtggcatgtatgccatcagacccagcaactctcaagtttttcatgtctactgtgatgttatatcaggtagtccatggacattaattcaacatcgaatagatggatcacaaaacttcaatgaaacgtgggagaactacaaatatggttttgggaggcttgatggagaattttggttgggcctagagaagatatactccatagtgaagcaatctaattatgttttacgaattgagttggaagactggaaagacaacaaacattatattgaatattctttttacttgggaaatcacgaaaccaactatacgctacatctagttgcgattactggcaatgtccccaatgcaatcccggaaaacaaagatttggtgttttctacttgggatcacaaagcaaaaggacacttcaactgtccagagggttattcaggaggctggtggtggcatgatgagtgtggagaaaacaacctaaatggtaaatataacaaaccaagagcaaaatctaagccagagaggagaagaggattatcttggaagtctcaaaatggaaggttatactctataaaatcaaccaaaatgttgatccatccaacagattcagaaagctttgaatgaactgaggcaaatttaaaaggcaataatttaaacattaacctcattccaagttaatgtggtctaataatctggtattaaatccttaagagaaagcttgagaaatagattttttttatcttaaagtcactgtctatttaagattaaacatacaatcacataaccttaaagaataccgtttacatttctcaatcaaaattcttataatactatttgttttaaattttgtgatgtgggaatcaattttagatggtcacaatctagattataatcaataggtgaacttattaaataacttttctaaataaaaaatttagagacttttattttaaaaggcatcatatgagctaatatcacaactttcccagtttaaaaaactagtactcttgttaaaactctaaacttgactaaatacagaggactggtaattgtacagttcttaaatgttgtagtattaatttcaaaactaaaaatcgtcagcacagagtatgtgtaaaaatctgtaatacaaatttttaaactgatgcttcattttgctacaaaataatttggagtaaatgtttgatatgatttatttatgaaacctaatgaagcagaattaaatactgtattaaaataagttcgctgtctttaaacaaatggagatgactactaagtcacattgactttaacatgaggtatcactataccttatttgttaaaatatatactgtatacattttatatattttaacacttaatactatgaaaacaaataattgtaaaggaatcttgtcagattacagtaagaatgaacatatttgtggcatcgagttaaagtttatatttcccctaaatatgctgtgattctaatacattcgtgtaggttttcaagtagaaataaacctcgtaacaagttactgaacgtttaaacagcctgacaagcatgtatatatgtttaaaattcaataaacaaagacccagtccctaaattatagaaatttaaattattcttgcatgtttatcgacatcacaacagatccctaaatccctaaatccctaaagattagatacaaattttttaccacagtatcacttgtcagaatttatttttaaatatgattttttaaaactgccagtaagaaattttaaattaaacccatttgttaaaggatatagtgcccaagttatatggtgacctacctttgtcaatacttagcattatgtatttcaaattatccaatatacatgtcatatatatttttatatgtcacatatataaaagatatgtatgatctatgtgaatcctaagtaaatattttgttccagaaaagtacaaaataataaaggtaaaaataatctataa

SEQ ID NO: 1075 - DNA, 373 bp, Homo sapiens
  source 1..373: mol_type = unassigned DNA
tgtatattcagtatcattttaaaaaacagatttatattcttttatcagctcagaaggactagtattcaagaacccacagaaatttctctatcttccaagccaagagcaccaagaactactccctttcttcagttgaatgaaataagaaatgtaaaacatgatggcattcctgctgaatgtaccaccatttataacagaggtgaacatacaagtggcatgtatgccatcagacccagcaactctcaagtttttcatgtctactgtgatgttatatcaggtagtccatggacattaattcaacatcgaatagatggatcacaaaacttcaatgaaacgtgggagaactacaaatatggttttgggaggcttgatg

SEQ ID NO: 1076 - DNA, 751 bp, Homo sapiens
  source 1..751: mol_type = unassigned DNA
ggatcacaaaacttcaatgaaacgtgggagaactacaaatatggttttgggaggcttgatggagaattttggttgggcctagagaagatatactccatagtgaagcaatctaattatgttttacgaattgagttggaagactggaaagacaacaaacattatattgaatattctttttacttgggaaatcacgaaaccaactatacgctacatctagttgcgattactggcaatgtccccaatgcaatcccggaaaacaaagatttggtgttttctacttgggatcacaaagcaaaaggacacttcaactgtccagagggttattcaggtatctttttctgataccaatactttattttcatatcttcaaagtatcttcccacattattagctattatctgcaatgacaacttttaaaaatccgaatcccaaataagcgttttctctctagacgaaaacctcttaactataatgaaagtgttcattctagttcaatcaggtattttacctctaatcttcctcagattttctattttttggtagtgtatagattatttatacagattatttaaaattgggacttatacagattatttaaaactgggatacatgcatctaaaacactgtaatatttataagaaaggaagataaacttacggggaaatacagtaacagtaactacatacgagtctgtacccattaaattgcatatctatctcctttaggaggctggtggtggcatgatgagtgt

SEQ ID NO: 1077 - DNA, 1591 bp, Homo sapiens
  source 1..1591: mol_type = unassigned DNA
ggtttccgccgagctggagcgcgcgggccacggcttctctggggacgcagaagcgagaagcggggacctcggcgcgcgccccgcgtcccgctcttcctgcccgcgccccggcccccggcccgcgccccggccgccggcatggtgctgctggccgggaccgggccggagggcggcggggcgcgctgcatgaccccaccaccgccgtccccaccccggggcgcgcaggtcgaggaggaccccgctgactacgaagagtttgaggacttctcgagtctgccagacacccgcagcatcgcctcggacgactctttctaccctttcgaggacgaggaggagcacggcgtcgagagcgcggagagcgtcccggagggcgtcccggaaagcgtcccggagacggcgaccctcctgcgcgccgcctgcgccaacaacgtggggctgctgcggacgctggtgcggcgcggggtgagcgtcgaggaggcgcaggagactgaccgcaacggcaggaccggccttattgtcgcctgctaccacggctttgtggataccgtggtggccttagcagagtgcccccacgttgacgtcaactggcaggacagcgaggggaacacagccctaatcacagctgcacaggcaggggctgcccctgtccccatgggcatagtttccttagacactggctcccaatcttgcgcctccggcgtcagcatcacctgggctggctcatgtgagcattaacacagatctggtggaaacacagactgccaggccctgcccctggagtctttctttgaataggcctggggtggggcccaagaatgagcagatcaacaggtttcctggtgaggctgatgccactggcccagggaccccacattgaggatggagagctttgaagattttatgcctgatgacggcaaaggacccctctcagtgggcactgaagaccagcagagtcacagaccccacgagagatgttgtcagacagacacagaggcatcacggaattaaagtgaaaatgaggaaggcaggtgagcatgtgttcatgactttcctgtgctgttttgccaaagaggctgtttaggcccaatcagggcacgctatcatcactaactacttgttgaactatttccctggtcttgaccttgaaaggaggaacgcgttcgggttcaccgccctgatgaaagccgccatgcagggtcgaacggactgcatccgagccctgatgctagcaggggcggatgtccacgcgagggacccccgccgtgggatgtcgccgcaggagtgggccacttacacgggccgcgtggatgccgtccgtctcatgcagaggctgctggagcgcccctgcccggagcagttctgggagaagtaccggcccgagctgccgccgccccctgaagcggcgcggaagcccgcgggctccaagaactgcctgcagaggctcacagactgcgtgctgtccgtgctgacgccgcgctccgtgcggggcccggaggacgggggcgtcctggaccacatggtccggatgaccacgagcctctacagccccgccgtggccatcgtgtgccagaccgtgtgccctgagagccct

SEQ ID NO: 1078 - DNA, 9188 bp, Homo sapiens
  source 1..9188: mol_type = unassigned DNA
atggtgctgctggccgggaccgggccggagggcggcggggcgcgctgcatgaccccaccaccgccgtccccaccccggggcgcgcaggtcgaggaggaccccgctgactacgaagagtttgaggacttctcgagtctgccagacacccgcagcatcgcctcggacgactctttctaccctttcgaggacgaggaggagcacggcgtcgagagcgcggagagcgtcccggagggcgtcccggaaagcgtcccggagacggcgaccctcctgcgcgccgcctgcgccaacaacgtggggctgctgcggacgctggtgcggcgcggggtgagcgtcgaggaggcgcaggagactgaccgcaacggcaggaccggccttattgtcgcctgctaccacggctttgtggataccgtggtggccttagcagagtgcccccacgttgacgtcaactggcaggacagcgaggggaacacagccctaatcacagctgcacaggcagggcacgctatcatcactaactacttgttgaactatttccctggtcttgaccttgaaaggaggaacgcgttcgggttcaccgccctgatgaaagccgccatgcagggtcgaacggactgcatccgagccctgatgctagcaggggcggatgtccacgcgagggacccccgccgtgggatgtcgccgcaggagtgggccacttacacgggccgcgtggatgccgtccgtctcatgcagaggctgctggagcgcccctgcccggagcagttctgggagaagtaccggcccgagctgccgccgccccctgaagcggcgcggaagcccgcgggctccaagaactgcctgcagaggctcacagactgcgtgctgtccgtgctgacgccgcgctccgtgcggggcccggaggacgggggcgtcctggaccacatggtccggatgaccacgagcctctacagccccgccgtggccatcgtgtgccagaccgtgtgccctgagagccctccgagcgtggggaagaggcggctggcggtgcaggagatcctggcggcgcgggctgcacggggcccccaggcgcaggaggaggatgaggtggggggcgcggggcagcgcgggcggaccggacaggaggacgcggactcccgggagggctccccgagagccggcctccctcccgccctggggtcccggggccccgcagcgcccgccccgcggaaggccagcctcctgcccctgcagcgcctgcggcggagaagcgtgcggcccggtgtggtggtgccccgggtccgagtcagcaaggcgcccgcgcccaccttccagcccgagcggccggcgcggaagggcagcaccaaggacagcggccacctgcagatccccaagtggcggtacaaggaggccaaggaggagaagaggaaggcagaggaggccgaaaagaagcgccaggccgaggcgcagaaggagaggcgcactgcgccctggaagaagaggacgtgagggcccgtgtgcctggcgctggggccggggctggggccggggcggggccgcagggctgggcgcggagaaggaggcggccccgttgcgcatcgcaccacttccgctccatggaccacggggctgcgcgcatttccaggctgtttgtccaggctgcttccaagagagggctgagggagccacatggattcgcttgtcgccagccctcctagcaatcagtacacctagcgggcacgttgcctaaaaggctccctttagagaacctcaattaagattttttttaaagatcaatttatcaaagggcgttttctccgtaattttgtatttttaatcattatttatcaaatttgcaacgttttacaagtgatagggccccttatatccaaggcagttttaatacacttgcctgaagaccttttgtttaagatactgtttctagcaataagtatccatgatacctgtatgagttcacacagacatcatgggattctcccctttttggctgtttggtcttttctcctcatcgtgggtgtaggtgcacactggatgttcttagtcattagattaagtgttgccggatatttctatttgacggaggcattggctcgttgagccacatgatcaagtgagacagaggatcagatgttactgtatctttttaaaactcttatccatatagtaatatattgaggaaaaacatattgtcaaattataaaacaatggagcgataaacatgtatttattgctagaattaaactcattttaagcaaggggttttaggtaaactggatacgaaatctttaacattaaaaatagatatgagaaaaaaactgtcattcgataaaatgaggcaaatttaataataaatgattaccagaaatacaaaattaagccatatgtgctcttaagtaattcgaatccagatatccttaaaatgtcaaaaagatgcaacaagagtcaggagcccagaatgacgcaaattacaggaatggggaggaggtgatttttagaagaggtgagagaatggaatggggaacagacttgttttcggcaaattctcctggagtagactgggcagccccctcctccaggctcagttccaaagagtccgttgtgtggatatttcttttatttttcctttgaggactgcgcttggtgtttagttcatccttatgccgacctcttagaatttccaagatgcagggccttgggcagggcagggcatgggtgtgatttgccttgggccacaagctcttggtgagagtcttatgtccacacttttatctccaaagtgacatggagatcacttttctcagtgatcaaatttgaatttatcaaagggggttttctgcataattttgtatttgtaatcattatcagatttgcagcattctaattcggcagggcagggtatgaaagctggaaactcaggctggagtttctagttctaatggctctctggccatgtgggttgtagagtgtctgtcacatatgcactttatttcagtattaattgaaatacttggacacgcacgatcacaggcctatttggaggctctgtactatgaccctaataaccctagatacatcatgatacatggtgtctgtctcaggatgcaggcagggctggtgcaggcttctccatactcccttccacttggcaccagcaggcatcgagcaaccagggatcttaaactggcctctccaaatactccattgaacaggactgcaggctgcacccaggctaatgggagattggtgtgttgatgatacagtgtttaagatgagattgcagtgagttcctccttaatcccagaagggcaccatgatgaatgccacaggagactggaccctctttgagaactgcagatattagttgactgtgggtcaccctcgtggccaaggagttgggattggccatgtcttcttcgaggaggtggagactgtaactgacactggttatctttggggttgtctttcctgaatcctttggcatgtggcaccttcctgccacatgtagataattcacggcattaccaagtcaccacgagccccaccctcacctctgtcaaccgaggacccagccaggcagtgccatgtggtctcccaggcacgcttctcaacaccggctacccctgctgtgaaggttctcaaggccctggtccggggagccaagccctgggagcgccctaaagctccgcaggtaactgcactgcagcccgcattgagaaccgcagctctaacacagtgattgcgagaggacacccattctgagctcccacagagggctccacctccccaagaatgtctcattgtcattggaacagccagggtcaggcagcttctgctcggactgacgtggcgtctgacccttggtgggttgccagacattcctgcctgtttccaccatgggaagctgtcactgggaatggtatggagccctcacttctaccccaagcctgggtgtctgctgcctccatgtcaaaaatggacatttctggtcctgcccagctgctacctcaccacaacccatgctcagagttgtcagggatgcgtggaacagcaatgatgggacagcaaatgactggcaatttccccaggtcccacgctgttctggagtggacgtgttgcggccctgcccccgatgtgttccagcctcatccaggtgcacaggatactctggggccagcacagggattgtccagtgatgctcctggtgtccacaaaacagctctagagatacctgcattttgaaaagcctgctgagccaacaagcttggggcaggacacggatttctttggcaaatctgcaggcgagctgaccacttgcctggtgagtggaagctgccattacctggccagtgtttgcaactcgagggaaaatgacagctgcatggggggaagcctgacctcccggggagctttattgtggcctcagtggaaagattggattttgaaacctgccagacccaactgaaagaagggtcattcctgattgagttggagactctccccagtccctctctctggactcattctagctgtggcctgcctgtggacagcccttccctttggcccatgcggcgggtccaggcagctcctgcagctgtgctcatggctgctggcccagaacttctcatttttgccatgtggaagcagatttgctagtagaggaattttccaagtcaagggaagtgttgccaaacctcttgcctcgacctgtggggggccttctgctcttgttttctcattctctttggagtgggcacagaggggacaagtcggcccccagtgaggctcagggagtgcaggagaccagggagggaagcccagatgatggggaaacagagccaccttgagggggtgtcatggggtcagtgtcagggtgatctgacgggtcagttcatacttaagcaacattattctgttcgtttcttttgggtaaggaattcctcatgggaggtgtggtcatctggtcgtagaggtggacagaaacaccccctcgtcttcctgagccatttggaagccctttcctctagccctaggtactggtgacacaggcccctcggtctcaggatgtggacagggctgggaggtgcaggcttcttgtcccatccccactcagtatcatcgggtatctggtagtcaggggtctcacagtggcctctccaaaagcctggtgtccttggagaacatttttcattttgtctgttttcgttgctttgaacagctgcattcactcaccgagggctcgccctccctggatctgccatgtggttcagggaggaggggaccgatgagcaccgaccccttctcttcacctgtcagtggccaccacagtgccccctctggctttgccaccacgttctcctgcccccgtcaccttgtctcttctaactcattagcctttccttcctttgtctgttttcttctcccagctggtttaagttcttgatcatccctggcaccacctaccctaaggtcttccaagaacagaaaagccagggcctgtgtggggcaatgtgttgtccctgtcgggttatggtgggacctcctagaccccagagtgaatgaatggcaggcctgccagtgactgtgctgatggcttagaattcctacacggctgtgcctctcccaccccgtcctctttgctcggaagggagacctggtttgctctcctccatgacagcccagcccctgctgtgcacaggggtggggctcgggatccctccctgcaccctgatgtttattaactgtagatagtgaatttcaagttgacaggtaccttctcagggatttatatataaatatagttagaggaaaagttgaagtctattttactactttttagtgtttgagtaaattatgctttaactggacagaagaaatatttctcagacaatgtcgatgctgctgatgacaactgagatgcctggagctcacccttgatggagacttccttggtgattggagatgggggactctggtggcagaaatggctttggggtaggtgtgaagttgcttcagtccctctgagttgcctcttctggatggaacgtgtgtatcaacaacaatgaaatgcacctccgtgtgcatggaggcggctgatgagaatacagataggccagtcctcgctcttccctccagaaccggccgctcccggtctgacgttggagcacgtgaactaagagtgacaattttttctacttgcttctgtgaataaagtgttctacagtcagcccagcactaaactcaccagaaaagaggagggaacagcacggagccattcatctggaattactcgatgtgcagaggctgccccttggccgcacttgggaacatcgtggacatcttccttcctctcaggctcctcctgacagactcctggcagcactggagacctcaggactatggagatcagaattgtaatggctttgtcatctcagtgtggccactcctgaggcaagaggctcctcctgggagcaggagagagagagtttgtgatgttggttggaaaataggatttatggatgcaggagggccgtgctaggcccctctgcccgcttctctccctgctgttggcggtgaccaggtctcaggagcggagacgaggctgttgtgagtgaaacagaagcccctggcatagggccagaccctaggcctgaaaaggatgcaaagcctgctgttttcaggctgttgggaagaatcgtgcgtaccgagtgattatgatgaaacgtatcccagagaggaaatgaatgggacctgaaaagtgggtctgccacatccctggtagcccgcctccaagagcactacactccccccagccccaccggccacactacatgacgtgggaaggctgtccgttcatccttaccctggggactcaagtgtgctctgcggagtgagtcacagccctgatgtgcaccctgcactactctttccccaggtgcgccggagacgcaggcttgctcatttccgtcctgacacagctcgctgttcctgcggtggtcagagtccccctgtgctgtgtcagctcctggacactactagtctttcacatgataaagcgcgagcactttttcgcttttgcagtatttggggaaattctaacacatttcccggggatttgcccaggtccctccacctcccacggtgggtaactgtgtggattctgcacctggcaatcggcgctcccctttggaaacacctgggggccctgtttcttccagcctggtccttggtttctaccccagccgctttcagccggcacctgcatgggactgcctggagggccacggtccagggaaggacaggtgggaccctgaccatgacagatctttctaaaacaataaagtcccattgatgacaactgcagtgggatgaatgccattgcagcggtcatgctgggagctgccgagagcttacaacaaaagcagttcctctcaagacactgcttgcatcttccctccacgcctctcggtgcatttggaacttgtttatgcgctggtataactcgagtcagctgcttatttctgtgcccttgcactcacaggttccttcattaacattttaaataagtggctaaaaaaactcctctggaggttgtttttgaaagagacaggaaaaagaaacacacagtacctggattgttttgacttattttcaagcgactcagctgaaagccggtgttgcatacacaatttcctcacgctgacccagcctgactaagacttgataaaaggcacagcccttggcagcaggcagtgccaatgtggacagtgtacactaagctgtgagtgtgtgcacgggcgagcacatgtatgtgtactcatacatccagatgaactaaagggacactgggctttgtgctggcaaaggttacgatgctgctgtagcttggctgtgggccccaggcagtgtcagatggaacctgctttgatggcgtgttgttcagtgtactcagtggggtctcacatggcccgaggacccactgtgagcactccgcccgctgtggcacagaacacggctggggtcatcacagcccaggtctttattgaaaggcggctcatatagaacccatttggccaggtctgggccatctctctgcctctgccctatcttggctgcctggaggggcccaggcccaagaggattctttacccctggaagagctccccaggcattcagcctatggcccttgacatttggctgcaggttaccgtcagaatcaacaccatatcctgaggaagccctggtatttccccaagtctgcctatgtattagacactctaatcaatgctaacacagttcagtttttgagggaactagttttgtcataatactacacccctctattgtttttaaataagaaaaaaaaaaaccccacgaaactttccatcaaagcaatggtccgtgttggcctgatgctttaagaagtttgaggaggtaggtatggaggcaccttaacaccagtttttgagcagaagttctagaagctgatttagaactacacagctatggatacacctgatgaaaaccgcaaaaggcgatgacaggcccagaaatatgaccagcaagcccgtgagcctttggggcatccgactgaatttgaaaataataccccattcagatgaacattaaaagccaatgtactggaattctctttgttctgcccgacatttgggggtgtccaaggacctgtgtttttaacaaagatgactttatgaccgttctaaggattgaacagattcctgcacagggtgccaggtttcaagttaggtcctcttagtataagctctctttttttctgaatgtaaacctatttgcattgtcatttctaataatccagtaggtttctggatattgtaaagatactgagtacagatataactgtgtaaatttcatagtgttttattttgaggtgagagttttgttatagtttataaaagatattttcctattcagacctcagggctattttgggacctacaaataaatgtgattcccagcagcttcaatttttgatattcaaaaagttaataatctttaagctaaatataatgtgatatgattcagaaaaaaatgtttttcccttttaacttctaacaaattatgtatctaatgtttaaaaaatatggaaaaaagggataatgtaaaaatgtgggagaattgtggctaaagaataaaaaatcacttgttaaaacgca

SEQ ID NO: 1079 - DNA, 649 bp, Homo sapiens
  source 1..649: mol_type = unassigned DNA
agcggcttcaccagccccgcgggtccgaatcgcacgcggccgggtccgctctcccgggaggagagcccggcgtggaccagcgtgacgaccccagcgtgctgcggcctctccccgagggcccctccacaagggtccctgcgcgggccgggctcggccgttgccactcgggacagccatcccctcgagttcgcgctcgccgtccccgccttcacctcccgggttgggaggcgggcgactgcgcgcgaggtaaaggaacttgcgttccccggcgccgaggcggcagcagcgcagtgcacagcggcttctgaaggcggcgtcgacggggagctgcgcgtggctcccagtttcctggttacgtgcgcgccggcagagccaaaacctgcagccgaaactcccgcttctccgtggatggtctgaagcatttgctggagacaggggcctcggtcaacgcacccccggatccctgcaagcagtcgcctgtccacttagccgcaggaagcggccttgcttgctttcttctctggcagctgcaaacgggcgctgacctcaaccagcaggatgttttaggagaagctccactacacaaggcagcaaaagttggaagcctggagtgcctaagcctgcttgtagccagtgatgcccaaattga

SEQ ID NO: 1080 - DNA, 605 bp, Homo sapiens
  source 1..605: mol_type = unassigned DNA
ccgaatcgcacgcggccgggtccgctctcccgggaggagagcccggcgtggaccagcgtgacgaccccagcgtgctgcggcctctccccgagggcccctccacaagggtccctgcgcgggccgggctcggccgttgccactcgggacagccatcccctcgagttcgcgctcgccgtccccgccttcacctcccgggttgggaggcgggcgactgcgcgcgaggtaaaggaacttgcgttccccggcgccgaggcggcagcagcgcagtgcacagcggcttctgaaggcggcgtcgacggggagctgcgcgtggctcccagtttcctggttacgtgcgcgccggcagagccaaaacctgcagccgaaactcccgcttctccggccagcctgcgcattcttacctgtcggggtgcggcgagtgtctcacctctctgcacttccaaggactcttgtcatctgccttaggcgggaaatgctgttgctggattgcaaccccgaggtggatggtctgaagcatttgctggagacaggggcctcggtcaacgcacccccggatccctgcaagcagtcgcctgtccacttagccgcaggaagcggccttgctt

SEQ ID NO: 1081 - DNA, 1141 bp, Homo sapiens
  source 1..1141: mol_type = unassigned DNA
gcggccgcggagccccacccgctcctactccagtcctctcacgcccactgacttaccctgcgcacgcgcgctgaggctccgtggggccgccgcgggccccgccccgaggtgggagggcctgacgcatccacagctggccaatcggcggatggcctcgcgcgcccgccccctccccctgcccccggcgccgggctccacgtgccagtgtttgtgtacgtgcggccgtggcggggctggacagggtccgggtcgttgaggattaggctgctcgggcgtaaccggagctggggcgcggctgccaagggccggcccggaagtcccagcggtctttaaattctcccgtgctagggccagcctgcgcattcttacctgtcggggtgcggcgagtgtctcacctctctgcacttccaaggactcttgtcatctgccttaggcgggaaatgctgttgctggattgcaaccccgaggtggatggtctgaagcatttgctggagacaggggcctcggtcaacgcacccccggatccctgcaagcagtcgcctgtccacttagccgcaggaagcggccttgcttgctttcttctctggcagctgcaaacgggcgctgacctcaaccagcaggatgttttaggagaagctccactacacaaggcagcaaaagttggaagcctggagtgcctaagcctgcttgtagccagtgatgcccaaattgatttatgtaataagaacgggcaaacagctgaagatctcgcttggtcatgtggatttccagactgtgccaagtttcttacaacaattaaatgtatgcagacaataaaagcaagtgaacaccctgacaggaatgattgtgttgccgtgctcagacagaaacggagtctcggaagtgtagaaaataccagtgggaaaaggaagtgctgatgtcacgtgggttatgaagaagtctgaagaacgccttcatttcatgcaaatctataagctcctgcttttggctttaccatatgttgtgtctaatctccttctgagaaggacgaaaaactttcttccaagtgaagatccatttaagaacacatgtatttacatgcctataatatgctggttgtgtatgctttgtcttttaagttattaaaggaacgtctaaaaaa

SEQ ID NO: 1082 - DNA, 1444 bp, Homo sapiens
  source 1..1444: mol_type = unassigned DNA
ctttaaattctcccgtgctagggccagcctgcgcattcttacctgtcggggtgcggcgagtgtctcacctctctgcacttccaaggactcttgtcatctgccttaggcgggaaatgctgttgctggattgcaaccccgaggtggatggtctgaagcatttgctggagacaggggcctcggtcaacgcacccccggatccctgcaagcagtcgcctgtccacttagccgcaggaagcggccttgcttgctttcttctctggcagctgcaaacgggcgctgacctcaaccagcaggatgttttaggagaagctccactacacaaggcagcaaaagttggaagcctggagtgcctaagcctgcttgtagccagtgatgcccaaattgatttatgtaataagaacgggcaaacagctgaagatctcgcttggtcatgtggatttccagactgtgccaagtttcttacaacaattaaatgtatgcagacaataaaagcaagtgaacaccctgacaggaatgattgtgttgccgtgctcagacagaaacggagtctcggaagtgtagaaaataccagtgggaaaaggaagtgctggtaagtaactcagagctgctgcttttttcctcccgcagtgatctcttgtttgcatagcatttattattccatttaatactgacactcgtatttctagtagtattgtttcattctcattaacattttagtactggttatacttaccagagtctagagaccaaaaatgggactgcatggtggaagtttggggataaaactctttttaaaaaaaagtttttaatgttaacgtgtttttaaaaacagatgtcacgtgggttatgaagaagtctgaagaacgccttcatttcatgcaaatctataagctcctgcttttggctttaccatatgttgtgtctaatctccttctgagaaggacgaaaaactttcttccaagtgaagatccatttaagaacacatgtatttacatgcctataatatgctggttgtgtatgctttgtcttttaagttattaaaggaacgtctaaaaaatacattctccgtgcagtatttacaacctttgaaaaaggtcataatttaaatcgtcaaactagaaccaggatttaatgtgaaaaattaaactgattctttattcacaaatttataataccactctactgcagtctttgactccaagatattttaaatcatatttggtcgctgaggaagacataagttatagtatgcatccttgttccaaaaatctgggcccttccatccgcaccagccctggatagagaagacgggaaaggaaagccttttacaaagttacaagattatgtcatggaaatcgtgacatcaggctctgtcagcaggaccttggaataagactctaaatggctttatcattcaaggatttgaattcctactagcatagaa

SEQ ID NO: 1083 - DNA, 668 bp, Homo sapiens
  source 1..668: mol_type = unassigned DNA
gcgcattcttacctgtcggggtgcggcgagtgtctcacctctctgcacttccaaggactcttgtcatctgccttaggcgggaaatgctgttgctggattgcaaccccgaggtggatggtctgaagcatttgctggagacaggggcctcggtcaacgcacccccggatccctgcaagcagtcgcctgtccacttagccgcaggaagcggccttgcttgctttcttctctggcagctgcaaacgggcgctgacctcaaccagcaggtaactaggtaactgttgctgtgtacagccgtcccctccaacccagacacacacaaacatttctcagacgccaagagttgtttcagctgttaaaaacatgtctatagcagcgatgtccaacagaaatataatgcaagacacagatgtaatttaagagtttttttccagtcttgatgtgaggacatgagaaatttgaagtttttaagtagccacattaataaacgaaacatgaaattttagtatttgacccaatttgtccaaaatgttatcagttcaatatgtaatcaaagcaattgctgattagatattttacactttcttttattctgtcttcacaatctggtgtgacagcgtatctcaaatcagactagccacatttcaaatactctagccttaagtggctgt

SEQ ID NO: 1084 - DNA, 519 bp, Homo sapiens
  source 1..519: mol_type = unassigned DNA
gcgcattcttacctgtcggggtgcggcgagtgtctcacctctctgcacttccaaggactcttgtcatctgccttaggcgggaaatgctgttgctggattgcaaccccgaggtggatggtctgaagcatttgctggagacaggggcctcggtcaacgcacccccggatccctgcaagcagtcgcctgtccacttagccgcaggaagcggccttgcttgctttcttctctggcagctgcaaacgggcgctgacctcaaccagcaggagaagctccactacacaaggcagcaaaagttggaagcctggagtgcctaagcctgcttgtagccagtgatgcccaaattgatttatgtaataagaacgggcaaacagctgaagatctcgcttggtcatgtggatttccagactgtgccaagtttcttacaacaattaaatgtatgcagacaataaaagcaagtgaacaccctgacaggaatgattgtgttgccgtgctcagacagaaacggagtctcggaagtgt

SEQ ID NO: 1085 - DNA, 4066 bp, Homo sapiens
  source 1..4066: mol_type = unassigned DNA
gcctctccagccaagtggctggagtcgggaggctggaaagagactccgagaaagtaccagcggaaggcggccgccgctacggcgattcgcagggagtagcagacgaagacggtggccgccgcactagccaccacgtgtggaggataaacggtctacacggccattccggcgccgagtctagggaaagagttagcgacgacggggaaagaaaatgtgaagagagcgaccgccgctccagggtcgctgcaggaagcctaagtgcagacgccggcttctcccgcagtgacttgagaagggtcagtgaaaacctcggccactgccgcagcgtctctagggagagagttaggggagatagtggccacagtcacagctgctcttgggagagagttaggggagacagcaccttctgcagcagcgacgtgaattttagtgaagttggaggccaccaaactaccgactccaggggaacagccagagaagaccgaggcctccgcctcagtggtccttgggagggagtcagtgacattcgggacccgcgaactagtgacttcggggatagagtcagtgacgatcgcagtcgccgcttcagtggctcctgggagggagggagtgtcgaaggcggccacagcgttggtagttcttgggaggaagtaagtggagaccgcggctacgcagccagcgactcctctggtgtgagcggcagtgaagacgccagctaccgcttcagtggcttttgggagagagaaagtgaagacgaaggtttccgctgcagcttctgggagagagcaagagaggaccttgggccccgtcctagtgacgacggagaagagggccgctgccgctgcagtggctcgtgggtgagagcaagtgaagaccgccgcagcatcaggggcctggactcaactcctccccagagtcggaggtgttgcgccatgcccggggtggccaattcaggcccctccacttcctctagggagactgcaaacccctgttccaggaagaaggtgcattttggcagcatacatgatgcagtacgagctggagatgtaaagcagctttcagaaatagtggtacgtggagccagcattaatgaacttgatgttctccataagtttacccctttacattgggcagcacattctggaagtttggagtgtcttcattggctgctctggcatggagctgatatcacacacgtaacaacgagaggttggacagcatctcacatagctgcaatcaggggtcaggatgcttgtgtacaggctcttataatgaatggagcaaatctgacagcccaggatgaccggggatgcactcctttacatcttgctgcaactcatggacattctttcactttacaaataatgctccgaagtggagtggatcccagtgtgactgataagagagaatggagacctgtgcattatgcagcttttcatgggcggcttggctgcttgcaacttcttgttaaatggggttgtagcatagaagatgtggactacaatggaaaccttccagaacctccttagatccctgtggagcctctgattccttggcttggcatgctggacttacataatttggcacctacctacctgcatggcctcatctttctatatctttacactactgtccaggatcattttgtttttttctgaaggtcgtctttcagtgttcatttagtgaagtcttttggtatgaactctttcaatttttgtgtatctgaaaatttattttgttctcattctttttactttgtattttgtaagtttttttttttaaagtaaaatttaaattgaagtctcaaaaaacaaaaagcccctctctcggcgctgcctacggaggtggcagccatctcctcctcagcatcatggccaccctcagaccccttgtgaagcccaggatcatcaaaaagagaactaagaagttcttccggcaccagactgactgatatgtcaaaattaagtgtaactggcagaaacccagaggtattgacaacagggttcgtagaaggttcaaggaccaatcttgatgcccaacattggttgtgggagcgacaaaaaaaacaaagcacatgctgcctactgacttctggaagttcctggtccacaacatcaaggagctggaagtgctgctgatgtgcaacagatcttactgtgctgagatgtttcctccaagaactgcaaagccatcgtggaaagagctgcccagctgtccatcggagtcacaccaaccccaacgccaggctgcgcagtgaagaaaatgaatagacagctcatgtgcatgttttgtgtttaaataaaactgtaaaaactgcaaagaaaaaccaaaaaacaacaacaaaaaattattttgtgttaggcttccttcgctttttcagactgctttcaatttccattttcacatatggtattattagtttttttttttagttttagtctttctgatggatgtatctcattgcagtttcaaatttacatttttcctgatgactaaagatgttgaacatcatttcgtacgtttaaaggctatttggtttttttgtgtgtgtgatgtactagttcaaatcttttgcctattggctgttagagtgtgtctttttcttattgaatcataggagttctttatatattctagatacaagccctttgtcagttacgtttattaccaatatcttttcatgcaaatatctttctaatctttctacttcatggcttgctctttcattctttggtattttttgataaatgaggttttaattattttttttttttgaaatagagtcttgctctgtcgcacaggctggagtgcagtggtgcagtctcggcttgctgcaacctctgcctcccggattcaagcgattcttctgcctcagcctcccgagtagctgggattacaggtgtgcaccaccacgcttggctaatttttgtatttttagtagaaacagaattttagcatgttggccacgctggtcttgaactcctgaccttgtgatccacccacctcggcctcccaaagtgctgggattacaggtgtgagccaccgcgcttggccagaggttttaattttaacgtagtccattttaataatctcttcctttgtagttagtcctttctgtactttccctattttgtgatcatgaagacattcctttatgttatctgttagaaattttatttatctttcatatttatattcccaatcctcctagaactgacttttccgtgtgtaatacaaggtaggggtcagttttatttttgtattgtcctttatcaaatatacttgatcatttttgttggtcttgtctggtcattaaaaaatccaattgtttctttaaacatgtatgattattttatttataaccaggtagagtatttataataatatagatgttaagaaagaatgtggccttaggtctagactgcttgtgttcaaatcgctctcataaaattattttttattgataaatgtacatatttttggtgtacatgtgataatttgatacattcatttgtatcaaatttgataatgtataaagatcaaatcaaggtaattggggtagccatcccttaaatatttcttttatactaggaacatttgaattatttttttctagttatttttaaatacacaatagattatggttaactataatcaccctactgatctgtcaaacactagatcttatttcttctactcaattgtatatttatacccattaatcaacttctgttcttgctctctccgtgctacccttctggcctttggtaatcgccaatcaatctactctctatcttcatgagaccagcgtattttagctcccacatatgaatgaaaacatataatatttgtctttctgtgcttgacttattttacttaacataatgacctccaattccatccatcttgtggcactgacagtatttcattcatttttgtgtgaattatatttcgttgtgaatatacattacattttctttatccattcatcactgatgtgcacttaggttgattccatattttggctattgtgaatagtgtgttaataaacatgagagtgcagtta

SEQ ID NO: 1086 - DNA, 954 bp, Homo sapiens
  source 1..954: mol_type = unassigned DNA
aagtggctggagtcgggaggctggaaagagactccgagaaagtaccagcggaaggcggccgccgctacggcgattcgcagggagtagcagacgaagacggtggccgccgcactagccaccacgtgtggaggataaacggtctacacggccattccggcgccgagtctagggaaagagttagcgacgacggggaaagaaaatgtgaagagagcgaccgccgctccagggtcgctgcaggaagcctaagtgcagacgccggcttctcccgcagtgacttgagaagggttccaggaagaaggtgcattttggcagcatacatgatgcagtacgagctggagatgtaaagcagctttcagaaatagtggtacgtggagccagcattaatgaacttgatgttctccataagtttacccctttacattgggcagcacattctggaagtttggagtgtcttcattggctgctctggcatggagctgatatcacacacgtaacaacgagaggttggacagcatctcacatagctgcaatcaggggtcaggatgcttgtgtacaggctcttataatgaatggagcaaatctgacagcccaggatgaccggggatgcactcctttacatcttgctgcaactcatggacattctttcactttacaaataatgctccgaagtggagtggatcccagtgtgactgataagagagaatggagacctgtgcattatgcagcttttcatgggcggcttggctgcttgcaacttcttgttaaatggggttgtagcatagaagatgtggactacaatggaaaccttccagaacctccttagatccctgtggagcctctgattccttggcttggcatgctggacttacataatttggcacctacctacctgcatggcctcatctttctatatctttacactactgtccaggatcattttgtttttttctgaag

SEQ ID NO: 1087 - DNA, 2514 bp, Homo sapiens
  source 1..2514: mol_type = unassigned DNA
tggaggataaacggtctacacggccattccggcgccgagtctagggaaagagttagcgacgacggggaaagaaaatgtgaagagagcgaccgccgctccagggtcgctgcaggaagcctaagtgcagacgccggcttctcccgcagtgacttgagaagggtcagtgaaaacctcggccactgccgcagcgtctctagggagagagttaggggagatagtggccacagtcacagctgctcttgggagagagttaggggagacagcaccttctgcagcagcgacgtgaattttagtgaagttggaggccaccaaactaccgactccaggggaacagccagagaagaccgaggcctccgcctcagtggtccttgggagggagtcagtgacattcgggacccgcgaactagtgacttcggggatagagtcagtgacgatcgcagtcgccgcttcagtggctcctgggagggagggagtgtcgaaggcggccacagcgttggtagttcttgggaggaagtaagtggagaccgcggctacgcagccagcgactcctctggtgtgagcggcagtgaagacgccagctaccgcttcagtggcttttgggagagagaaagtgaagacgaaggtttccgctgcagcttctgggagagagcaagagaggaccttgggccccgtcctagtgacgacggagaagagggccgctgccgctgcagtggctcgtgggtgagagcaagtgaagaccgccgcagcatcaggggcctggactcaactcctccccagagtcggaggtgttgcgccatgcccggggtggccaattcaggcccctccacttcctctagggagactgcaaacccctgttccaggaagaaggtgcattttggcagcatacatgatgcagtacgagctggagatgtaaagcagctttcagaaatagtggtacgtggagccagcattaatgaacttgatgttctccataagtttacccctttacattgggcagcacattctggaagtttggagtgtcttcattggctgctctggcatggagctgatatcacacacgtaacaacgagaggttggacagcatctcacatagctgcaatcaggggtcaggatgcttgtgtacaggctcttataatgaatggagcaaatctgacagcccaggatgaccggggatgcactcctttacatcttgctgcaactcatggacattctttcactttacaaataatgctccgaagtggagatcccagtgtgactgataagagagaatggagacctgtgcattatgcagcttttcatgggcggcttggctgcttgcaacttcttgttaaatggggttgtagcatagaagatgtggactacaatggaaaccttccagttcacttagcagccatggaaggccaccttcactgtttcaaattcctagtcagtagaatgagcagtgcgacgcaagttttaaaagctttcaatgataatggagaaaatgtactggatttggcccagaggttcttcaagcagaacattttacagtttatccagggggctgagtatgaaggaaaagacctagaggatcaggaaactttagcatttccaggtcatgtggctgcctttaagggtgatttggggatgcttaagaaattagtggaagatggagtaatcaatattaatgagcgtgctgataatggatcaactcctatgcataaagctgctggacaaggccacatagagtgtttgcagtggttaattaaaatgggagcagacagtaatattaccaacaaagcaggggagagacccagtgatgtggcaaagaggtttgcccatttggcagcagtgaagctgttagaggagctacagaaatatgatatagatgacgaaaatgaaattgatgaaaatgatgtgaaatattttataagacatggtgttgagggaagcactgatgccaaggatgatttatgtctgagtgacttggataaaacagatgccagaatgagagcttacaagaaaattgtagaattgagacacctcctggaaattgccgagagcaactataaacacttgggaggcataacagaagaagatttaaagcagaagaaagaacagcttgagtctgaaaagaccatcaaagaactgcagggccagctggagtatgaacgactacgtagagaaaaattagaatgtcagcttgatgaatatcgagcagaagttgatcaactcagggaaacactggaaaaaattcaagtcccaaactttgtggctatggaagacagcgcttcttgtgagtcaaacaaagagaagaggcgagtaaaaaaaaaggtttcttctggaggggtgtttgtgagaaggtactaatcagtgaaataactaaattgacctgctagatttttctctttcattaaaaaaattgatataaatgtgagtctatacaaactatctcagaattactctgatatgcttctgttccaattctgatggcagaaatgttatattaaagagatttagagattttttaaatga

SEQ ID NO: 1088 - DNA, 3230 bp, Homo sapiens
  source 1..3230: mol_type = unassigned DNA
agggagtcagtgacattcgggacccgcgaactagtgacttcggggatagagtcagtgacgatcgcagtcgccgcttcagtggctcctgggagggagggagtgtcgaaggcggccacagcgttggtagttcttgggaggaagtaagtggagaccgcggctacgcagccagcgactcctctggtgtgagcggcagtgaagacgccagctaccgcttcagtggcttttgggagagagaaagtgaagacgaaggtttccgctgcagcttctgggagagagcaagagaggaccttgggccccgtcctagtgacgacggagaagagggccgctgccgctgcagtggctcgtgggtgagagcaagtgaagaccgccgcagcatcaggggcctggactcaactcctccccagagtcggaggtgttgcgccatgcccggggtggccaattcaggcccctccacttcctctagggagactgcaaacccctgttccaggaagaaggtgcattttggcagcatacatgatgcagtacgagctggagatgtaaagcagctttcagaaatagtggtacgtggagccagcattaatgaacttgatgttctccataagtttacccctttacattgggcagcacattctggaagtttggagtgtcttcattggctgctctggcatggagctgatatcacacacgtaacaacgagaggttggacagcatctcacatagctgcaatcaggggtcaggatgcttgtgtacaggctcttataatgaatggagcaaatctgacagcccaggatgaccggggatgcactcctttacatcttgctgcaactcatggacattctttcactttacaaataatgctccgaagtggagtggatcccagtgtgactgataagagagaatggagacctgtgcattatgcagcttttcatgggcggcttggctgcttgcaacttcttgttaaatggggttgtagcatagaagatgtggactacaatggaaaccttccaggtggcagccatctcctcctcagcatcatggccaccctcagaccccttgtgaagcccaggatcatcaaaaagagaactaagaagttcttccggcaccagactgactgatatgtcaaaattaagtgtaactggcagaaacccagaggtattgacaacagggttcgtagaaggttcaaggaccaatcttgatgcccaacattggttgtgggagcgacaaaaaaaacaaagcacatgctgcctactgacttctggaagttcctggtccacaacatcaaggagctggaagtgctgctgatgtgcaacagatcttactgtgctgagatgtttcctccaagaactgcaaagccatcgtggaaagagctgcccagctgtccatcggagtcacaccaaccccaacgccaggctgcgcagtgaagaaaatgaatagacagctcatgtgcatgttttgtgtttaaataaaactgtaaaaactgcaaagaaaaaccaaaaaacaacaacaaaaaattattttgtgttaggcttccttcgctttttcagactgctttcaatttccattttcacatatggtattattagtttttttttttagttttagtctttctgatggatgtatctcattgcagtttcaaatttacatttttcctgatgactaaagatgttgaacatcatttcgtacgtttaaaggctatttggtttttttgtgtgtgtgatgtactagttcaaatcttttgcctattggctgttagagtgtgtctttttcttattgaatcataggagttctttatatattctagatacaagccctttgtcagttacgtttattaccaatatcttttcatgcaaatatctttctaatctttctacttcatggcttgctctttcattctttggtattttttgataaatgaggttttaattattttttttttttgaaatagagtcttgctctgtcgcacaggctggagtgcagtggtgcagtctcggcttgctgcaacctctgcctcccggattcaagcgattcttctgcctcagcctcccgagtagctgggattacaggtgtgcaccaccacgcttggctaatttttgtatttttagtagaaacagaattttagcatgttggccacgctggtcttgaactcctgaccttgtgatccacccacctcggcctcccaaagtgctgggattacaggtgtgagccaccgcgcttggccagaggttttaattttaacgtagtccattttaataatctcttcctttgtagttagtcctttctgtactttccctattttgtgatcatgaagacattcctttatgttatctgttagaaattttatttatctttcatatttatattcccaatcctcctagaactgacttttccgtgtgtaatacaaggtaggggtcagttttatttttgtattgtcctttatcaaatatacttgatcatttttgttggtcttgtctggtcattaaaaaatccaattgtttctttaaacatgtatgattattttatttataaccaggtagagtatttataataatatagatgttaagaaagaatgtggccttaggtctagactgcttgtgttcaaatcgctctcataaaattattttttattgataaatgtacatatttttggtgtacatgtgataatttgatacattcatttgtatcaaatttgataatgtataaagatcaaatcaaggtaattggggtagccatcccttaaatatttcttttatactaggaacatttgaattatttttttctagttatttttaaatacacaatagattatggttaactataatcaccctactgatctgtcaaacactagatcttatttcttctactcaattgtatatttatacccattaatcaacttctgttcttgctctctccgtgctacccttctggcctttggtaatcgccaatcaatctactctctatcttcatgagaccagcgtattttagctcccacatatgaatgaaaacatataatatttgtctttctgtgcttgacttattttacttaacataatgacctccaattccatccatcttgtggcactgacagtatttcattcatttttgtgtgaattatatttcgttgtgaatatacattacattttctttatccattcatcactgatgtgcacttaggttgattccatattttggctattgtgaatagtgtgttaataaacatgagagtgcagtta

SEQ ID NO: 1089 - DNA, 1887 bp, Homo sapiens
  source 1..1887: mol_type = unassigned DNA
gaccgcggctacgcagccagcgactcctctggtgtgagcggcagtgaagacgccagctaccgcttcagtggcttttgggagagagaaagtgaagacgaaggtttccgctgcagcttctgggagagagcaagagaggaccttgggccccgtcctagtgacgacggagaagagggccgctgccgctgcagtggctcgtgggtgagagcaagtgaagaccgccgcagcatcaggggcctggactcaactcctccccagagtcggaggtgttgcgccatgcccggggtggccaattcaggcccctccacttcctctagggagactgcaaacccctgttccaggaagaaggtgcattttggcagcatacatgatgcagtacgagctggagatgtaaagcagctttcagaaatagtggtacgtggagccagcattaatgaacttgatgttctccataagtttacccctttacattgggcagcacattctggaagtttggagtgtcttcattggctgctctggcatggagctgatatcacacacgtaacaacgagaggttggacagcatctcacatagctgcaatcaggggtcaggatgcttgtgtacaggctcttataatgaatggagcaaatctgacagcccaggatgaccggggatgcactcctttacatcttgctgcaactcatggacattctttcactttacaaataatgctccgaagtggagtggatcccagtgtgactgataagagagaatggagacctgtgcattatgcagcttttcatgggcggcttggctgcttgcaacttcttgttaaatggggttgtagcatagaagatgtggactacaatggaaaccttccagttcacttagcagccatggaaggccaccttcactgtttcaaattcctagtcagtagaatgagcagtgcgacgcaagttttaaaagctttcaatgataatggagaaaatgtactggatttggcccagaggttcttcaagcagaacattttacagtttatccagggggctgagtatgaaggaaaagacctagaggatcaggaaactttagcatttccaggtcatgtggctgcctttaagggtgatttggggatgcttaagaaattagtggaagatggagtaatcaatattaatgagcgtgctgataatggatcaactcctatgcataaagctgctggacaaggccacatagagtgtttgcagtggttaattaaaatgggagcagacagtaatattaccaacaaagcaggggagagacccagtgatgtggcaaagaggtttgcccatttggcagcagtgaagctgttagaggagctacagaaatatgatatagatgacgaaaatgaaattgatgaaaatgatgtgaaatattttataagacatggtgttgagggaagcactgatgccaaggatgatttatgtctgagtgacttggataaaacagatgccagaatgagagcttacaagaaaattgtagaattgagacacctcctggaaattgccgagagcaactataaacacttgggaggcataacagaagaagatttaaagcagaagaaagaacagcttgagtctgaaaagaccatcaaagaactgcagggccagctggagtatgaacgactacgtagagaaaaattagaatgtcagcttgatgaatatcgagcagaagttgatcaactcagggaaacactggaaaaaattcaagtcccaaactttgtggctatgacagcgcttcttgtgagtcaaacaaagagaagaggcgagtaaaaaaaaaggtttcttctggaggggtgtttgtgagaaggtactaatcagtgaaataactaaattgacctgctagatttttctctttcattaaaaaaattgatataa

SEQ ID NO: 1090 - DNA, 2302 bp, Homo sapiens
  source 1..2302: mol_type = unassigned DNA
agcttctgggagagagcaagagaggaccttgggccccgtcctagtgacgacggagaagagggccgctgccgctgcagtggctcgtgggtgagagcaagtgaagaccgccgcagcatcaggggcctggactcaactcctccccagagtcggaggtgttgcgccatgcccggggtggccaattcaggcccctccacttcctctagggagactgcaaacccctgttccaggaagaaggtgcattttggcagcatacatgatgcagtacgagctggagatgtaaagcagctttcagaaatagtgtgtcttcattggctgctctggcatggagctgatatcacacacgtaacaacgagaggttggacagcatctcacatagctgcaatcaggggtcaggatgcttgtgtacaggctcttataatgaatggagcaaatctgacagcccaggatgaccggggatgcactcctttacatcttgctgcaactcatggacattctttcactttacaaataatgctccgaagtggagtggatcccagtgtgactgataagagagaatggagacctgtgcattatgcagcttttcatgggcggcttggctgcttgcaacttcttgttaaatggggttgtagcatagaagatgtggactacaatggaaaccttccagttcacttagcagccatggaaggccaccttcactgtttcaaattcctagtcagtagaatgagcagtgcgacgcaagttttaaaagctttcaatgataatggagaaaatgtactggatttggcccagaggttcttcaagcagaacattttacagtttatccagggggctgagtatgaaggaaaagacctagaggatcaggaaactttagcatttccaggtcatgtggctgcctttaagggtgatttggggatgcttaagaaattagtggaagatggagtaatcaatattaatgagcgtgctgataatggatcaactcctatgcataaagctgctggacaaggccacatagagtgtttgcagtggttaattaaaatgggagcagacagtaatattaccaacaaagcaggggagagacccagtgatgtggcaaagaggtttgcccatttggcagcagtgaagctgttagaggagctacagaaatatgatatagatgacgaaaatgaaattgatgaaaatgatgtgaaatattttataagacatggtgttgagggaagcactgatgccaaggatgatttatgtctgagtgacttggataaaacagatgccagaagaccatcaaagaactgcagggccagctggagtatgaacgactacgtagagaaaaattagaatgtcagcttgatgaatatcgagcagaagttgatcaactcagggaaacactggaaaaaattcaagtcccaaactttgtggctatggttggtgtcctttttaatacatttatttttctcaagaagtatatacaagagtggccaagagtacaagctttgggctggggctctttggacttgaatcctggctatagtcttttttgatttgggctactcatttaacctttttgtgcctcaactataaactggagatgataacttatactttctagagctgatgacaggattaaaggaatacacacacacacacacacacacacacacacacacacacactctatatgtaactataactttctagatacatacacacatctgtctatctatcttcaaacagcagcctagttcataagtattattgttaacattgtaccatagaaggagaaaatgttttcataagtaatcaatcagaattctaagacagctagaggatatgtatattttaatattctaaataaccaaaataaagtgctttgaatggaatccatattttctttccatagggaagtttcttcatcaatcatcatggatgaattaattctgtttgaggcttgtgtcacctcaaatctgatctattaatattatagaatcttcctggcttctttttattttgcacaaactagtcattggtctctttaataaccactttaaaaatattaaaataataaaacatgtttgttgtatagtgttaaaaacaagatagatgttccttctgacactaagttccactctccagaggaagctattgttaacaatttagtacataccatattagacaaaattctatttatctgcaaacatgtatgtgtatttctatgcatatgcaaatataaccacttcctcagtttctctgggttttggtgtctcaccagtggttgattttccaagaaatataattaactataataatt

SEQ ID NO: 1091 - DNA, 1949 bp, Homo sapiens
  source 1..1949: mol_type = unassigned DNA
ctccccagagtcggaggtgttgcgccatgcccggggtggccaattcaggcccctccacttcctctagggagactgcaaacccctgttccaggaagaaggtgcattttggcagcatacatgatgcagtacgagctggagatgtaaagcagctttcagaaatagtggtacgtggagccagcattaatgaacttgatgttctccataagtttacccctttacattgggcagcacattctggaagtttggagtgtcttcattggctgctctggcatggagctgatatcacacacgtaacaacgagaggttggacagcatctcacatagctgcaatcaggggtcaggatgcttgtgtacaggctcttataatgaatggagcaaatctgacagcccaggatgaccggggatgcactcctttacatcttgctgcaactcatggacattctttcactttacaaataatgctccgaagtggagtggatcccagtgtgactgataagagagaatggagacctgtgcattatgcagcttttcatgggcggcttggctgcttgcaacttcttgttaaatggggttgtagcatagaagatgtggactacaatggaaaccttccagttcacttagcagccatggaaggccaccttcactgtttcaaattcctagtcagtagaatgagcagtgcgacgcaagttttaaaagctttcaatgataatggagaaaatgtactggatttggcccagaggttcttcaagcagaacattttacagtttatccagggggctgagtatgaaggaaaagacctagaggatcaggaaactttagcatttccaggtcatgtggctgcctttaagggtgatttggggatgcttaagaaattagtggaagatggagtaatcaatattaatgagcgtgctgataatggatcaactcctatgcataaagctgctggacaaggccacatagagtgtttgcagtggttaattaaaatgggagcagacagtaatattaccaacaaagcaggggagagacccagtgatgtggcaaagaggtttgcccatttggcagcagtgaagctgttagaggagctacagaaatatgatatagatgacgaaaatgaaattgatgaaaatgatgtgaaatattttataagacatggtgttgagggaagcactgatgccaaggatgatttatgtctgagtgacttggataaaacagatgccagaatgagagcttacaagaaaattgtagaattgagacacctcctggaaattgccgagagcaactataaacacttgggaggcataacagaagaagatttaaagcagaagaaagaacagcttgagtctgaaaagaccatcaaagaactgcagggccagctggagtatgaacgactacgtagagaaaaattagaatgtcagcttgatgaatatcgagcagaagttgatcaactcagggaaacactggaaaaaattcaagtcccaaactttgtggctatggttggtgtcctttttaatacatttatttttctcaagaagtatatacaagagtggccaagagtacaagctttgggctggggctctttggacttgaatcctggctatagtcttttttgatttgggctactcatttaacctttttgtgcctcaactataaactggagatgataacttatactttctagagctgatgacaggattaaaggaatacacacacacacacacacacacacacacacacacacacactctatatgtaactataactttctagatacatacacacatctgtctatctatcttcaaacagcagcctagttcataagtattattgttaacattgtaccatagaaggagaaaatgttttcataagtaatcaatcagaattctaagacagctagaggatatgtatattttaatattctaaataaccaaaataaagtgctttgaatggaa

SEQ ID NO: 1092 - DNA, 594 bp, Homo sapiens
  source 1..594: mol_type = unassigned DNA
gatttggggatgcttaagaaattagtggaagatggagtaatcaatattaatgagcgtgctgataatggatcaactcctatgcataaagctgctggacaaggccacatagagtgtttgcagtggttaattaaaatgggagcagacagtaatattaccaacaaagcaggggagagacccagtgatgtggcaaagaggaccatcaaagaactgcagggccagctggagtatgaacgactacgtagagaaaaattagaatgtcagcttgatgaatatcgagcagaagttgatcaactcagggaaacactggaaaaaattcaagtcccaaactttgtggctatggaagacagcgcttcttgtgagtcaaacaaagagaagaggcgagtaaaaaaaaaggtttcttctggaggggtgtttgtgagaaggtactaatcagtgaaataactaaattgacctgctagatttttctctttcattaaaaaaattgatataaatgtgagtctatacaaactatctcagaattactctgatatgcttctgttccaattctgatggcagaaatgttatattaaagagatttagagattttttaaatga

SEQ ID NO: 1093 - DNA, 855 bp, Homo sapiens
  source 1..855: mol_type = unassigned DNA
aactgcagggccagctggagtatgaacgactacgtagagaaaaattagaatgtcagcttgatgaatatcgagcagaagttgatcaactcagggaaacactggaaaaaattcaagtcccaaactttgtggctatggaagacagcgcttcttgtgagtcaaacaaagagaagaggcgagtaaaaaaaaaggtttcttctggaggggtgtttgtgagaagatttacaattgggcaagtcactttacctagggcagagtggataaggggatgaagagtgacgacagtgttatgctactggagcttccttcacatggaggaaagacgcattccctcttaatattttagaatattttaaatcttaacaaaccaataatttacttgtttatgtctctctccttaagattgtcaattcaatgagaatgaaaccatgttcatctctgtgcacacagggactagcatgctgtttggcatatagcaggcagtcatattggttaactgaacaaatgcagtatactttgttacagtggactttaatatatatggtaacttattaattgactcagtgaaaattaatctataatatactaagaactctcttaggcaatagagataaaaatgaatcagaatgtaacaggataatgtcaaggtttttcttttgaaaacaaaccagcagttagatttttgaggaaaatatagttggaaagcctgactctcactcactggaccatatggaccaatctcttgactgctctatactgcagattccctgtttatagctaaacaaatgacaaggctattttgaataatgattgtcaaacttttatagctattaccaaggcattatgaactcaaaatgt

SEQ ID NO: 1094 - DNA, 4787 bp, Homo sapiens
  source 1..4787: mol_type = unassigned DNA
agcgcgcatgctcgcggctcggcgctgaaattcaaatttgaacggctgcagaggccgagtccgtcactggaagccgagaggagaggacagctggttgtgggagagttcccccgcctcagactcctggttttttccaggagacacactgagctgagactcacttttctcttcctgaatttgaaccaccgtttccatcgtctcgtagtccgacgcctggggcgatggatccgtttacggagaaactgctggagcgaacccgtgccaggcgagagaatcttcagagaaaaatggctgagaggcccacagcagctccaaggtctatgactcatgctaagcgagctagacagccactttcagaagcaagtaaccagcagcccctctctggtggtgaagagaaatcttgtacaaaaccatcgccatcaaaaaaacgctgttctgacaacactgaagtagaagtttctaacttggaaaataaacaaccagttgagtcgacatctgcaaaatcttgttctccaagtcctgtgtctcctcaggtgcagccacaagcagcagataccatcagtgattctgttgctgtcccggcatcactgctgggcatgaggagagggctgaactcaagattggaagcaactgcagcctcctcagttaaaacacgtatgcaaaaacttgcagagcaacggcgccgttgggataatgatgatatgacagatgacattcctgaaagctcactcttctcaccaatgccatcagaggaaaaggctgcttcccctcccagacctctgctttcaaatgcctcggcaactccagttggcagaaggggccgtctggccaatcttgctgcaactatttgctcctgggaagatgatgtaaatcactcatttgcaaaacaaaacagtgtacaagaacagcctggtaccgcttgtttatccaaattttcctctgcaagtggagcatctgctaggatcaatagcagcagtgttaagcaggaagctacattctgttcccaaagggatggcgatgcctctttgaataaagccctatcctcaagtgctgatgatgcgtctttggttaatgcctcaatttccagctctgtgaaagctacttctccagtgaaatctactacatctatcactgatgctaaaagttgtgagggacaaaatcctgagctacttccaaaaactcctattagtcctctgaaaacgggggtatcgaaaccaattgtgaagtcaactttatcccagacagttccatccaagggagaattaagtagagaaatttgtctgcaatctcaatctaaagacaaatctacgacaccaggaggaacaggaattaagcctttcctggaacgctttggagagcgttgtcaagaacatagcaaagaaagtccagctcgtagcacaccccacagaacccccattattactccaaatacaaaggccatccaagaaagattattcaagcaagacacatcttcatctactacccatttagcacaacagctcaagcaggaacgtcaaaaagaactagcatgtcttcgtggccgatttgacaagggcaatatatggagtgcagaaaaaggcggaaactcaaaaagcaaacaactagaaaccaaacaggaaactcactgtcagagcactcccctcaaaaaacaccaaggtgtttcaaaaactcagtcacttccagtaacagaaaaggtgaccgaaaaccagataccagccaaaaattctagtacagaacctaaaggtttcactgaatgcgaaatgacgaaatctagccctttgaaaataacattgtttttagaagaggacaaatccttaaaagtaacatcagacccaaaggttgagcagaaaattgaagtgatacgtgaaattgagatgagtgtggatgatgatgatatcaatagttcgaaagtaattaatgacctcttcagtgatgtcctagaggaaggtgaactagatatggagaagagccaagaggagatggatcaagcattagcagaaagcagcgaagaacaggaagatgcactgaatatctcctcaatgtctttacttgcaccattggcacaaacagttggtgtggtaagtccagagagtttagtgtccacacctagactggaattgaaagacaccagcagaagtgatgaaagtccaaaaccaggaaaattccaaagaactcgtgtccctcgagctgaatctggtgatagccttggttctgaagatcgtgatcttctttacagcattgatgcatatagatctcaaagattcaaagaaacagaacgtccatcaataaagcaggtgattgttcggaaggaagatgttacttcaaaactggatgaaaaaaataatgcctttccttgtcaagttaatatcaaacagaaaatgcaggaactcaataacgaaataaatatgcaacagacagtgatctatcaagctagccaggctcttaactgctgtgttgatgaagaacatggaaaagggtccctagaagaagctgaagcagaaagacttcttctaattgcaactgggaagagaacacttttgattgatgaattgaataaattgaagaacgaaggacctcagaggaagaataaggctagtccccaaagtgaatttatgccatccaaaggatcagttactttgtcagaaatccgcttgcctctaaaagcagattttgtctgcagtacggttcagaaaccagatgcagcaaattactattacttaattatactaaaagcaggagctgaaaatatggtagccacaccattagcaagtacttcaaactctcttaacggtgatgctctgacattcactactacatttactctgcaagatgtatccaatgactttgaaataaatattgaagtttacagcttggtgcaaaagaaagatccctcaggccttgataagaagaaaaaaacatccaagtccaaggctattactccaaagcgactcctcacatctataaccacaaaaagcaacattcattcttcagtcatggccagtccaggaggtcttagtgctgtgcgaaccagcaacttcgcccttgttggatcttacacattatcattgtcttcagtaggaaatactaagtttgttctggacaaggtcccctttttatcttctttggaaggtcatatttatttaaaaataaaatgtcaagtgaattccagtgttgaagaaagaggttttctaaccatatttgaagatgttagtggttttggtgcctggcatcgaagatggtgtgttctttctggaaactgtatatcttattggacttatccagatgatgagaaacgcaagaatcccataggaaggataaatctggctaattgtaccagtcgtcagatagaaccagccaacagagaattttgtgcaagacgcaacacttttgaattaattactgtccgaccacaaagagaagatgaccgagagactcttgtcagccaatgcagggacacactctgtgttaccaagaactggctgtctgcagatactaaagaagagcgggatctctggatgcaaaaactcaatcaagttcttgttgatattcgcctctggcaacctgatgcttgctacaaacctattggaaagccttaaaccgggaaatttccatgctatctagaggtttttgatgtcatcttaagaaacacacttaagagcatcagatttactgattgcattttatgctttaagtacgaaagggtttgtgccaatattcactacgtattatgcagtatttatatcttttgtatgtaaaactttaactgatttctgtcattcatcaatgagtagaagtaaatacattatagttgattttgctaaatcttaatttaaaagcctcattttcctagaaatctaattattcagttattcatgacaatatttttttaaaagtaagaaattctgagttgtcttcttggagctgtaggtcttgaagcagcaacgtctttcaggggttggagacagaaacccattctccaatctcagtagttttttcgaaaggctgtgatcatttattgatcgtgatatgacttgttactagggtactgaaaaaaatgtctaaggcctttacagaaacatttttagtaatgaggatgagaactttttcaaatagcaaatatatattggcttaaagcatgaggctgtcttcagaaaagtgatgtggacataggaggcaatgtgtgagacttgggggttcaatattttatatagaagagttaataagcacatggtttacatttactcagctactatatatgcagtgtggtgcacattttcacagaattctggcttcattaagatcattatttttgctgcgtagcttacagacttagcatattagttttttctactcctacaagtgtaaattgaaaaatctttatattaaaaaagtaaactgttatgaagctgctatgtactaataatactttgcttgccaaagtgtttgggttttgttgttgtttgtttgtttgtttgtttttggttcatgaacaacagtgtctagaaacccattttgaaagtggaaaattattaagtcacctatcacctttaaacgcctttttttaaaattataaaatattgtaaagcagggtctcaacttttaaatacactttgaacttcttctctgaattattaaagttctttatgacctcatttataaacactaaattctgtcacctcctgtcattttattttttattcattcaaatgtattttttcttgtgcatattataaaaatatattttatgagctcttactcaaataaatacctgtaaatgtctaaaggaa

SEQ ID NO: 1095 - DNA, 4661 bp, Homo sapiens
  source 1..4661: mol_type = unassigned DNA
ggctcggcgctgaaattcaaatttgaacggctgcagaggccgagtccgtcactggaagccgagaggagaggacagctggttgtgggagagttcccccgcctcagactcctggttttttccaggagacacactgagctgagactcacttttctcttcctgaatttgaaccaccgtttccatcgtctcgtagtccgacgcctggggcgatggatccgtttacggagaaactgctggagcgaacccgtgccaggcgagagaatcttcagagaaaaatggctgagaggcccacagcagctccaaggtctatgactcatgctaagcgagctagacagccactttcagaagcaagtaaccagcagcccctctctggtggtgaagagaaatcttgtacaaaaccatcgccatcaaaaaaacgctgttctgacaacactgaagtagaagtttctaacttggaaaataaacaaccagttgagtcgacatctgcaaaatcttgttctccaagtcctgtgtctcctcaggtgcagccacaagcagcagataccatcagtgattctgttgctgtcccggcatcactgctgggcatgaggagagggctgaactcaagattggaagcaactgcagcctcctcagttaaaacacgtatgcaaaaacttgcagagcaacggcgccgttgggataatgatgatatgacagatgacattcctgaaagctcactcttctcaccaatgccatcagaggaaaaggctgcttcccctcccagacctctgctttcaaatgcctcggcaactccagttggcagaaggggccgtctggccaatcttgctgcaactatttgctcctgggaagatgatgtaaatcactcatttgcaaaacaaaacagtgtacaagaacagcctggtaccgcttgtttatccaaattttcctctgcaagtggagcatctgctaggatcaatagcagcagtgttaagcaggaagctacattctgttcccaaagggatggcgatgcctctttgaataaagccctatcctcaagtgctgatgatgcgtctttggttaatgcctcaatttccagctctgtgaaagctacttctccagtgaaatctactacatctatcactgatgctaaaagttgtgagggacaaaatcctgagctacttccaaaaactcctattagtcctctgaaaacgggggtatcgaaaccaattgtgaagtcaactttatcccagacagttccatccaagggagaattaagtagagaaatttgtctgcaatctcaatctaaagacaaatctacgacaccaggaggaacaggaattaagcctttcctggaacgctttggagagcgttgtcaagaacatagcaaagaaagtccagctcgtagcacaccccacagaacccccattattactccaaatacaaaggccatccaagaaagattattcaagcaagacacatcttcatctactacccatttagcacaacagctcaagcaggaacgtcaaaaagaactagcatgtcttcgtggccgatttgacaagggcaatatatggagtgcagaaaaaggcggaaactcaaaaagcaaacaactagaaaccaaacaggaaactcactgtcagagcactcccctcaaaaaacaccaaggtgtttcaaaaactcagtcacttccagtaacagaaaaggtgaccgaaaaccagataccagccaaaaattctagtacagaacctaaagaagtgatacgtgaaattgagatgagtgtggatgatgatgatatcaatagttcgaaagtaattaatgacctcttcagtgatgtcctagaggaaggtgaactagatatggagaagagccaagaggagatggatcaagcattagcagaaagcagcgaagaacaggaagatgcactgaatatctcctcaatgtctttacttgcaccattggcacaaacagttggtgtggtaagtccagagagtttagtgtccacacctagactggaattgaaagacaccagcagaagtgatgaaagtccaaaaccaggaaaattccaaagaactcgtgtccctcgagctgaatctggtgatagccttggttctgaagatcgtgatcttctttacagcattgatgcatatagatctcaaagattcaaagaaacagaacgtccatcaataaagcaggtgattgttcggaaggaagatgttacttcaaaactggatgaaaaaaataatgcctttccttgtcaagttaatatcaaacagaaaatgcaggaactcaataacgaaataaatatgcaacagacagtgatctatcaagctagccaggctcttaactgctgtgttgatgaagaacatggaaaagggtccctagaagaagctgaagcagaaagacttcttctaattgcaactgggaagagaacacttttgattgatgaattgaataaattgaagaacgaaggacctcagaggaagaataaggctagtccccaaagtgaatttatgccatccaaaggatcagttactttgtcagaaatccgcttgcctctaaaagcagattttgtctgcagtacggttcagaaaccagatgcagcaaattactattacttaattatactaaaagcaggagctgaaaatatggtagccacaccattagcaagtacttcaaactctcttaacggtgatgctctgacattcactactacatttactctgcaagatgtatccaatgactttgaaataaatattgaagtttacagcttggtgcaaaagaaagatccctcaggccttgataagaagaaaaaaacatccaagtccaaggctattactccaaagcgactcctcacatctataaccacaaaaagcaacattcattcttcagtcatggccagtccaggaggtcttagtgctgtgcgaaccagcaacttcgcccttgttggatcttacacattatcattgtcttcagtaggaaatactaagtttgttctggacaaggtcccctttttatcttctttggaaggtcatatttatttaaaaataaaatgtcaagtgaattccagtgttgaagaaagaggttttctaaccatatttgaagatgttagtggttttggtgcctggcatcgaagatggtgtgttctttctggaaactgtatatcttattggacttatccagatgatgagaaacgcaagaatcccataggaaggataaatctggctaattgtaccagtcgtcagatagaaccagccaacagagaattttgtgcaagacgcaacacttttgaattaattactgtccgaccacaaagagaagatgaccgagagactcttgtcagccaatgcagggacacactctgtgttaccaagaactggctgtctgcagatactaaagaagagcgggatctctggatgcaaaaactcaatcaagttcttgttgatattcgcctctggcaacctgatgcttgctacaaacctattggaaagccttaaaccgggaaatttccatgctatctagaggtttttgatgtcatcttaagaaacacacttaagagcatcagatttactgattgcattttatgctttaagtacgaaagggtttgtgccaatattcactacgtattatgcagtatttatatcttttgtatgtaaaactttaactgatttctgtcattcatcaatgagtagaagtaaatacattatagttgattttgctaaatcttaatttaaaagcctcattttcctagaaatctaattattcagttattcatgacaatatttttttaaaagtaagaaattctgagttgtcttcttggagctgtaggtcttgaagcagcaacgtctttcaggggttggagacagaaacccattctccaatctcagtagttttttcgaaaggctgtgatcatttattgatcgtgatatgacttgttactagggtactgaaaaaaatgtctaaggcctttacagaaacatttttagtaatgaggatgagaactttttcaaatagcaaatatatattggcttaaagcatgaggctgtcttcagaaaagtgatgtggacataggaggcaatgtgtgagacttgggggttcaatattttatatagaagagttaataagcacatggtttacatttactcagctactatatatgcagtgtggtgcacattttcacagaattctggcttcattaagatcattatttttgctgcgtagcttacagacttagcatattagttttttctactcctacaagtgtaaattgaaaaatctttatattaaaaaagtaaactgttatgaagctgctatgtactaataatactttgcttgccaaagtgtttgggttttgttgttgtttgtttgtttgtttgtttttggttcatgaacaacagtgtctagaaacccattttgaaagtggaaaattattaagtcacctatcacctttaaacgcctttttttaaaattataaaatattgtaaagcagggtctcaacttttaaatacactttgaacttcttctctgaattattaaagttctttatgacctcatttataaacactaaattctgtcacctcctgtcattttattttttattcattcaaatgtattttttcttgtgcatattataaaaatatattttatgagctcttactcaaataaatacctgtaaatgtctaaaggaa

SEQ ID NO: 1096 - DNA, 596 bp, Homo sapiens
  source 1..596: mol_type = unassigned DNA
gtgcgggccggggtcgccgcggctgcggcctgctgtggttgaaactgctggagcgaacccgtgccaggcgagagaatcttcagagaaaaatggctgagaggcccacagcagctccaaggtctatgactcatgctaagcgagctagacagccactttcagaagcaagtaaccagcagcccctctctggtggtgaagagaaatcttgtacaaaaccatcgccatcaaaaaaacgctgttctgacaacactgaagtagaagtttctaacttggaaaataaacaaccagttgagtcgacatctgcaaaatcttgttctccaagtcctgtgtctcctcaggtgcagccacaagcagcagataccatcagtgattctgttgctgtcccggcatcactgctgggcatgaggagagggctgaactcaagattggaagcaactgcagcctcctcagttaaaacacgtatgcaaaaacttgcagagcaacggcgccgttgggataatgatgatatgacagatgacattcctgaaagctcactcttctcaccaatgccatcagaggaaaaggctgcttcccctcccagacctctgctttcaaatgcc

SEQ ID NO: 1097 - DNA, 463 bp, Homo sapiens
  source 1..463: mol_type = unassigned DNA
gtttcggtcctacagataaaactcagggaggaaggctttgagtctgtcctaaaaggctgttgcgagaggtctttcagcccccgtttttaccatgtccctctgcagtcctggcgcagcaagagtgaggcgcaggcctgcggaacgggtcctgctggaagcagctggaatgccctgcagggcggggtccggggccggtgactcagtgcggctgccgccgggaaaggcagtaggatgtgtgatttgcggagttcacgcagcccgcaggggagatgctaatgaaatgacagcaaaacgttaaaataagcagaaactgctggagcgaacccgtgccaggcgagagaatcttcagagaaaaatggctgagaggcccacagcagctccaaggtctatgactcatgctaagcgagctagacagccactttcagaagcaagtaaccagcagcccctctctggtggtgaaggt

SEQ ID NO: 1098 - DNA, 569 bp, Homo sapiens
  source 1..569: mol_type = unassigned DNA
aaagcctgcaaagtgtgtactggcatctagtgacaatggcaaaaccaacttcagggcagtggtataggcagaagatgacattcctgaaagctcactcttctcaccaatgccatcagaggaaaaggctgcttcccctcccagacctctgctttcaaatgcctcggcaactccagttggcagaaggggccgtctggccaatcttgctgcaactatttgctcctgggaagatgatgtaaatcactcatttgcaaaacaaaacagtgtacaagaacagcctggtaccgcttgtttatccaaattttcctctgcaagtggagcatctgctaggatcaatagcagcagtgttaagcaggaagctacattctgttcccaaagggatggcgatgcctctttgaataaagccctatcctcaagtgctgatgatgcgtctttggttaatgcctcaatttccagctctgtgaaagctacttctccagtgaaatctactacatctatcactgatgctaaaagttgtgagggacaaaatcctgagctacttccaaaaactcctattagtcctctgaaaacgg

SEQ ID NO: 1099 - DNA, 557 bp, Homo sapiens
  source 1..557: mol_type = unassigned DNA
aaattttcctctgcaagtggagcatctgctaggatcaatagcagcagtgttaagcaggaagctacattctgttcccaaagggatggcgatgcctctttgaataaagccctatcctcaagtgctgatgatgcgtctttggttaatgcctcaatttccagctctgtgtgttttcatgtttcagaaagctacttctccagtgaaatctactacatctatcactgatgctaaaagttgtgagggacaaaatcctgagctacttccaaaaactcctattagtcctctgaaaacgggggtatcgaaaccaattgtgaagtcaactttatcccagacagttccatccaagggagaattaagtagagaaatttgtctgcaatctcaatctaaagacaaatctacgacaccaggaggaacaggaattaagcctttcctggaacgctttggagagcgttgtcaagaacatagcaaagaaagtccagctcgtagcacaccccacagaacccccattattactccaaatacaaaggccatccaagaaagattattcaagcaagacacat

SEQ ID NO: 1100 - DNA, 716 bp, Homo sapiens
  source 1..716: mol_type = unassigned DNA
aattttcctctgcaagtggagcatctgctaggatcaatagcagcagtgttaagcaggaagctacattctgttcccaaagggatggcgatgcctctttgaataaagccctatcctcaagtgctgatgatgcgtctttggttaatgcctcaatttccagctctgtggtaaaaagctacttctccagtgaaatctactacatctatcactgatgctaaaagttgtgagggacaaaatcctgagctacttccaaaaactcctattagtcctctgaaaacgggggtatcgaaaccaattgtgaagtcaactttatcccagacagttccatccaagggagaattaagtagagaaatttgtctgcaatctcaatctaaagacaaatctacgacaccaggaggaacaggaattaagcctttcctggaacgctttggagagcgttgtcaagaacatagcaaagaaagtccagctcgtagcacaccccacagaacccccattattactccaaatacaaaggccatccaagaaagattattcaagcaagacacatcttcatctactacccatttagcacaacagctcaagcaggaacgtcaaaaagaactagcatgtcttcgtggccgatttgacaagggcaatatatggagtgcagaaaaaggcggaaactcaaaaagcaaacaactagaaaccaaacaggaaactcactgtcagagcactcccct

SEQ ID NO: 1101 - DNA, 580 bp, Homo sapiens
  source 1..580: mol_type = unassigned DNA
gtctttggttaatgcctcaatttccagctctgtggtaaaaagctacttctccagtgaaatctactacatctatcactgatgctaaaagttgtgagggacaaaatcctgagctacttccaaaaactcctattagtcctctgaaaacgggggtatcgaaaccaattgtgaagtcaactttatcccagacagttccatccaagggagaattaagtagagaaatttgtctgcaatctcaatctaaagacaaatctacgacaccaggaggaacaggaattaagcctttcctggaacgctttggagagcgttgtcaagaacatagcaaagaaagtccagctcgtagcacaccccacagaacccccattattactccaaatacaaaggccatccaagaaagattattcaagcaagacacatcttcatctactacccatttagcacaacagctcaagcaggaaactcactgtcagagcactcccctcaaaaaacaccaaggtgtttcaaaaactcagtcacttccagtaacagaaaaggtgaccgaaaaccagataccagccaaaaattctagtacagaacctaaagg

SEQ ID NO: 1102 - DNA, 607 bp, Homo sapiens
  source 1..607: mol_type = unassigned DNA
aatttccagctctgtgaaagctacttctccagtgaaatctactacatctatcactgatgctaaaagttgtgagggacaaaatcctgagctacttccaaaaactcctattagtcctctgaaaacgggggtatcgaaaccaattgtgaagtcaactttatcccagacagttccatccaagggagaattaagtagagaaatttgtctgcaatctcaatctaaagacaaatctacgacaccaggaggaacaggaattaagcctttcctggaacgctttggagagcgttgtcaagaacatagcaaagaaagtccagctcgtagcacaccccacagaacccccattattactccaaatacaaaggccatccaagaaagattattcaagcaagacacatcttcatctactacccatttagcacaacagctcaagcaggaacgtcaaaaagaactagcatgtcttcgtggccgatttgacaagggcaatatatggagtgcagaaaaaggcggaaactcaaaaagcaaacaactagaaaccaaacaggtttcactgaatgcgaaatgacgaaatctagccctttgaaaataacattgtttttagaagaggacaaat

SEQ ID NO: 1103 - DNA, 707 bp, Homo sapiens
  source 1..707: mol_type = unassigned DNA
tcaagaacatagcaaagaaagtccagctcgtagcacaccccacagaacccccattattactccaaatacaaaggccatccaagaaagattattcaagcaagatgtatccaatgactttgaaataaatattgaagtttacagcttggtgcaaaagaaagatccctcaggccttgataagaagaaaaaaacatccaagtccaaggctattactccaaagcgactcctcacatctataaccacaaaaagcaacattcattcttcagtcatggccagtccaggaggtcttagtgctgtgcgaaccagcaacttcgcccttgttggatcttacacattatcattgtcttcagtaggaaatactaagtttgttctggacaaggtcccctttttatcttctttggaaggtcatatttatttaaaaataaaatgtcaagtgaattccagtgttgaagaaagaggttttctaaccatatttgaagatgttagtggttttggtgcctggcatcgaagatggtgtgttctttctggaaactgtatatcttattggacttatccagatgatgagaaacgcaagaatcccataggaaggataaatctggctaattgtaccagtcgtcagatagaaccagccaacagagaattttgtgcaagacgcaacacttttgaattaattactgtccgaccacaaagagaagatgaccgagagactc

SEQ ID NO: 1104 - DNA, 829 bp, Homo sapiens
  source 1..829: mol_type = unassigned DNA
gtccaaaaccaggaaaattccaaagaactcgtgtccctcgagctgaatctggtgatagccttggttctgaagatcgtgatcttctttacagatctcaaagattcaaagaaacagaacgtccatcaataaagcaggtgattgttcggaaggaagatgttacttcaaaactggatgaaaaaaataatgcctttccttgtcaagttaatatcaaacagaaaatgcaggaactcaataacgaaataaatatgcaacagacagtgatctatcaagctagccaggctcttaactgctgtgttgatgaagaacatggaaaagggtccctagaagaagctgaagcagaaagacttcttctaattgcaactgggaagagaacacttttgattgatgaattgaataaattgaagaacgaaggacctcagaggaagaataaggctagtccccaaagtgaatttatgccatccaaaggatcagttactttgtcagaaatccgcttgcctctaaaagcagattttgtctgcagtacggttcagaaaccagatgcagcaaattactattacttaattatactaaaagcaggagctgaaaatatggtagccacaccattagcaagtacttcaaactctcttaacggtgatgctctgacattcactactacatttactctgcaagatgtatccaatgactttgaaataaatattgaagtttacagcttggtgcaaaagaaagatccctcaggccttgataagaagaaaaaaacatccaagtccaaggctattactccaaagcgactcctcacatctataaccacaaaaagcaacattcattcttc

SEQ ID NO: 1105 - DNA, 757 bp, Homo sapiens
  source 1..757: mol_type = unassigned DNA
ttatgccatccaaaggatcagttactttgtcagaaatccgcttgcctctaaaagcagattttgtctgcagtacggttcagaaaccagatgcagcaaattactattacttaattatactaaaagcaggagctgaaaatatggtagccacaccattagcaagtacttcaaactctcttaacggtgatgctctgacattcactactacatttactctgcaagatgtatccaatgactttgaaataaatattgaagtttacagcttggtgcaaaagaaagatccctcaggccttgataagaagaaaaaaacatccaagtccaaggctattactccaaagcgactcctcacatctataaccacaaaaagcaacattcattcttcagtcatggccagtccaggaggtcttagtgctgtgcgaaccagcaacttcgcccttgttggatcttacacattatcattgtcttcagtaggaaatactaagtttgttctggacaagataaattatgatgtaagagagcgagagctactgggctatttgttccaggaaaaggtcccctttttatcttctttggaaggtcatatttatttaaaaataaaatgtcaagtgaattccagtgttgaagaaagaggttttctaaccatatttgaagatgttagtggttttggtgcctggcatcgaagatggtgtgttctttctggaaactgtatatcttattggacttatccagatgatgagaaacgcaagaatcccataggaag

SEQ ID NO: 1106 - DNA, 2078 bp, Homo sapiens
  source 1..2078: mol_type = unassigned DNA
ctttcaccagtgatgcataagaaactgtattactcactccctaaccaatcaacagaggttgttactgttttttccagacttagccaatctaaggttttaaattggtatgttctatttttatttttaaaaattctaatagagttgacacacttattggctgttggctcatgtgtgcctatatgtgtttcttttcccattttcaggaccatttggtctcgtgaatgttttcctccactttgactcgtatcataggaattcatggctgccaacaatccagggcagttgtctgcccttatctttcatagatatataaagaaatatttacacatgaaatccaatgtctaggtttccttttatagaaaggggagaagtgggtaagttgtagataaaaggcacttgagtgtgtttctcattgttatagctggttttggtacctggggctcattatactgttgtttgtattttttatttgaagttcaccataataaagagctttataggatagttggcaagagctaccagttgatatttttgggttttatttttatgtctagctaggaacaataataaatgttaaatatgtttctctaagcccagtgtaactaaattttaacttttaaataatagctttttaatatttaatttgtaccaacttaaatgctgcttaatgcttactgacttaaatagtcttattttctactaatttctcttaatttgtttttaaagaatcccataggaaggataaatctggctaattgtaccagtcgtcagatagaaccagccaacagagaattttgtgcaagacgcaacacttttgaattaattactgtccgaccacaaagagaagatgaccgagagactcttgtcagccaatgcagggacacactctgtgttaccaagaactggctgtctgcagatactaaagaagagcgggatctctggatgcaaaaactcaatcaagttcttgttgatattcgcctctggcaacctgatgcttgctacaaacctattggaaagccttaaaccgggaaatttccatgctatctagaggtttttgatgtcatcttaagaaacacacttaagagcatcagatttactgattgcattttatgctttaagtacgaaagggtttgtgccaatattcactacgtattatgcagtatttatatcttttgtatgtaaaactttaactgatttctgtcattcatcaatgagtagaagtaaatacattatagttgattttgctaaatcttaatttaaaagcctcattttcctagaaatctaattattcagttattcatgacaatatttttttaaaagtaagaaattctgagttgtcttcttggagctgtaggtcttgaagcagcaacgtctttcaggggttggagacagaaacccattctccaatctcagtagttttttcgaaaggctgtgatcatttattgatcgtgatatgacttgttactagggtactgaaaaaaatgtctaaggcctttacagaaacatttttagtaatgaggatgagaactttttcaaatagcaaatatatattggcttaaagcatgaggctgtcttcagaaaagtgatgtggacataggaggcaatgtgtgagacttgggggttcaatattttatatagaagagttaataagcacatggtttacatttactcagctactatatatgcagtgtggtgcacattttcacagaattctggcttcattaagatcattatttttgctgcgtagcttacagacttagcatattagttttttctactcctacaagtgtaaattgaaaaatctttatattaaaaaagtaaactgttatgaagctgctatgtactaataatactttgcttgccaaagtgtttgggttttgttgttgtttgtttgtttgtttgtttttggttcatgaacaacagtgtctagaaacccattttgaaagtggaaaattattaagtcacctatcacctttaaacgcctttttttaaaattataaaatattgtaaagcagggtctcaacttttaaatacactttgaacttcttctctgaattattaaagttctttatgacctc

SEQ ID NO: 1107 - DNA, 961 bp, Homo sapiens
  source 1..961: mol_type = unassigned DNA
tctctgttatcacaaatgcatttgtcatagcgataacatctgactttatccctcgcttggtgtatgcttataagtatggaccttgtgcaggccaaggagaagctgggcaaaagtgcatggttggctatgtgaatgccagcttgtctgtatttcgaatttctgactttgagaaccgatctgagcctgaatctgatggcagtgagttctcggggactcctcttaagtactgcagataccgggactaccgtgacccgcctcattcactggtgccctatggctacacactgcagttttggcatgtcctagctgctcgattagcttttatcattgtctttgagcacctcgtgttttgtataaagcacctcatttcatatctgatcccagacctcccaaaagacctaagggatcgaatgagaagagagaagtacttgattcaggagatgatgtatgaagcagaactggaacgtctccagaaggaacgaaaggagaggaagaagaatggaaaagcacaccacaacgagtggccgtgaccataaaatagtccctttccaggccaaggacctgaattctgtttacttcttctggctgtgcaaaagcacactcaagtgaatgactaaaaatgcaaccacagtgcatgttgcagataccggcggccgcaggaggggcagcatccagtagaggactggcgttggagtcacactgctgtgaaatcacgttgcagtccagcgcacaattgctatctatccatagaccattcttgaccaagcaagcatgcacattatgggcagttacattctcaagtttttaaaatcaaggggaacttgtatactgggcctgtttttcagcctgtttgctaccttttttgcattctatcccatgtgaattttacagacactgggctaaaaagggtattcagacacatggacacacattcctagaatgtcatcatatggtcctaatt

SEQ ID NO: 1108 - DNA, 1301 bp, Homo sapiens
  source 1..1301: mol_type = unassigned DNA
tctctgttatcacaaatgcatttgtcatagcgataacatctgactttatccctcgcttggtgtatgcttataagtatggaccttgtgcaggccaaggagaagctgggcaaaagtgcatggttggctatgtgaatgccagcttgtctgtatttcgaatttctgactttgagaaccgatctgagcctgaatctgatggcagtgagttctcggggactcctcttaagtactgcagataccgggactaccgtgacccgcctcattcactggtgccctatggctacacactgcagttttggcatgtcctagctgctcgattagcttttatcattgtctttgagcacctcgtgttttgtataaagcacctcatttcatatctgatcccagacctcccaaaagacctaagggatcgaatgagaagagagaagtacttgattcaggagatgatgtatgaagcagaactggaacgtctccagaaggaacgaaaggagaggaagaagaatggaaaagcacaccacaacgagtggccgtgaccataaaatagtccctttccaggccaaggacctgaattctgtttacttcttctggctgtgcaaaagcacactcaagtgaatgactaaaaatgcaaccacagtgcatgttgcagataccggcggccgcaggaggggcagcatccagtagaggactggcgttggagtcacactgctgtgaaatcacgttgcagtccagcgcacaattgctatctatccatagaccattcttgaccaagcaagcatgcacattatgggcagttacattctcaagtttttaaaatcaaggggaacttgtatactgggcctgtttttcagcctgtttgctaccttttttgcattctatcccatgtgaattttacagacactgggctaaaaagggtattcagacacatggacacacattcctagaatgtcatcatatggtcctaattccatgtcaccaacaacacagacaagaccctgtttacaactttttctttccttttttttaattttagacctttctgagaagattattatatatgacatatctatagctatgtgtatggccatagatgtatttctgtgtgtacatatgtatagtcatgtattcctgcatatgtacatacaaatacagagatatataaagtacatagaaattccttacttgtaaatagccaaaaagtactgacatgagtgaattttcacatttaaatagtcatcaatatgaagccatgattaatgcttgtataatgtgatgcaataaaatttaaaataaatttctgcacatgg

SEQ ID NO: 1109 - DNA, 1315 bp, Homo sapiens
  source 1..1315: mol_type = unassigned DNA
tctctgttatcacaaatgcatttgtcatagcgataacatctgactttatccctcgcttggtgtatgcttataagtatggaccttgtgcaggccaaggagaagctgggcaaaagtgcatggttggctatgtgaatgccagcttgtctgtatttcgaatttctgactttgagaaccgatctgagcctgaatctgatggcagtgagttctcggggactcctcttaagtactgcagataccgggactaccgtgacccgcctcattcactggtgccctatggctacacactgcagttttggcatgtcctagctgctcgattagcttttatcattgtctttgagcacctcgtgttttgtataaagcacctcatttcatatctgatcccagacctcccaaaagacctaagggatcgaatgagaagagagaagtacttgattcaggagatgatgtatgaagcagaactggaacgtctccagaaggaacgaaaggagaggaagaagaatggaaaagcacaccacaacgagtggccgtgaccataaaatagtccctttccaggccaaggacctgaattctgtttacttcttctggctgtgcaaaagcacactcaagtgaatgactaaaaatgcaaccacagtgcatgttgcagataccggcggccgcaggaggggcagcatccagtagaggactggcgttggagtcacactgctgtgaaatcacgttgcagtccagcgcacaattgctatctatccatagaccattcttgaccaagcaagcatgcacattatgggcagttacattctcaagtttttaaaatcaaggggaacttgtatactgggcctgtttttcagcctgtttgctaccttttttgcattctatcccatgtgaattttacagacactgggctaaaaagggtattcagacacatggacacacattcctagaatgtcatcatatggtcctaattccatgtcaccaacaacacagacaagaccctgtttacaactttttctttccttttttttaattttagacctttctgagaagattattatatatgacatatctatagctatgtgtatggccatagatgtatttctgtgtgtacatatgtatagtcatgtattcctgcatatgtacatacaaatacagagatatataaagtacatagaaattccttacttgtaaatagccaaaaagtactgacatgagtgaattttcacatttaaatagtcatcaatatgaagccatgattaatgcttgtataatgtgatgcaataaaatttaaaataaatttctgcacatggaatattttcagctg

SEQ ID NO: 1110 - DNA, 1385 bp, Homo sapiens
  source 1..1385: mol_type = unassigned DNA
atggcctccctcaccgcatacgacaaagatgtgagcagcggaagttataacctttcctctgcaacgacgggcagctactacagttgtgtcagccagatcaccataggttatgacgttgcggggcctgtggcaattgggcttacccactggaaaaatccatacgtacaaggcagaccaaccctcccatcagatctgcctctcttcgtctccaaagatgcaggcatccctgtgtaccaccgatccttcacccgcaagactgaccaggccacacctttgtcctgtccagcctcactgtctatcactccagtgccttcttacagcagtagcagccaggaaaccctgagtcaagacacaacaggtttaagtttatctattcatggggctgaaaagcgtttgcaaatccatcaacggcgaagtgtggcaagccgcccagcgtcacgtcgtcgcctgcctgtggtcaggcattcctcactcccaccaggcagaaggtcaataaaaatggaggcaagctcttctggaatcactaatggaaaaaccaaagtcttccacccagaaggaggtgtggatttgcaaggctaccagctggatatgcaaatactacctgacgggccaaagagtgatgtggacttttcagagattcttaatgcaatacaagaaatggccaaggatgtcaatattctttttgatgaattagaagctgtcagcagtccttgcaaagatgacgattctcttcttcaccctggaaacctgactagtacttcagatgatgccagcagattggaagccgggggagagacagtgccagaaagaaacaaatcaaatggactttactttcgagatggaaagtgtcgaattgactacatccttgtgtacagaaaatccaacccccagactgaaaagagagaagtatttgaaagaaacattagagcagaaggattgcaaatggagaaagagtcctctctaataaatagtgacattatctttgtgaagttgcatgccccatgggaagtccttggaagatatgcagaacaaatgaatgtaagaatgcctttcagttcaaactgtaactgacgatgggttttcttctcgactggcttcatttttgctgttcttccaggagaaaaatctattacctgccccgccgttacaagttcatgagcaggatcgataaacaaataagcaggtttcggagatggttacctaagaagccaatgaggctggacaaggagacactgccagacctggaggagaatgactgctacactgcccctttcagccagcaaaggatccatcacttcatcatacacaacaaagaaacgttcttcaacaatgccacaagaagtagaatcgtgcatcacattttacaaagaataaaatatgaagaa

SEQ ID NO: 1111 - DNA, 554 bp, Homo sapiens
  source 1..554: mol_type = unassigned DNA
actgatgttctctccggcagttccttccactctaaagagactccttttcatccctcttctcgcctttcctagcccagcctagtgcccaccctcccccgaccatgcctcccctgcacctggggagggggaggaccagtcctgggcgtgatgctctgagacggtggtgaaatccaccaggctgctttcactccggctcgctctccggagagtcctgttccagacttctcagggtttttacagcacaaacaactgcatacggcccgaggggaggctgaaaaggacttgtgtgtggtggttttattgcctgtcatcactttgctggcctcctcccgactggagcctggaggttcacagtggatttctttctgccgaagacaccaaggcactgaggaaggatcccttctccttctgttgactctttctatttttatggaaacctggaggaagacaattcaggactagttcagcagctcaaggaaggcctccaggatacaggcttcttctactgtcctaaacatgtttaagtttatctattcatggggctgaaaagcgtt

SEQ ID NO: 1112 - DNA, 571 bp, Homo sapiens
  source 1..571: mol_type = unassigned DNA
tttcactccggctcgctctccggagagtcctgttccagacttctcagggtttttacagcacaaacaactgcatacggcccgaggggaggctgaaaaggacttgtgtgtggtggttttattgcctgtcatcactttgctggcctcctcccgactggagcctggaggttcacagtggatttctttctgccgaagacaccaaggcactgaggaaggatcccttctccttctgttgactctttctatttttatggctccagctcattcctggctttagttgaacttttctgacattcttcatatagcatgcagtccagtggaccttcttctgctgagagcagtattgctggccaggctgtctgggttcaaagctaggctgtgcctcataaacatgacctttggtttaagtttatctattcatggggctgaaaagcgtttgcaaatccatcaacggcgaagtgtggcaagccgcccagcgtcacgtcgtcgcctgcctgtggtcaggcattcctcactcccaccaggcagaaggtcaataaaaatggaggcaagctcttctggaatcactaatgga

SEQ ID NO: 1113 - DNA, 3909 bp, Homo sapiens
  source 1..3909: mol_type = unassigned DNA
ctgttccagacttctcagggtttttacagcacaaacaactgcatacggcccgaggggaggctgaaaaggacttgtgtgtggtggttttattgcctgtcatcactttgctggcctcctcccgactggagcctggaggttcacagtggatttctttctgccgaagacaccaaggcactgaggaaggatcccttctccttctgttgactctttctatttttatggtttaagtttatctattcatggggctgaaaagcgtttgcaaatccatcaacggcgaagtgtggcaagccgcccagcgtcacgtcgtcgcctgcctgtggtcaggcattcctcactcccaccaggcagaaggtcaataaaaatggaggcaagctcttctggaatcactaatggaaaaaccaaagtcttccacccagtggccaaggatgtcaatattctttttgatgaattagaagctgtcagcagtccttgcaaagatgacgattctcttcttcaccctggaaacctgactagtacttcagatgatgccagcagattggaagccgggggagagacagtgccagaaagaaacaaatcaaatggactttactttcgagatggaaagtgtcgaattgactacatccttgtgtacagaaaatccaacccccagactgaaaagagagaagtatttgaaagaaacattagagcagaaggattgcaaatggagaaagagtcctctctaataaatagtgacattatctttgtgaagttgcatgccccatgggaagtccttggaagatatgcagaacaaatgaatgtaagaatgcctttcaggagaaaaatctattacctgccccgccgttacaagttcatgagcaggatcgataaacaaataagcaggtttcggagatggttacctaagaagccaatgaggctggacaaggagacactgccagacctggaggagaatgactgctacactgcccctttcagccagcaaaggatccatcacttcatcatacacaacaaagaaacgttcttcaacaatgccacaagaagtagaatcgtgcatcacattttacaaagaataaaatatgaagaaggaaaaaacaagattggtctgaatcgtttgcttaccaatggctcctatgaagctgcgtttcccctgcatgagggaagttatagaagtaaaaactccattcgaacccatggagcagaaaaccaccgacatctactctatgagtgctgggcctcctggggcgtgtggtataaataccaacctttggatcttgtaaggcggtactttggagagaagattgggttatattttgcctggttgggctggtacaccggcatgctcttcccagctgccttcattggattgtttgtctttttgtatggcgtcaccactctggatcacagccaagtcagtaaagaagtctgccaagctacagatatcatcatgtgtcctgtgtgtgataaatactgtccattcatgaggctgtcagacagctgtgtatatgccaaggtaacccacctttttgacaatggagccactgtcttctttgctgttttcatggcagtctgggcaacagttttcctggagttttggaaaagacggcgagcagtaattgcttatgactgggatttgatagactgggaagaagaggaggaagaaatacgaccccagtttgaagccaagtattccaagaaagagcggatgaatccaatttctggaaagccagaaccttatcaagcatttacagataaatgcagcagacttatcgtttctgcatctggaatattttttatgatctgcgtggtgattgctgccgtgttcgggatcgtcatttaccgggtggtgactgtcagcactttcgctgcctttaagtgggcgttaatcaggaataactctcaggttgcaaccacagggactgctgtgtgcatcaacttctgtatcattatgttgctgaatgtgctctatgaaaaagttgccctgcttctgacgaatttagaacagcctcgcacagagtctgagtgggagaacagcttcaccctgaaaatgtttctttttcagtttgtcaatctgaacagctccacattttacatcgcattcttcctcggaagatttacaggacacccaggtgcctacttgaggctgataaacaggtggagactagaagagtgccaccctagtggatgccttattgatctgtgtatgcaaatgggtattataatggtgctaaagcagacctggaataatttcatggaacttggctacccgttaattcagaattggtggactagaagaaaagtacgacaagaacatggacctgaaaggaaaataagtttcccacaatgggaaaaggactataaccttcagccgatgaatgcctatggactcttcgatgaatacttagaaatgattcttcagtttggattcacaactatctttgtggcagcttttcccctagcaccacttctggccttactgaataacataattgaaattcgacttgatgcttacaaatttgtcacacagtggaggagacctttagcttcaagggccaaagacataggaatttggtatggaattcttgaaggcattggaattctctctgttatcacaaatgcatttgtcatagcgataacatctgactttatccctcgcttggtgtatgcttataagtatggaccttgtgcaggccaaggagaagctgggcaaaagtgcatggttggctatgtgaatgccagcttgtctgtatttcgaatttctgactttgagaaccgatctgagcctgaatctgatggcagtgagttctcggggactcctcttaagtactgcagataccgggactaccgtgacccgcctcattcactggtgccctatggctacacactgcagttttggcatgtcctagctgctcgattagcttttatcattgtctttgagcacctcgtgttttgtataaagcacctcatttcatatctgatcccagacctcccaaaagacctaagggatcgaatgagaagagagaagtacttgattcaggagatgatgtatgaagcagaactggaacgtctccagaaggaacgaaaggagaggaagaagaatggaaaagcacaccacaacgagtggccgtgaccataaaatagtccctttccaggccaaggacctgaattctgtttacttcttctggctgtgcaaaagcacactcaagtgaatgactaaaaatgcaaccacagtgcatgttgcagataccggcggccgcaggaggggcagcatccagtagaggactggcgttggagtcacactgctgtgaaatcacgttgcagtccagcgcacaattgctatctatccatagaccattcttgaccaagcaagcatgcacattatgggcagttacattctcaagtttttaaaatcaaggggaacttgtatactgggcctgtttttcagcctgtttgctaccttttttgcattctatcccatgtgaattttacagacactgggctaaaaagggtattcagacacatggacacacattcctagaatgtcatcatatggtcctaattccatgtcaccaacaacacagacaagaccctgtttacaactttttctttccttttttttaattttagacctttctgagaagattattatatatgacatatctatagctatgtgtatggccatagatgtatttctgtgtgtacatatgtatagtcatgtattcctgcatatgtacatacaaatacagagatatataaagtacatagaaattccttacttgtaaatagccaaaaagtactgacatgagtgaattttcacatttaaatagtcatcaatatgaagccatgattaatgcttgtataatgtgatgcaataaaatttaaaataaatttctgcacatggaatattttcagctg

SEQ ID NO: 1114 - DNA, 3509 bp, Homo sapiens
  source 1..3509: mol_type = unassigned DNA
tttctgccgaagacaccaaggcactgaggaaggatcccttctccttctgttgactctttctatttttatggtttaagtttatctattcatggggctgaaaagcgtttgcaaatccatcaacggcgaagtgtggcaagccgcccagcgtcacgtcgtcgcctgcctgtggtcaggcattcctcactcccaccaggcagaaggtcaataaaaatggaggcaagctcttctggaatcactaatggaaaaaccaaagtcttccacccagaaggaggtgtggatttgcaaggctaccagctggatatgcaaatactacctgacgggccaaagagtgatgtggacttttcagagattcttaatgcaatacaagaaatggccaaggatgtcaatattctttttgatgaattagaagctgtcagcagtccttgcaaagatgacgattctcttcttcaccctggaaacctgactagtacttcagatgatgccagcagattggaagccgggggagagacagtgccagaaagaaacaaatcaaatggactttactttcgagatggaaagtgtcgaattgactacatccttgtgtacagaaaatccaacccccagactgaaaagagagaagtatttgaaagaaacattagagcagaaggattgcaaatggagaaagagtcctctctaataaatagtgacattatctttgtgaagttgcatgccccatgggaagtccttggaagatatgcagaacaaatgaatgtaagaatgcctttcaggagaaaaatctattacctgccccgccgttacaagttcatgagcaggatcgataaacaaataagcaggtttcggagatggttacctaagaagccaatgaggctggacaaggagacactgccagacctggaggagaatgactgctacactgcccctttcagccagcaaaggatccatcacttcatcatacacaacaaagaaacgttcttcaacaatgccacaagaagtagaatcgtgcatcacattttacaaagaataaaatatgaagaaggaaaaaacaagattggtctgaatcgtttgcttaccaatggctcctatgaagctgcgtttcccctgcatgagggaagttatagaagtaaaaactccattcgaacccatggagcagaaaaccaccgacatctactctatgagtgctgggcctcctggggcgtgtggtataaataccaacctttggatcttgtaaggcggtactttggagagaagattgggttatattttgcctggttgggctggtacaccggcatgctcttcccagctgccttcattggattgtttgtctttttgtatggcgtcaccactctggatcacagccaagtcagtaaagaagtctgccaagctacagatatcatcatgtgtcctgtgtgtgataaatactgtccattcatgaggctgtcagacagctgtgtatatgccaaggtaacccacctttttgacaatggagccactgtcttctttgctgttttcatggcagtctgggcaacagttttcctggagttttggaaaagacggcgagcagtaattgcttatgactgggatttgatagactgggaagaagaggaggaagaaatacgaccccagtttgaagccaagtattccaagaaagagcggatgaatccaatttctggaaagccagaaccttatcaagcatttacagataaatgcagcagacttatcgtttctgcatctggaatattttttatgatctgcgtggtgattgctgccgtgttcgggatcgtcatttaccgggtggtgactgtcagcactttcgctgcctttaagtgggcgttaatcaggaataactctcaggttgcaaccacagggactgctgtgtgcatcaacttctgtatcattatgttgctgaatgtgctctatgaaaaagttgccctgcttctgacgaatttagaacagcctcgcacagagtctgagtgggagaacagcttcaccctgaaaatgtttctttttcagtttgtcaatctgaacagctccacattttacatcgcattcttcctcggaagatttacaggacacccaggtgcctacttgaggctgataaacaggtggagactagaagagtgccaccctagtggatgccttattgatctgtgtatgcaaatgggtattataatggtgctaaagcagacctggaataatttcatggaacttggctacccgttaattcagaattggtggactagaagaaaagtacgacaagaacatggacctgaaaggaaaataagtttcccacaatgggaaaaggactataaccttcagccgatgaatgcctatggactcttcgatgaatacttagaaatgattcttcagtttggattcacaactatctttgtggcagcttttcccctagcaccacttctggccttactgaataacataattgaaattcgacttgatgcttacaaatttgtcacacagtggaggagacctttagcttcaagggccaaagacataggaatttggtatggaattcttgaaggcattggaattctctctgttatcacaaatgcatttgtcatagcgataacatctgactttatccctcgcttggtgtatgcttataagtatggaccttgtgcaggccaaggagaagctgggcaaaagtgcatggttggctatgtgaatgccagcttgtctgtatttcgaatttctgactttgagaaccgatctgagcctgaatctgatggcagtgagttctcggggactcctcttaagtactgcagataccgggactaccgtgacccgcctcattcactggtgccctatggctacacactgcagttttggcatgtcctagctgctcgattagcttttatcattgtctttgagcacctcgtgttttgtataaagcacctcatttcatatctgatcccagacctcccaaaagacctaagggatcgaatgagaagagagaagtacttgattcaggagatgatgtatgaagcagaactggaacgtctccagaaggaacgaaaggagaggaagaagaatggaaaagcacaccacaacgagtggccgtgaccataaaatagtccctttccaggccaaggacctgaattctgtttacttcttctggctgtgcaaaagcacactcaagtgaatgactaaaaatgcaaccacagtgcatgttgcagataccggcggccgcaggaggggcagcatccagtagaggactggcgttggagtcacactgctgtgaaatcacgttgcagtccagcgcacaattgctatctatccatagaccattcttgaccaagcaagcatgcacattatgggcagttacattctcaagtttttaaaatcaaggggaacttgtatactgggcctgtttttcagcctgtttgctaccttttttgcattctatcccatgtgaattttacagacactgggctaaaaagggtattcagacacatggacacacattcctagaatgtcatcatatggtcctaatt

SEQ ID NO: 1115 - DNA, 537 bp, Homo sapiens
  source 1..537: mol_type = unassigned DNA
ttacagctagagctcttctctgacctcagatgttttccaaacacaaaatgaattttttagaacctacagaatgatcgataaacaaataagcaggtttcggagatggttacctaagaagccaatgaggctggacaaggagacactgccagacctggaggagaatgactgctacactgcccctttcagccagcaaaggatccatcacttcatcatacacaacaaagaaacgttcttcaacaatgccacaagaagtagaatcgtgcatcacattttacaaagaataaaatatgaagaaggaaaaaacaagattggtctgaatcgtttgcttaccaatggctcctatgaagctgcgtttcccctgcatgagggaagttatagaagtaaaaactccattcgaacccatggagcagaaaaccaccgacatctactctatgagtgctgggcctcctggggcgtgtggtataaataccaacctttggatcttgtaaggcggtactttggagagaagattgggttatattttgcctggttgggctg

SEQ ID NO: 1116 - DNA, 401 bp, Homo sapiens
  source 1..401: mol_type = unassigned DNA
tggtacaccggcatgctcttcccagctgccttcattggattgtttgtctttttgtatggcgtcaccactctggatcacagccaagtcagtaaagaagtctgccaagctacagatatcatcatgtgtcctgtgtgtgataaatactgtccattcatgaggctgtcagacagctgtgtatatgccaaggtaacccacctttttgacaatggagccactgtcttctttgctgttttcatggcagtctgggatctgcgtggtgattgctgccgtgttcgggatcgtcatttaccgggtggtgactgtcagcactttcgctgcctttaagtgggcgttaatcaggaataactctcaggttgcaaccacagggactgctgtgtgcatcaacttctgtatcattatgt

SEQ ID NO: 1117 - DNA, 2293 bp, Homo sapiens
  source 1..2293: mol_type = unassigned DNA
aacaataccttcctggtcctaaatataactatatccatacacatatgtaacccacctttttgacaatggagccactgtcttctttgctgttttcatggcagtctgggcaacagttttcctggagttttggaaaagacggcgagcagtaattgcttatgactgggatttgatagactgggaagaagaggagatctgcgtggtgattgctgccgtgttcgggatcgtcatttaccgggtggtgactgtcagcactttcgctgcctttaagtgggcgttaatcaggaataactctcaggttgcaaccacagggactgctgtgtgcatcaacttctgtatcattatgttgctgaatgtgctctatgaaaaagttgccctgcttctgacgaatttagaacagcctcgcacagagtctgagtgggagaacagcttcaccctgaaaatgtttctttttcagtttgtcaatctgaacagctccacattttacatcgcattcttcctcggaagatttacaggacacccaggtgcctacttgaggctgataaacaggtggagactagaagagtgccaccctagtggatgccttattgatctgtgtatgcaaatgggtattataatggtgctaaagcagacctggaataatttcatggaacttggctacccgttaattcagaattggtggactagaagaaaagtacgacaagaacatggacctgaaaggaaaataagtttcccacaatgggaaaaggactataaccttcagccgatgaatgcctatggactcttcgatgaatacttagaaatgattcttcagtttggattcacaactatctttgtggcagcttttcccctagcaccacttctggccttactgaataacataattgaaattcgacttgatgcttacaaatttgtcacacagtggaggagacctttagcttcaagggccaaagacataggaatttggtatggaattcttgaaggcattggaattctctctgttatcacaaatgcatttgtcatagcgataacatctgactttatccctcgcttggtgtatgcttataagtatggaccttgtgcaggccaaggagaagctgggcaaaagtgcatggttggctatgtgaatgccagcttgtctgtatttcgaatttctgactttgagaaccgatctgagcctgaatctgatggcagtgagttctcggggactcctcttaagtactgcagataccgggactaccgtgacccgcctcattcactggtgccctatggctacacactgcagttttggcatgtcctagctgctcgattagcttttatcattgtctttgagcacctcgtgttttgtataaagcacctcatttcatatctgatcccagacctcccaaaagacctaagggatcgaatgagaagagagaagtacttgattcaggagatgatgtatgaagcagaactggaacgtctccagaaggaacgaaaggagaggaagaagaatggaaaagcacaccacaacgagtggccgtgaccataaaatagtccctttccaggccaaggacctgaattctgtttacttcttctggctgtgcaaaagcacactcaagtgaatgactaaaaatgcaaccacagtgcatgttgcagataccggcggccgcaggaggggcagcatccagtagaggactggcgttggagtcacactgctgtgaaatcacgttgcagtccagcgcacaattgctatctatccatagaccattcttgaccaagcaagcatgcacattatgggcagttacattctcaagtttttaaaatcaaggggaacttgtatactgggcctgtttttcagcctgtttgctaccttttttgcattctatcccatgtgaattttacagacactgggctaaaaagggtattcagacacatggacacacattcctagaatgtcatcatatggtcctaattccatgtcaccaacaacacagacaagaccctgtttacaactttttctttccttttttttaattttagacctttctgagaagattattatatatgacatatctatagctatgtgtatggccatagatgtatttctgtgtgtacatatgtatagtcatgtattcctgcatatgtacatacaaatacagagatatataaagtacatagaaattccttacttgtaaatagccaaaaagtactgacatgagtgaattttcacatttaaatagtcatcaatatgaagccatgattaatgcttgtataatgtgatgcaataaaatttaaaataaatttctgcacatgg

SEQ ID NO: 1118 - DNA, 2780 bp, Homo sapiens
  source 1..2780: mol_type = unassigned DNA
actactccctctgcagtctcgcctgccgacttccttctgcgcgcctcgtaaaaccggggaagttcaatcattccgcagcgagccgcggcggccgcactgggcatgctcagtctccgggctccgctcggcaggcgagaggcgtcctccggctctgggctccggtcggtgggtgcctcggctcggctttccccggcgctggctgggctcagcggcccctgagcccaagcgacacacgccccgcggtccccgatccggcccctgggagagccgcgccgttctggaacccgggagcccccaacttcgcgccaagttcggagccgccttctgagggagacatgaaaaagatgagcaggaatgttttgctacaaatggaggaggaggaggacgacgacgatggggatatcggaagaatttaatggaaaacctgactccctcttttttaatgatggccagcgaagaattgactttgttctagtatatgaggatgaaagcagaaaagagaccaataaaaagggtacaaatgaaaaacaaaggaggaaaagacaagcatacgaatctaaccttatctgtcatggcctgcagttagaagcaacaagatcagtattggatgacaagcttgtatttgtaaaagtacacgcaccatgggaggtgttatgtacgtatgctgagataatgcacatcaaattgcctctgaaacccaatgatctgaaaaaccggtcctcagcctttggtacactcaactggtttaccaaagtcctcagtgtagacgaaagcatcatcaagccagagcaagagtttttcactgccccatttgagaagaaccggatgaatgatttttacatagttgatagagatgctttcttcaatccagccaccagaagccgcattgtttacttcatcctctctcgggtcaagtatcaagtgataaacaatgttagcaagtttgggatcaacagacttgtaaactctgggatctacaaggcagctttcccactccatgattgcaaattccgccgtcagtcagaggatcccagctgccctaatgaacggtaccttctgtacagagaatgggctcatcctcgaagcatatacaaaaagcagcccttggatcttatcaggaaatactatggagagaagattggaatctactttgcttggctgggctattacactcagatgcttctcctggccgcagttgtaggagtggcttgctttctctatggatatcttaatcaagataactgtacatggagcaaagaagtttgtcatcctgatattggtggcaagatcataatgtgtcctcagtgtgataggctttgtccattctggaaactcaatattacttgcgagtcctcaaagaaattgtgcatcttcgacagttttggaaccctggtctttgcagtatttatgggagtatgggatccatagaaagcaacttctcattccttcaagtttgatcatgagactacagcagttcagtcacatcttcagactccatttctagttcttcttgctctttctaccacatctgcagtgacttcctccactgaagtcttgaacttctcaaagtcatccatgaggttaccttgtttttggagttttggaagcgacgccaggcagaacttgagtatgaatgggatactgttgagttacagcaggaagaacaagcccgaccagaatacgaagcacgatgtactcacgtagtgataaatgagattactcaggaagaagaacgcattccctttactgcctggggaaaatgtatacggataaccctctgtgccagtgctgtctttttctggatcctattgatcatcgcttcagttattgggatcattgtctataggctctcggtgttcattgtattttctgcaaaacttcccaagaacattaatggaacagacccaatccagaaatacctgactccacagacagccacgtccatcacggcctccatcatcagctttataattatcatgattctgaacaccatatatgaaaaagtggcaattatgattactaacttcgaactcccaaggacccagactgattatgagaacagcctcaccatgaagatgttcttattccagtttgtcaactactactcttcatgcttctacatagcattctttaagggcaaatttgtaggctatccaggagacccagtttattggttgggaaaatacagaaatgaagagtgtgacccaggtggctgtcttcttgaactgacaactcagctgacaataatcatgggaggaaaagcaatctggaataacatacaagaagtattattgccctggatcatgaatctaattgggcgatttcacagagtttctggatcagaaaagataaccccacgatgggaacaggactaccatctgcagcctatgggcaaactgggattattttatgaatatcttgaaatgattattcagtttgggttcgtcaccttatttgtggcctcttttccactggcccctctgttggctctcgtgaacaatatattggaaataagagtggacgcatggaaactgaccacccagtttagacgcctggtaccagagaaagcccaagacattggagcatggcagcccatcatgcaaggaatagcaattctggctgtggtgaccaatgccatgatcatagctttcacgtcggacatgatcccccgcctagtgtactactggtccttctccgtccctccctacggggaccacacttcctacaccatggaagggtacatcaacaacactctctccatcttcaaagtcgcagacttc

SEQ ID NO: 1119 - DNA, 3558 bp, Homo sapiens
  source 1..3558: mol_type = unassigned DNA
cttctgcgcgcctcgtaaaaccggggaagttcaatcattccgcagcgagccgcggcggccgcactgggcatgctcagtctccgggctccgctcggcaggcgagaggcgtcctccggctctgggctccggtcggtgggtgcctcggctcggctttccccggcgctggctgggctcagcggcccctgagcccaagcgacacacgccccgcggtccccgatccggcccctgggagagccgcgccgttctggaacccgggagcccccaacttcgcgccaagttcggagccgccttctgagggagacatgaaaaagatgagcaggaatgttttgctacaaatggaggaggaggaggacgacgacgatggggatatcgtgttggaaaaccttggacagacaattgtccccgatttgggatcactggaaagtcagcatgattttcgaaccccggagtttgaagaatttaatggaaaacctgactccctcttttttaatgatggccagcgaagaattgactttgttctagtatatgaggatgaaagcagaaaagagaccaataaaaagggtacaaatgaaaaacaaaggaggaaaagacaagcatacgaatctaaccttatctgtcatggcctgcagttagaagcaacaagatcagtattggatgacaagcttgtatttgtaaaagtacacgcaccatgggaggtgttatgtacgtatgctgagataatgcacatcaaattgcctctgaaacccaatgatctgaaaaaccggtcctcagcctttggtacactcaactggtttaccaaagtcctcagtgtagacgaaagcatcatcaagccagagcaagagtttttcactgccccatttgagaagaaccggatgaatgatttttacatagttgatagagatgctttcttcaatccagccaccagaagccgcattgtttacttcatcctctctcgggtcaagtatcaagtgataaacaatgttagcaagtttgggatcaacagacttgtaaactctgggatctacaaggcagctttcccactccatgattgcaaattccgccgtcagtcagaggatcccagctgccctaatgaacggtaccttctgtacagagaatgggctcatcctcgaagcatatacaaaaagcagcccttggatcttatcaggaaatactatggagagaagattggaatctactttgcttggctgggctattacactcagatgcttctcctggccgcagttgtaggagtggcttgctttctctatggatatcttaatcaagataactgtacatggagcaaagaagtttgtcatcctgatattggtggcaagatcataatgtgtcctcagtgtgataggctttgtccattctggaaactcaatattacttgcgagtcctcaaagaaattgtgcatcttcgacagttttggaaccctggtctttgcagtatttatgggagtatgggttaccttgtttttggagttttggaagcgacgccaggcagaacttgagtatgaatgggatactgttgagttacagcaggaagaacaagcccgaccagaatacgaagcacgatgtactcacgtagtgataaatgagattactcaggaagaagaacgcattccctttactgcctggggaaaatgtatacggataaccctctgtgccagtgctgtctttttctggatcctattgatcatcgcttcagttattgggatcattgtctataggctctcggtgttcattgtattttctgcaaaacttcccaagaacattaatggaacagacccaatccagaaatacctgactccacagacagccacgtccatcacggcctccatcatcagctttataattatcatgattctgaacaccatatatgaaaaagtggcaattatgattactaacttcgaactcccaaggacccagactgattatgagaacagcctcaccatgaagatgttcttattccagtttgtcaactactactcttcatgcttctacatagcattctttaagggcaaatttgtaggctatccaggagacccagtttattggttgggaaaatacagaaatgaagagtgtgacccaggtggctgtcttcttgaactgacaactcagctgacaataatcatgggaggaaaagcaatctggaataacatacaagaagtattattgccctggatcatgaatctaattgggcgatttcacagagtttctggatcagaaaagataaccccacgatgggaacaggactaccatctgcagcctatgggcaaactgggattattttatgaatatcttgaaatgattattcagtttgggttcgtcaccttatttgtggcctcttttccactggcccctctgttggctctcgtgaacaatatattggaaataagagtggacgcatggaaactgaccacccagtttagacgcctggtaccagagaaagcccaagacattggagcatggcagcccatcatgcaaggaatagcaattctggctgtggtgaccaatgccatgatcatagctttcacgtcggacatgatcccccgcctagtgtactactggtccttctccgtccctccctacggggaccacacttcctacaccatggaagggtacatcaacaacactctctccatcttcaaagtcgcagacttcaaaaacaaaagcaagggaaacccgtactctgacctgggtaaccataccacatgcaggtatcgtgatttccgatacccacctggacacccccaggagtataaacacaacatctactattggcatgtgattgcagccaagctggcttttatcattgtcatggagtatctcgctttgttgcccaggctgggacacagtggcatgatcttggctcactgcaacctccgcctcccagttgactgctgtatgtgttataggtttgtcgatgaaattagacttttggaacaactaacttctgactttattgactccctctattatatattttctatttcaataatatctattttcttttctgttactttctttttccttctactttctttggggccaactccgtgtttttctgtatcgaatttcttaagttagatttattcaataattcattcaacaaatatttgtgtgtctattatgtggccagcattgtttcatgtgctcaagatagagtagcattgtttggctcattaatattccaatactggcatttaagaccattaattttcctctaaatcgtatttgagctgcaacccacaagcttttatatgtatagttttttgttgttgctattattaaaagtattttagatcctcccttgttttgcttttcaatctgaaatgccttcatgccattttaatttttaaaaggtaatttaattgagcctaatttctttttcttttttcttttttttgagacagagtcttactctgtcacccaggctggagtgcagtggcgtgatctcagctcaatgcaagctctgcctcccaggttcacgccattctcctgtctcagcctcccaagtagctgggactacaggcgcccaccaccatgcctggct

SEQ ID NO: 1120 - DNA, 5504 bp, Homo sapiens
  source 1..5504: mol_type = unassigned DNA
gggcatgctcagtctccgggctccgctcggcaggcgagaggcgtcctccggctctgggctccggtcggtgggtgcctcggctcggctttccccggcgctggctgggctcagcggcccctgagcccaagcgacacacgccccgcggtccccgatccggcccctgggagagccgcgccgttctggaacccgggagcccccaacttcgcgccaagttcggagccgccttctgagggagacatgaaaaagatgagcaggaatgttttgctacaaatggaggaggaggaggacgacgacgatggggatatcggtgatgttcctgcctccaggaggccttttctgactcctcatactcacctcccatccagcctggtgttggaaaaccttggacagacaattgtccccgatttgggatcactggaaagtcagcatgattttcgaaccccggagtttgaagaatttaatggaaaacctgactccctcttttttaatgatggccagcgaagaattgactttgttctagtatatgaggatgaaagcagaaaagagaccaataaaaagggtacaaatgaaaaacaaaggaggaaaagacaagcatacgaatctaaccttatctgtcatggcctgcagttagaagcaacaagatcagtattggatgacaagcttgtatttgtaaaagtacacgcaccatgggaggtgttatgtacgtatgctgagataatgcacatcaaattgcctctgaaacccaatgatctgaaaaaccggtcctcagcctttggtacactcaactggtttaccaaagtcctcagtgtagacgaaagcatcatcaagccagagcaagagtttttcactgccccatttgagaagaaccggatgaatgatttttacatagttgatagagatgctttcttcaatccagccaccagaagccgcattgtttacttcatcctctctcgggtcaagtatcaagtgataaacaatgttagcaagtttgggatcaacagacttgtaaactctgggatctacaaggcagctttcccactccatgattgcaaattccgccgtcagtcagaggatcccagctgccctaatgaacggtaccttctgtacagagaatgggctcatcctcgaagcatatacaaaaagcagcccttggatcttatcaggaaatactatggagagaagattggaatctactttgcttggctgggctattacactcagatgcttctcctggccgcagttgtaggagtggcttgctttctctatggatatcttaatcaagataactgtacatggagcaaagaagtttgtcatcctgatattggtggcaagatcataatgtgtcctcagtgtgataggctttgtccattctggaaactcaatattacttgcgagtcctcaaagaaattgtgcatcttcgacagttttggaaccctggtctttgcagtatttatgggagtatgggttaccttgtttttggagttttggaagcgacgccaggcagaacttgagtatgaatgggatactgttgagttacagcaggaagaacaagcccgaccagaatacgaagcacgatgtactcacgtagtgataaatgagattactcaggaagaagaacgcattccctttactgcctggggaaaatgtatacggataaccctctgtgccagtgctgtctttttctggatcctattgatcatcgcttcagttattgggatcattgtctataggctctcggtgttcattgtattttctgcaaaacttcccaagaacattaatggaacagacccaatccagaaatacctgactccacagacagccacgtccatcacggcctccatcatcagctttataattatcatgattctgaacaccatatatgaaaaagtggcaattatgattactaacttcgaactcccaaggacccagactgattatgagaacagcctcaccatgaagatgttcttattccagtttgtcaactactactcttcatgcttctacatagcattctttaagggcaaatttgtaggctatccaggagacccagtttattggttgggaaaatacagaaatgaagagtgtgacccaggtggctgtcttcttgaactgacaactcagctgacaataatcatgggaggaaaagcaatctggaataacatacaagaagtattattgccctggatcatgaatctaattgggcgatttcacagagtttctggatcagaaaagataaccccacgatgggaacaggactaccatctgcagcctatgggcaaactgggattattttatgaatatcttgaaatgattattcagtttgggttcgtcaccttatttgtggcctcttttccactggcccctctgttggctctcgtgaacaatatattggaaataagagtggacgcatggaaactgaccacccagtttagacgcctggtaccagagaaagcccaagacattggagcatggcagcccatcatgcaaggaatagcaattctggctgtggtgaccaatgccatgatcatagctttcacgtcggacatgatcccccgcctagtgtactactggtccttctccgtccctccctacggggaccacacttcctacaccatggaagggtacatcaacaacactctctccatcttcaaagtcgcagacttcaaaaacaaaagcaagggaaacccgtactctgacctgggtaaccataccacatgcaggtatcgtgatttccgatacccacctggacacccccaggagtataaacacaacatctactattggcatgtgattgcagccaagctggcttttatcattgtcatggagcacgtcatctactctgtgaaatttttcatttcatatgcaattcccgatgtatcaaaacgcacaaagagcaagatccagagagaaaaatacctaacccaaaagcttcttcatgagaatcacctcaaagatatgacgaaaaatatgggggtgatagctgagcggatgatagaagcagtagataacaatttacggccaaaatcagaataagagctttatgttctgagaagcactttaaggaatttagctttgtcaaaatatattaggaatcactaatgagaatgtgtaagttaaatcactttggcaaatatgagtctcaactattgccatttcctcatgtattatttttcagtttcagctagcgatgcagaaactggaaaatgtaaaacttagatcatgaagggcataaaacttatcacccggaaaacctcaatgttacctttttctgataaattggaattttacagaaaaagtccctcagtgtgcttaaaaaccaccccttctaaagtagaatggattcttttttttctgtttgattattttcatttctgtctattctcaggcgcatgatctcctttatttttaagccatgtttcatttcttcacttggctagatctgttccagggtcatcttttccttacagtaccatcattatagatttaatttaatagctttcatgtgattaaaaatagctaactagactcaaggattcacaatatttaggtgtattttcaatacctccagaaaggaaacctcagttaatcagaggaaatagtttcagtcttcatttgagcatgtctttccatctcaaaaaaatactcttagtaggttggagtgaagatagcaaggttttgaagcatatttgtcctaatccacagtgacactttttatcttccaggagcactcctaggaggttccgtgcctaatcaatgttgactgctttgcagatctcaagggaataaaatgacaaaagcagggaaagttacagattcaaacagcattttaactcatgttgatctggataattaatcttttctaaagatgtgtagtttcttggaaaacagtgatatcacatgattaaaattacatttttatcaacataattgtctggaaaagataagcccctcaattttctaccagttgacttttattcattagatacagaaggtgcagtattacacatcaccagctgcctttgtgaatggctcactacacagccattggggtacaactgtgtgcatgggcagaaacagcaagtgccctcattgtggtcattgggtggggagtgccttttgtcaaggagtctgcaggaattggcttatttctgtatgccaaagtgatcaacacaccaaagtctctgccataaagaatgtggcttccttgcatcctccatcctgttactctgggcccagtaatttgatgtaactgtctgattgtactagagacaggagtatacccagcttattcataatcaagtaaagagactcagattagatttgattttttagcctcctctagagccaatcaggcagttaagagtaataaaggaaaagggtttggtcacaaaccctaccattatctggagattacttcctgctgcactcctgtcttgccatgcacgtcttgccccctcacttttgctcagcctagcagtctacttcactttattgccttgtaagtgtcaggcctcctgggcgctctggaaaagacagggagccaggccctctcacccctactggtaacaggtcattgctgggtgcacaagagggaggtgatttgcatcatggtcatgctgcatgggcttcactgggatgctgttaaacaccagaggagccaacctatcagaatcccagcagcaaaggaaaactcagattttagaggctttttacaataaagtagcgtaactctaggtcatgattgatttcaaatgcctgccatgaatgatttgtaagtaattatgtaggatccatcaaagcagtattgtaggcttttgaattgtcccagtggatccgggaccccatttcactgtctctcttgatcgtgttaatgatgcaatcagagttcaagacaggccccatgaagtctgactgcactgggatggagaaatgaatttcttcccactgaaggaaactctttctcattcgcagccaagacgggagtgccactgttcctctcttcactcctgagatactgcttctggaagcgggtgtcacttcctctctagtacctcttctcttctctgaagtgtgtgactatctcctagtgtttaaatttggcagttactcgccatgtatgtcagcatagaaaaggaaatgtttttaccttatctcctgtatgtatgatagaacttaaaagaaatgtgcatttgttttcatagccccagcagagaaaatcctcttcatagattaaatgtgctgctgtggacaggaggggaaaaaaaaccctctacatattgaaaggcaccaaatgtaatatctgacactgttaagatgcccaaaagagcaaagttgtagtggagatgcagggtcatttccccatgccatccacagtgtttgttagtgagtccacggctgacttgcagtgataaagaaaagcatggagctgtgtctgcagacaatggtggctgcatctgtaagtggcttcagaggcagcagccctggggaaattgatgggtgtggca

SEQ ID NO: 1121 - DNA, 835 bp, Homo sapiens
  source 1..835: mol_type = unassigned DNA
gagaggcgtcctccggctctgggctccggtcggtgggtgcctcggctcggctttccccggcgctggctgggctcagcggcccctgagcccaagcgacacacgccccgcggtccccgatccggcccctgggagagccgcgccgttctggaacccgggagcccccaacttcgcgccaagttcggagccgccttctgagggagacatgaaaaagatgagcaggaatgttttgctacaaatggaggaggaggaggacgacgacgatggggatatcgggctgaagtgcagtagtggagtagcgcaatcatggctcactgtagcattgactcccagactcaattgatcctcttacctcaacctcctgcgtatctgggaccacaggtgatgttcctgcctccaggaggccttttctgactcctcatactcacctcccatccagcctggtgttggaaaaccttggacagacaattgtccccgatttgggatcactggaaagtcagcatgattttcgaaccccggagtttgtgaaagctattctgaaggttgccctaggaagttgaacataagatggactccagggaattagaaaccctgtttttccatgcaaccctgctctcagacctctgtggacaagtcgcttttccttttagaacctcagtttcctcatatgtaaaaagcagaaagatcagcagtagatatcctcactggagtgttgttcagtgactgcacggtgactgagaaacattttagctatcttaaaatgatgttcataataatatagtgaatagtcttatctaacatttatggatgcttgtggttggctaagcacattacaggg

SEQ ID NO: 1122 - DNA, 5975 bp, Homo sapiens
  source 1..5975: mol_type = unassigned DNA
gagaggcgtcctccggctctgggctccggtcggtgggtgcctcggctcggctttccccggcgctggctgggctcagcggcccctgagcccaagcgacacacgccccgcggtccccgatccggcccctgggagagccgcgccgttctggaacccgggagcccccaacttcgcgccaagttcggagccgccttctgagggagacatgaaaaagatgagcaggaatgttttgctacaaatggaggaggaggaggacgacgacgatggggatatcgtgttggaaaaccttggacagacaattgtccccgatttgggatcactggaaagtcagcatgattttcgaaccccggagtttgaagaatttaatggaaaacctgactccctcttttttaatgatggccagcgaagaattgactttgttctagtatatgaggatgaaagcagaaaagagaccaataaaaagggtacaaatgaaaaacaaaggaggaaaagacaagcatacgaatctaaccttatctgtcatggcctgcagttagaagcaacaagatcagtattggatgacaagcttgtatttgtaaaagtacacgcaccatgggaggtgttatgtacgtatgctgagataatgcacatcaaattgcctctgaaacccaatgatctgaaaaaccggtcctcagcctttggtacactcaactggtttaccaaagtcctcagtgtagacgaaagcatcatcaagccagagcaagagtttttcactgccccatttgagaagaaccggatgaatgatttttacatagttgatagagatgctttcttcaatccagccaccagaagccgcattgtttacttcatcctctctcgggtcaagtatcaagtgataaacaatgttagcaagtttgggatcaacagacttgtaaactctgggatctacaaggcagctttcccactccatgattgcaaattccgccgtcagtcagaggatcccagctgccctaatgaacggtaccttctgtacagagaatgggctcatcctcgaagcatatacaaaaagcagcccttggatcttatcaggaaatactatggagagaagattggaatctactttgcttggctgggctattacactcagatgcttctcctggccgcagttgtaggagtggcttgctttctctatggatatcttaatcaagataactgtacatggagcaaagaagtttgtcatcctgatattggtggcaagatcataatgtgtcctcagtgtgataggctttgtccattctggaaactcaatattacttgcgagtcctcaaagaaattgtgcatcttcgacagttttggaaccctggtctttgcagtatttatgggagtatgggttaccttgtttttggagttttggaagcgacgccaggcagaacttgagtatgaatgggatactgttgagttacagcaggaagaacaagcccgaccagaatacgaagcacgatgtactcacgtagtgataaatgagattactcaggaagaagaacgcattccctttactgcctggggaaaatgtatacggataaccctctgtgccagtgctgtctttttctggatcctattgatcatcgcttcagttattgggatcattgtctataggctctcggtgttcattgtattttctgcaaaacttcccaagaacattaatggaacagacccaatccagaaatacctgactccacagacagccacgtccatcacggcctccatcatcagctttataattatcatgattctgaacaccatatatgaaaaagtggcaattatgattactaacttcgaactcccaaggacccagactgattatgagaacagcctcaccatgaagatgttcttattccagtttgtcaactactactcttcatgcttctacatagcattctttaagggcaaatttgtaggctatccaggagacccagtttattggttgggaaaatacagaaatgaagagtgtgacccaggtggctgtcttcttgaactgacaactcagctgacaataatcatgggaggaaaagcaatctggaataacatacaagaagtattattgccctggatcatgaatctaattgggcgatttcacagagtttctggatcagaaaagataaccccacgatgggaacaggactaccatctgcagcctatgggcaaactgggattattttatgaatatcttgaaatgattattcagtttgggttcgtcaccttatttgtggcctcttttccactggcccctctgttggctctcgtgaacaatatattggaaataagagtggacgcatggaaactgaccacccagtttagacgcctggtaccagagaaagcccaagacattggagcatggcagcccatcatgcaaggaatagcaattctggctgtggtgaccaatgccatgatcatagctttcacgtcggacatgatcccccgcctagtgtactactggtccttctccgtccctccctacggggaccacacttcctacaccatggaagggtacatcaacaacactctctccatcttcaaagtcgcagacttcaaaaacaaaagcaagggaaacccgtactctgacctgggtaaccataccacatgcaggtatcgtgatttccgatacccacctggacacccccaggagtataaacacaacatctactattggcatgtgattgcagccaagctggcttttatcattgtcatggagcacgtcatctactctgtgaaatttttcatttcatatgcaattcccgatgtatcaaaacgcacaaagagcaagatccagagagaaaaatacctaacccaaaagcttcttcatgagaatcacctcaaagatatgacgaaaaatatgggggtgatagctgagcggatgatagaagcagtagataacaatttacggccaaaatcagaataagagctttatgttctgagaagcactttaaggaatttagctttgtcaaaatatattaggaatcactaatgagaatgtgtaagttaaatcactttggcaaatatgagtctcaactattgccatttcctcatgtattatttttcagtttcagctagcgatgcagaaactggaaaatgtaaaacttagatcatgaagggcataaaacttatcacccggaaaacctcaatgttacctttttctgataaattggaattttacagaaaaagtccctcagtgtgcttaaaaaccaccccttctaaagtagaatggattcttttttttctgtttgattattttcatttctgtctattctcaggcgcatgatctcctttatttttaagccatgtttcatttcttcacttggctagatctgttccagggtcatcttttccttacagtaccatcattatagatttaatttaatagctttcatgtgattaaaaatagctaactagactcaaggattcacaatatttaggtgtattttcaatacctccagaaaggaaacctcagttaatcagaggaaatagtttcagtcttcatttgagcatgtctttccatctcaaaaaaatactcttagtaggttggagtgaagatagcaaggttttgaagcatatttgtcctaatccacagtgacactttttatcttccaggagcactcctaggaggttccgtgcctaatcaatgttgactgctttgcagatctcaagggaataaaatgacaaaagcagggaaagttacagattcaaacagcattttaactcatgttgatctggataattaatcttttctaaagatgtgtagtttcttggaaaacagtgatatcacatgattaaaattacatttttatcaacataattgtctggaaaagataagcccctcaattttctaccagttgacttttattcattagatacagaaggtgcagtattacacatcaccagctgcctttgtgaatggctcactacacagccattggggtacaactgtgtgcatgggcagaaacagcaagtgccctcattgtggtcattgggtggggagtgccttttgtcaaggagtctgcaggaattggcttatttctgtatgccaaagtgatcaacacaccaaagtctctgccataaagaatgtggcttccttgcatcctccatcctgttactctgggcccagtaatttgatgtaactgtctgattgtactagagacaggagtatacccagcttattcataatcaagtaaagagactcagattagatttgattttttagcctcctctagagccaatcaggcagttaagagtaataaaggaaaagggtttggtcacaaaccctaccattatctggagattacttcctgctgcactcctgtcttgccatgcacgtcttgccccctcacttttgctcagcctagcagtctacttcactttattgccttgtaagtgtcaggcctcctgggcgctctggaaaagacagggagccaggccctctcacccctactggtaacaggtcattgctgggtgcacaagagggaggtgatttgcatcatggtcatgctgcatgggcttcactgggatgctgttaaacaccagaggagccaacctatcagaatcccagcagcaaaggaaaactcagattttagaggctttttacaataaagtagcgtaactctaggtcatgattgatttcaaatgcctgccatgaatgatttgtaagtaattatgtaggatccatcaaagcagtattgtaggcttttgaattgtcccagtggatccgggaccccatttcactgtctctcttgatcgtgttaatgatgcaatcagagttcaagacaggccccatgaagtctgactgcactgggatggagaaatgaatttcttcccactgaaggaaactctttctcattcgcagccaagacgggagtgccactgttcctctcttcactcctgagatactgcttctggaagcgggtgtcacttcctctctagtacctcttctcttctctgaagtgtgtgactatctcctagtgtttaaatttggcagttactcgccatgtatgtcagcatagaaaaggaaatgtttttaccttatctcctgtatgtatgatagaacttaaaagaaatgtgcatttgttttcatagccccagcagagaaaatcctcttcatagattaaatgtgctgctgtggacaggaggggaaaaaaaaccctctacatattgaaaggcaccaaatgtaatatctgacactgttaagatgcccaaaagagcaaagttgtagtggagatgcagggtcatttccccatgccatccacagtgtttgttagtgagtccacggctgacttgcagtgataaagaaaagcatggagctgtgtctgcagacaatggtggctgcatctgtaagtggcttcagaggcagcagccctggggaaattgatgggtgtggcagtggacctgtgaagagggagaatctagccttcagcctgtccagtgttaaccactagagaaactgagctttatatccttttttaatgcctgtgaattttagcatattgaaacattagagcaaatactcaggggatttttcattaaacatccctcagataatttagctatatatcattagaaagggaaagctatcatttttattttaaaactaaacaaggccatcttataaactgtcaccaaagtcttcccttttttattgcatgtgtgccttgaatttcataaaacattaattcacaatgggggtcagaatgtactcttgttgaaacacttcttgtaccattttatgttcatattatgtttgagagggtaaaaatgtatgagcagcttaactgaagtagaactattcatgatgcttttcacacattgtggcataagatgtaaagtttgtaattaatgttaatttctgtgcattttaatattcttttataattattaatgttaatttctgtgcattttaatattcttttataattatgagcattttaataaattcatttttacaaacaata

SEQ ID NO: 1123 - DNA, 5955 bp, Homo sapiens
  source 1..5955: mol_type = unassigned DNA
ttggggcagaggaggcttgtaggaataggggaagagttcataagcagagctgaaacaacaccaaacatggaaatgttacaaggtggagaaattgtgcttactgaaactcttctcagaaatattgctgtttgtggatgatagaaatcttcagagttgtcacttaaggtagaggtaggagggtaagaagcgtcaaggactcaccgaattgtccattcccccttttgttctgctgtggaatgttttgtgctgctgtgttggaaaaccttggacagacaattgtccccgatttgggatcactggaaagtcagcatgattttcgaaccccggagtttgaagaatttaatggaaaacctgactccctcttttttaatgatggccagcgaagaattgactttgttctagtatatgaggatgaaagcagaaaagagaccaataaaaagggtacaaatgaaaaacaaaggaggaaaagacaagcatacgaatctaaccttatctgtcatggcctgcagttagaagcaacaagatcagtattggatgacaagcttgtatttgtaaaagtacacgcaccatgggaggtgttatgtacgtatgctgagataatgcacatcaaattgcctctgaaacccaatgatctgaaaaaccggtcctcagcctttggtacactcaactggtttaccaaagtcctcagtgtagacgaaagcatcatcaagccagagcaagagtttttcactgccccatttgagaagaaccggatgaatgatttttacatagttgatagagatgctttcttcaatccagccaccagaagccgcattgtttacttcatcctctctcgggtcaagtatcaagtgataaacaatgttagcaagtttgggatcaacagacttgtaaactctgggatctacaaggcagctttcccactccatgattgcaaattccgccgtcagtcagaggatcccagctgccctaatgaacggtaccttctgtacagagaatgggctcatcctcgaagcatatacaaaaagcagcccttggatcttatcaggaaatactatggagagaagattggaatctactttgcttggctgggctattacactcagatgcttctcctggccgcagttgtaggagtggcttgctttctctatggatatcttaatcaagataactgtacatggagcaaagaagtttgtcatcctgatattggtggcaagatcataatgtgtcctcagtgtgataggctttgtccattctggaaactcaatattacttgcgagtcctcaaagaaattgtgcatcttcgacagttttggaaccctggtctttgcagtatttatgggagtatgggttaccttgtttttggagttttggaagcgacgccaggcagaacttgagtatgaatgggatactgttgagttacagcaggaagaacaagcccgaccagaatacgaagcacgatgtactcacgtagtgataaatgagattactcaggaagaagaacgcattccctttactgcctggggaaaatgtatacggataaccctctgtgccagtgctgtctttttctggatcctattgatcatcgcttcagttattgggatcattgtctataggctctcggtgttcattgtattttctgcaaaacttcccaagaacattaatggaacagacccaatccagaaatacctgactccacagacagccacgtccatcacggcctccatcatcagctttataattatcatgattctgaacaccatatatgaaaaagtggcaattatgattactaacttcgaactcccaaggacccagactgattatgagaacagcctcaccatgaagatgttcttattccagtttgtcaactactactcttcatgcttctacatagcattctttaagggcaaatttgtaggctatccaggagacccagtttattggttgggaaaatacagaaatgaagagtgtgacccaggtggctgtcttcttgaactgacaactcagctgacaataatcatgggaggaaaagcaatctggaataacatacaagaagtattattgccctggatcatgaatctaattgggcgatttcacagagtttctggatcagaaaagataaccccacgatgggaacaggactaccatctgcagcctatgggcaaactgggattattttatgaatatcttgaaatgattattcagtttgggttcgtcaccttatttgtggcctcttttccactggcccctctgttggctctcgtgaacaatatattggaaataagagtggacgcatggaaactgaccacccagtttagacgcctggtaccagagaaagcccaagacattggagcatggcagcccatcatgcaaggaatagcaattctggctgtggtgaccaatgccatgatcatagctttcacgtcggacatgatcccccgcctagtgtactactggtccttctccgtccctccctacggggaccacacttcctacaccatggaagggtacatcaacaacactctctccatcttcaaagtcgcagacttcaaaaacaaaagcaagggaaacccgtactctgacctgggtaaccataccacatgcaggtatcgtgatttccgatacccacctggacacccccaggagtataaacacaacatctactattggcatgtgattgcagccaagctggcttttatcattgtcatggagcacgtcatctactctgtgaaatttttcatttcatatgcaattcccgatgtatcaaaacgcacaaagagcaagatccagagagaaaaatacctaacccaaaagcttcttcatgagaatcacctcaaagatatgacgaaaaatatgggggtgatagctgagcggatgatagaagcagtagataacaatttacggccaaaatcagaataagagctttatgttctgagaagcactttaaggaatttagctttgtcaaaatatattaggaatcactaatgagaatgtgtaagttaaatcactttggcaaatatgagtctcaactattgccatttcctcatgtattatttttcagtttcagctagcgatgcagaaactggaaaatgtaaaacttagatcatgaagggcataaaacttatcacccggaaaacctcaatgttacctttttctgataaattggaattttacagaaaaagtccctcagtgtgcttaaaaaccaccccttctaaagtagaatggattcttttttttctgtttgattattttcatttctgtctattctcaggcgcatgatctcctttatttttaagccatgtttcatttcttcacttggctagatctgttccagggtcatcttttccttacagtaccatcattatagatttaatttaatagctttcatgtgattaaaaatagctaactagactcaaggattcacaatatttaggtgtattttcaatacctccagaaaggaaacctcagttaatcagaggaaatagtttcagtcttcatttgagcatgtctttccatctcaaaaaaatactcttagtaggttggagtgaagatagcaaggttttgaagcatatttgtcctaatccacagtgacactttttatcttccaggagcactcctaggaggttccgtgcctaatcaatgttgactgctttgcagatctcaagggaataaaatgacaaaagcagggaaagttacagattcaaacagcattttaactcatgttgatctggataattaatcttttctaaagatgtgtagtttcttggaaaacagtgatatcacatgattaaaattacatttttatcaacataattgtctggaaaagataagcccctcaattttctaccagttgacttttattcattagatacagaaggtgcagtattacacatcaccagctgcctttgtgaatggctcactacacagccattggggtacaactgtgtgcatgggcagaaacagcaagtgccctcattgtggtcattgggtggggagtgccttttgtcaaggagtctgcaggaattggcttatttctgtatgccaaagtgatcaacacaccaaagtctctgccataaagaatgtggcttccttgcatcctccatcctgttactctgggcccagtaatttgatgtaactgtctgattgtactagagacaggagtatacccagcttattcataatcaagtaaagagactcagattagatttgattttttagcctcctctagagccaatcaggcagttaagagtaataaaggaaaagggtttggtcacaaaccctaccattatctggagattacttcctgctgcactcctgtcttgccatgcacgtcttgccccctcacttttgctcagcctagcagtctacttcactttattgccttgtaagtgtcaggcctcctgggcgctctggaaaagacagggagccaggccctctcacccctactggtaacaggtcattgctgggtgcacaagagggaggtgatttgcatcatggtcatgctgcatgggcttcactgggatgctgttaaacaccagaggagccaacctatcagaatcccagcagcaaaggaaaactcagattttagaggctttttacaataaagtagcgtaactctaggtcatgattgatttcaaatgcctgccatgaatgatttgtaagtaattatgtaggatccatcaaagcagtattgtaggcttttgaattgtcccagtggatccgggaccccatttcactgtctctcttgatcgtgttaatgatgcaatcagagttcaagacaggccccatgaagtctgactgcactgggatggagaaatgaatttcttcccactgaaggaaactctttctcattcgcagccaagacgggagtgccactgttcctctcttcactcctgagatactgcttctggaagcgggtgtcacttcctctctagtacctcttctcttctctgaagtgtgtgactatctcctagtgtttaaatttggcagttactcgccatgtatgtcagcatagaaaaggaaatgtttttaccttatctcctgtatgtatgatagaacttaaaagaaatgtgcatttgttttcatagccccagcagagaaaatcctcttcatagattaaatgtgctgctgtggacaggaggggaaaaaaaaccctctacatattgaaaggcaccaaatgtaatatctgacactgttaagatgcccaaaagagcaaagttgtagtggagatgcagggtcatttccccatgccatccacagtgtttgttagtgagtccacggctgacttgcagtgataaagaaaagcatggagctgtgtctgcagacaatggtggctgcatctgtaagtggcttcagaggcagcagccctggggaaattgatgggtgtggcagtggacctgtgaagagggagaatctagccttcagcctgtccagtgttaaccactagagaaactgagctttatatccttttttaatgcctgtgaattttagcatattgaaacattagagcaaatactcaggggatttttcattaaacatccctcagataatttagctatatatcattagaaagggaaagctatcatttttattttaaaactaaacaaggccatcttataaactgtcaccaaagtcttcccttttttattgcatgtgtgccttgaatttcataaaacattaattcacaatgggggtcagaatgtactcttgttgaaacacttcttgtaccattttatgttcatattatgtttgagagggtaaaaatgtatgagcagcttaactgaagtagaactattcatgatgcttttcacacattgtggcataagatgtaaagtttgtaattaatgttaatttctgtgcattttaatattcttttataattattaatgttaatttctgtgcattttaatattcttttataattatgagcattttaataaattcatttttacaaacaata

SEQ ID NO: 1124 - DNA, 567 bp, Homo sapiens
  source 1..567: mol_type = unassigned DNA
attttttgagtgctgacttgacgttcaaaagaaatgcttagtggatcattttggattttcagatgtgggatgctcagctgaggaaaagacaagcatacgaatctaaccttatctgtcatggcctgcagttagaagcaacaagatcagtaagtactggtcccttttcagccctcggctgaccactgttctcgggcagcttcgtgccacttggaatacttgggtgacattggaaacatgcagccctggccacatcttagtcatagactgggagaggagtcaatcaaaatctgcattgtgtaggatgtattctttttttctgatcaaaactagcagatcttttttaatagccaacgaattttacaatgaatgcatgtatgaatgattattttctttctttaagaaacttctaaaagcttttttgttatacaaaaaatagtttatggtaaaaaattagaaaacataagaataaggaaaataatctgtatcttaattatccataaataattttgcagtccttctgagctgttttactcaaaaatatatatgtacacattttttatctttcaa

SEQ ID NO: 1125 - DNA, 1657 bp, Homo sapiens
  source 1..1657: mol_type = unassigned DNA
attgcagtacatttgagaaagtaaaggtgtagtggaaaccgagagcgaaatgagggcgtagggagaaaagggtggggaagcttagagaccggtgagggagcagagctggggcgcctgtgtacagggatagagcccggcggcagcagggcgcggcttccctttcccggggcctggggccgcaatcaggtggagtcgagaggccggaggaggggcaggaggaaggggtgcggtcgcgatccggacccggagccagcgcggagcacctgcgcccgcggctgacaccttcgctcgcagtttgttcgcagtttactcgcacaccagtttcccccaccgcgctttggattagtgtgatctcagctcaaggcaaaggtgggatatcatggcatctatctgggttggacaccgaggaacagtaagagattatccagactttagcccatcagtggatgctgaagctattcagaaagcaatcagaggaattggaactgatgagaaaatgctcatcagcattctgactgagaggtcaaatgcacagcggcagctgattgttaaggaatatcaagcagcatatggaaaggagctgaaagatgacttgaagggtgatctctctggccactttgagcatctcatggtggccctagtgactccaccagcagtctttgatgcaaagcagctaaagaaatccatgaagggcgcgggaacaaacgaagatgccttgattgaaatcttaactaccaggacaagcaggcaaatgaaggatatctctcaagcctattatacagtatacaagaagagtcttggagatgacattagttccgaaacatctggtgacttccggaaagctctgttgactttggcagatggcagaagagatgaaagtctgaaagtggatgagcatctggccaaacaagatgcccagattctctataaagctggtgagaacagatggggcacggatgaagacaaattcactgagatcctgtgtttaaggagctttcctcaattaaaactaacatttgatgaatacagaaatatcagccaaaaggacattgtggacagcataaaaggagaattatctgggcattttgaagacttactgttggccatagttaattgtgtgaggaacacgccggcctttttagccgaaagactgcatcgagccttgaagggtattggaactgatgagtttactctgaaccgaataatggtgtccagatcagaaattgaccttttggacattcgaacagagttcaagaagcattatggctattccctatattcagcaattaaatcggatacttctggagactatgaaatcacactcttaaaaatctgtggtggagatgactgaaccaagaagataatctccaaaggtccacgatgggctttcccaacagctccaccttacttcttctcatactatttaagagaacaagcaaatataaacagcaacttgtgttcctaacaggaattttcattgttctataacaacaacaacaaaagcgattattattttagagcatctcatttataatgtagcagctcataaatgaaattgaaaatggtattaaagatctgcaactactatccaacttatatttctgctttcaaagttaagaatctttatagttctactccattaaatataaagcaagat

SEQ ID NO: 1126 - DNA, 1335 bp, Homo sapiens
  source 1..1335: mol_type = unassigned DNA
ggtcgcgatccggacccggagccagcgcggagcacctgcgcccgcggctgacaccttcgctcgcagtttgttcgcagtttactcgcacaccagtttcccccaccgcgctttggattagtgtgatctcagctcaaggcaaaggtgggatatcatggcatctatctgggaactgatgagaaaatgctcatcagcattctgactgagaggtcaaatgcacagcggcagctgattgttaaggaatatcaagcagcatatggaaaggagctgaaagatgacttgaagggtgatctctctggccactttgagcatctcatggtggccctagtgactccaccagcagtctttgatgcaaagcagctaaagaaatccatgaagggcgcgggaacaaacgaagatgccttgattgaaatcttaactaccaggacaagcaggcaaatgaaggatatctctcaagcctattatacagtatacaagaagagtcttggagatgacattagttccgaaacatctggtgacttccggaaagctctgttgactttggcagatggcagaagagatgaaagtctgaaagtggatgagcatctggccaaacaagatgcccagattctctataaagctggtgagaacagatggggcacggatgaagacaaattcactgagatcctgtgtttaaggagctttcctcaattaaaactaacatttgatgaatacagaaatatcagccaaaaggacattgtggacagcataaaaggagaattatctgggcattttgaagacttactgttggccatagttaattgtgtgaggaacacgccggcctttttagccgaaagactgcatcgagccttgaagggtattggaactgatgagtttactctgaaccgaataatggtgtccagatcagaaattgaccttttggacattcgaacagagttcaagaagcattatggctattccctatattcagcaattaaatcggatacttctggagactatgaaatcacactcttaaaaatctgtggtggagatgactgaaccaagaagataatctccaaaggtccacgatgggctttcccaacagctccaccttacttcttctcatactatttaagagaacaagcaaatataaacagcaacttgtgttcctaacaggaattttcattgttctataacaacaacaacaaaagcgattattattttagagcatctcatttataatgtagcagctcataaatgaaattgaaaatggtattaaagatctgcaactactatccaacttatatttctgctttcaaagttaagaatctttatagttctactccattaaatataaag

SEQ ID NO: 1127 - DNA, 307 bp, Homo sapiens
  source 1..307: mol_type = unassigned DNA
cggacccggagccagcgcggagcacctgcgcccgcggctgacaccttcgctcgcagtttgttcgcagtttactcgcacaccagtttcccccaccgcgctttggattagtgtgatctcagctcaaggcaaaggtgggatatcatggcatctatctggggcagaagagatgaaagtctgaaagtggatgagcatctggccaaacaagatgcccagattctctataaagctggtgagaacagatggggcacggatgaagacaaattcactgagatcctgtgtttaaggagctttcctcaattaaaactaa

SEQ ID NO: 1128 - DNA, 1524 bp, Homo sapiens
  source 1..1524: mol_type = unassigned DNA
ggacccggagccagcgcggagcacctgcgcccgcggctgacaccttcgctcgcagtttgttcgcagtttactcgcacaccagtttcccccaccgcgctttggattagtgtgatctcagctcaaggcaaaggtgggatatcatggcatctatctggacacggtctcactctgtcacctagactacagtgcagtgacacaatcacagctcactgcagccttgaccttctgcgctcaagtggtcctcccacctcagcctcccaagtagctgggaccacacctgcacaccaccacacctggttggacaccgaggaacagtaagagattatccagactttagcccatcagtggatgctgaagctattcagaaagcaatcagaggaattggaactgatgagaaaatgctcatcagcattctgactgagaggtcaaatgcacagcggcagctgattgttaaggaatatcaagcagcatatggaaaggagctgaaagatgacttgaagggtgatctctctggccactttgagcatctcatggtggccctagtgactccaccagcagtctttgatgcaaagcagctaaagaaatccatgaagggcgcgggaacaaacgaagatgccttgattgaaatcttaactaccaggacaagcaggcaaatgaaggatatctctcaagcctattatacagtatacaagaagagtcttggagatgacattagttccgaaacatctggtgacttccggaaagctctgttgactttggcagatggcagaagagatgaaagtctgaaagtggatgagcatctggccaaacaagatgcccagattctctataaagctggtgagaacagatggggcacggatgaagacaaattcactgagatcctgtgtttaaggagctttcctcaattaaaactaacatttgatgaatacagaaatatcagccaaaaggacattgtggacagcataaaaggagaattatctgggcattttgaagacttactgttggccatagttaattgtgtgaggaacacgccggcctttttagccgaaagactgcatcgagccttgaagggtattggaactgatgagtttactctgaaccgaataatggtgtccagatcagaaattgaccttttggacattcgaacagagttcaagaagcattatggctattccctatattcagcaattaaatcggatacttctggagactatgaaatcacactcttaaaaatctgtggtggagatgactgaaccaagaagataatctccaaaggtccacgatgggctttcccaacagctccaccttacttcttctcatactatttaagagaacaagcaaatataaacagcaacttgtgttcctaacaggaattttcattgttctataacaacaacaacaaaagcgattattattttagagcatctcatttataatgtagcagctcataaatgaaattgaaaatggtattaaagatctgcaactactatccaacttatatttctgctttcaaagttaagaatc

SEQ ID NO: 1129 - DNA, 571 bp, Homo sapiens
  source 1..571: mol_type = unassigned DNA
agcgcggagcacctgcgcccgcggctgacaccttcgctcgcagtttgttcgcagtttactcgcacaccagtttcccccaccgcgctttggattagtgtgatctcagctcaaggcaaaggtgggatatcatggcatctatctgggttggacaccgaggaacagtaagagattatccagactttagcccatcagtggatgctgaagctattcagaaagcaatcagaggaattggaactgatgagaaaatgctcatcagcattctgactgagaggtcaaatgcacagcggcagctgattgttaaggaatatcaagcagcatatggaaaggagctgaaagatgacttgaagggtgatctctctggccactttgagcatctcatggtggccctagtgactccaccagcagtctttgatgcaaagcagctaaagaaatccatgaaggtatgagccccccacaagccatttctgcccagggtttgaccaagtcatcaaaaatagtgactttcttgcagtgcacacttgtgatgggtggacttggatgcccttttggtctggactctcccagtggtaga

SEQ ID NO: 1130 - DNA, 545 bp, Homo sapiens
  source 1..545: mol_type = unassigned DNA
actcgcacaccagtttcccccaccgcgctttggctagcagcgtaagggatccacttagccatctcggcctccccagtcctaaaggtctaggggacagaaaaaagctgggagtcggaaggttcctcgggtccccggcatggcagacggggctggctcagaggtctgctctgtggacttggaatcgcacccatcctattagtgtgatctcagctcaaggcaaaggtgggatatcatggcatctatctgggttggacaccgaggaacagtaagagattatccagactttagcccatcagtggatgctgaagctattcagaaagcaatcagaggaattggaactgatgagaaaatgctcatcagcattctgactgagaggtcaaatgcacagcggcagctgattgttaaggaatatcaagcagcatatggaaaggagctgaaagatgacttgaagggtgatctctctggccactttgagcatctcatggtggccctagtgactccaccagcagtctttgatgcaaagcagctaaagaaatccatgaagg

SEQ ID NO: 1131 - DNA, 880 bp, Homo sapiens
  source 1..880: mol_type = unassigned DNA
ctcgaccctgggcagggctggcggctggcgcccgcgcccggccccaacccagctgcgtgggtggggagctggagggacctcagtcctgcatttcagagtcgaggagactgggcccacgggggggaaagtgccgtgccatgggtgggtcacccaggtcttggtggggcccaagctgatactcagctgtcctcgctccctgaaagcttcgcttattacagctagcagcgtaagggatccacttagccatctcggcctccccagtcctaaaggtctaggggacagaaaaaagctgggagtcggaaggttcctcgggtccccggcatggcagacggggctggctcagaggtctgctctgtggacttggaatcgcacccatcctattagtgtgatctcagctcaaggcaaaggtgggatatcatggcatctatctgggttggacaccgaggaacagtaagagattatccagactttagcccatcagtggatgctgaagctattcagaaagcaatcagaggaattggaactgatgagaaaatgctcatcagcattctgactgagaggtcaaatgcacagcggcagctgattgttaaggaatatcaagcagcatatggaaaggagctgaaagatgacttgaagggtgatctctctggccactttgagcatctcatggtggccctagtgactccaccagcagtctttgatgcaaagcagctaaagaaatccatgaagggcgcgggaacaaacgaagatgccttgattgaaatcttaactaccaggacaagcaggcaaatgaaggatatctctcaagcctattatacagtatacaagaagagtcttggagatgacattagttccgaaacatctggtgacttccggaaag

SEQ ID NO: 1132 - DNA, 567 bp, Homo sapiens
  source 1..567: mol_type = unassigned DNA
cctcctcaaagagcagatgtgtctttataacagactgtaggcttggagccttgtaaaatgtacatggagtttcacaatcaagcacaaggaatccaactgaaggcagctaaactttgtgttgatttgattagtgtgatctcagctcaaggcaaaggtgggatatcatggcatctatctgggttggacaccgaggaacagtaagagattatccagactttagcccatcagtggatgctgaagctattcagaaagcaatcagaggaattggaactgatgagaaaatgctcatcagcattctgactgagaggtcaaatgcacagcggcagctgattgttaaggaatatcaagcagcatatggaaaggagctgaaagatgacttgaagggtgatctctctggccactttgagcatctcatggtggccctagtgactccaccagcagtctttgatgcaaagcagctaaagaaatccatgaagggcgcgggaacaaacgaagatgccttgattgaaatcttaactaccaggacaagcaggcaaatgaaggatatctctcaagcctattatacag

SEQ ID NO: 1133 - DNA, 832 bp, Homo sapiens
  source 1..832: mol_type = unassigned DNA
gagaaggggaaagagaaagagagatcattgaagaaaatcatctagggagtttgggttttgttgtagatgatttccttaaaaaggaacaaaagaaaaacaaaaacttctgtgcccagattttcatggtttaaagagggagttttttagcttgctacttgatcttctgcatatcaaataaaaaactagaatatattcaaatgtgctcaactgcgttgctttaaataattttgtggtgcttctttttagcatttgatgaatacagaaatatcagccaaaaggacattgtggacagcataaaaggagaattatctgggcattttgaagacttactgttggccatagttaattgtgtgaggaacacgccggcctttttagccgaaagactgcatcgagccttgaagggtattggaactgatgagtttactctgaaccgaataatggtgtccagatcagaaattgaccttttggacattcgaacagagttcaagaagcattatggctattccctatattcagcaattaaatcggatacttctggagactatgaaatcacactcttaaaaatctgtggtggagatgactgaaccaagaagataatctccaaaggtccacgatgggctttcccaacagctccaccttacttcttctcatactatttaagagaacaagcaaatataaacagcaacttgtgttcctaacaggaattttcattgttctataacaacaacaacaaaagcgattattattttagagcatctcatttataatgtagcagctcataaatgaaattgaaaatggtattaaagatctgcaactactatccaacttatat

SEQ ID NO: 1134 - DNA, 2932 bp, Homo sapiens
  source 1..2932: mol_type = unassigned DNA
agatgctaatattccacttgtatgaaagatgaaaattcatgtataatattaaattttaaaagttcatcctctattttaaatagaaaatgagaaggcaggccaggcgcggtggctcacgcctgtaatcccagcattttaggaggcccaggcgggtggatcacaaggtcaggagttcaagaccagcctggccagacggtgaaaccctgtctctactaaaaatacaaaaattagccgggcgtggtagcagatgcactgtaatcccagctactcgcgaggctgaggcagagaattgcttgaacccaggaggcagaggttgcagtgagcctagattgcgccactgcactccagtctgggcgacagagtgagactctgtctcaaaaaaaaaaaaaaaaaaagaaaatgagaaggtaaaaatatggcttaatgttgatagaatgtcatatttcttttccacttagattagttttctacagtagctaatttgtctactgatttgcctcataggttaatagtattctaacccatatagagataggtacagagaagtattgaccacattattttcactgcttcacagtaagtgcaggcagtaaaacttgttttagaatgccaaacctcaagcttgagacccagtagatcctgtggcctctcaaactgccttgcttaaaataaaccaagctgagttggcagcctttaatgatgccgtaaccctgtgtttgcttgtctgtctttactgccagatggtgcgctccatgagtacagactcctgtttatcctcagaccctagggccttgtgcacagaagatgcttacctccatctctttaccagccattttctgtggtcccacacgtaccttcaaagtcatatcctaagtgaacacatcctttccttcatctcgcccagccccacatctgctccccttcccctgttcagtcatcccagagaatggccccaacaggaatttgcccaactctctgaagtcgtaccattcctccccagacttcttgactatgcctcagccaccccaggcttctttccattcctcaactgtggcaagtctattctcacatcacagtctttgcatccattccttctctggaatgctcatcctctagatctttacctagctgactccttctcatctttcaggtttcagctctcctcctgagagaggtctcccctaactgtaccaggccaattggttccctttcagtcactctccatgccatttccagctttcttttcttcatatttctgatcactatttacttaagcaatagttaatttgctttgctgtctgtctccatctactagaacataagctccatgcagacagagatataatctgttctgttcaccgccattggcacagcacatggaataatgcctggctatagtcgacgctcataagcatttgctggatgaattacatagatgaatggaatatcatttagtatgttggccatcattaggtcaaaatccacctaactgctcagctagaaattttacactatctctctttttcattatcctgtagcgatacatcattatgttttgtcaatccatttacataagcaactctcaaatcttcccattttctccatccctactgcctttattctaaggatggccatcatcatctcttaattactcagtctcctcaagatgagtctcaaagcctctagtcttaactcccttatcttccttctactcctaccttgcaatctgtttctcatgctgcagtcaaagtgattttctgaaaccacgaatttgatctgatctcaacattctcatgtttaaaatattacaagagctctccacacttaggataaagtcagaatttcatttcatggttaacaaggtctggcctttccagacacatttctttttatccctctttgttaacttacgtatccttgaacgtggcgttctttattgccctaaaccttcacgcctgctatttcctctataggaagtttctctcctccctacatgaacctactccttcctcttgttgactgtttagtccttgcttaaatgtcactttctcagacttttcctaatccctaatctttcttaggcccccctgaagtatgctcccatggtacccaatattttcaacatgtcagactgttttgcaatggcttactttcttgcctgtattctttacaaaactggaagcttaacatgggtatctcatctctgctttgcagcatttagcatgatgctgtcacagagtaggtgctcaacaaatatttcttgaataatgaatgatgagtttgataataaatgaaaaagaatcactatagttgaatattttgcacaccattatctgattcttataaatatagatctctatgttgctttgtgaccaatgacatttgtgttgtgaacacctgcattccttaacagggtattggaactgatgagtttactctgaaccgaataatggtgtccagatcagaaattgaccttttggacattcgaacagagttcaagaagcattatggctattccctatattcagcaattaaatcggatacttctggagactatgaaatcacactcttaaaaatctgtggtggagatgactgaaccaagaagataatctccaaaggtccacgatgggctttcccaacagctccaccttacttcttctcatactatttaagagaacaagcaaatataaacagcaacttgtgttcctaacaggaattttcattgttctataacaacaacaacaaaagcgattattattttagagcatctcatttataatgtagcagctcataaatgaaattgaaaatggtattaaagatctgcaactactatccaacttatatttctgctttcaaagttaagaatctttatagttctactccattaaatataaagcaagataataaaaattgttgcttttgttaaaagtaa

SEQ ID NO: 1135 - DNA, 5074 bp, Homo sapiens
  source 1..5074: mol_type = unassigned DNA
acatagagggcgccagtgacgcccacacacgtgctggtgtcccgggaagagttcctggcaaagagctcaggaacgttggatcttaatcaaggctttctccgtcggggtggatgggttggactttaggctccagcaagccccgccccactcggcgggtcggtgccgccgggtcccaggtgcccgctacttcccagaacctccgcctcccgctccgggccctcgaaccagcgcggacaccacaatggaccgggcgtccgagctgctcttctacgtgaacggccgcaaggtgatagaaaaaaatgtcgatcctgaaacaatgctgttgccttatttgaggaagaagcttcgactcacaggaactaagtatggctgtggaggaggaggctgtggtgcttgtacagtgatgatatcacgatacaaccccatcaccaagaggataaggcatcacccagccaatgcctgtctgattcccatctgttctctgtatggtgctgccgtcaccacagtagaaggcataggaagcacccacaccagaattcatcctgttcaggagaggattgccaagtgtcatggcacccagtgtggcttctgcacacctgggatggtgatgtccatctacacgctgctcaggaaccacccagagcccactctggatcagttaactgatgcccttggtggtaacctgtgccgttgcactggatacaggcccataattgatgcatgcaagactttctgtaaaacttcgggctgctgtcaaagtaaagaaaatggggtttgctgtttggatcaaggaatcaatggattgccagaatttgaggaaggaagtaagacaagtccaaaactcttcgcagaagaggagtttctgccattggatccaacccaggaactgatatttcctcctgagctaatgataatggctgagaaacagtcgcaaaggaccagggtgtttggcagtgagagaatgatgtggttttcccccgtgaccctgaaggaactgctggaatttaaattcaagtatccccaggctcctgttatcatgggaaacacctctgtggggcctgaagtgaaatttaaaggcgtctttcacccagttataatttctcctgatagaattgaagaactgagtgttgtaaaccatgcatataatggactcacccttggtgctggtctcagcctagcccaggtgaaggacattttggctgatgtagtccagaagcttccagaggagaagacacagatgtaccatgctctcctgaagcatttgggaactctggctgggtcccagatcaggaacatggcttctttagggggacacatcattagcaggcatccagattcagatctgaatcccatcctggctgtgggtaactgtaccctcaacttgctatcaaaagaaggaaaacgacagattcctttaaatgagcaattcctcagcaagtgccctaatgcagatcttaagcctcaagaaatcttggtctcagtgaacatcccctactcaaggaagtgggaatttgtgtcagccttccgacaagcccagcgacaggagaatgcgctagcgatagtcaattcaggaatgagagtcttttttggagaaggggatggcattattagagagttatgcatctcatatggaggcgttggtccagccaccatctgtgccaagaattcctgccagaaactcattggaaggcactggaacgaacagatgctggatatagcctgcaggcttattctgaatgaagtctcccttttgggctcggcgccaggtgggaaagtggagttcaagaggactctcatcatcagcttcctcttcaagttctacctggaagtgtcacagattttgaaaaagatggatccagttcactatcctagccttgcagacaagtatgaaagtgctttagaagatcttcattccaaacatcactgcagtacattaaagtaccagaatataggcccaaagcagcatcctgaagacccaattggccaccccatcatgcatctgtctggtgtgaagcatgccacgggggaggccatctactgtgatgacatgcctctggtggaccaggaacttttcttgacttttgtgactagttcaagagctcatgctaagattgtgtctattgatctgtcagaagctctcagcatgcccggtgtggtggacatcatgacagcagaacatcttagtgacgtcaactccttctgcttttttactgaagctgagaaatttctggcgacagataaggtgttctgtgtgggtcagcttgtctgtgctgtgcttgccgattctgaggttcaggcaaagcgagctgctaagcgagtgaagattgtctatcaagacttggagccgctgatactaacaattgaggaaagtatacaacacaactcctccttcaagccagaaaggaaactggaatatggaaatgttgacgaagcatttaaagtggttgatcaaattcttgaaggtgaaatacatatgggaggtcaagaacatttttatatggaaacccaaagcatgcttgtcgttcccaagggagaggatcaagaaatggatgtctacgtgtccacacagtttcccaaatatatacaggacattgttgcctcaaccttgaagctcccagctaacaaggtcatgtgccatgtaaggcgtgttggtggagcgtttggagggaaggtgttaaaaaccggaatcattgcagccgtcactgcatttgccgcaaacaaacatggccgtgcagttcgctgtgttctggaacgaggagaagacatgttaataactggaggccgccatccttaccttggaaagtacaaagctggattcatgaacgatggcagaatcttggccctggacatggagcattacagcaatgcaggcgcctccttggatgaatcattattcgtgatagaaatgggacttctgaaaatggacaatgcttacaagtttcccaatctccgctgccggggttgggcatgcagaaccaaccttccatccaacacagcttttcgtgggtttggctttcctcaggcagcgctgatcaccgaatcttgtatcacggaagttgcagccaaatgtggactatcccctgagaaggtgcgaatcataaacatgtacaaggaaattgatcaaacaccctacaaacaagagatcaatgccaagaacctaatccagtgttggagagaatgtatggccatgtcttcctactccttgaggaaagttgctgtggaaaagttcaatgcagagaattattggaagaagaaaggactggccatggtccccctgaagtttcctgttggccttggctcacgtgctgctggtcaggctgctgccttggttcacatttatcttgatggctctgtgctggtcactcacggtggaattgaaatggggcagggggtccacactaaaatgattcaggtggtcagccgtgaattaagaatgccaatgtcgaatgtccacctgcgtggaacaagcacagaaactgtccctaatgcaaatatctctggaggttctgtggtggcagatctcaacggtttggcagtaaaggatgcctgtcaaactcttctaaaacgcctcgaacccatcatcagcaagaatcctaaaggaacttggaaagactgggcacagactgcttttgatgaaagcattaacctttcagctgttggatacttcagaggttatgagtcagacatgaactgggagaaaggcgaaggccagcccttcgaatactttgtttatggagctgcctgttccgaggttgaaatagactgcctgacgggggatcataagaacatcagaacagacattgtcatggatgttggctgcagtataaatccagccattgacataggccagattgaaggtgcatttattcaaggcatgggactttatacaatagaggaactgaattattctccccagggcattctgcacactcgtggtccagaccaatataaaatccctgccatctgtgacatgcccacggagttgcacattgctttgttgcctccttctcaaaactcaaatactctttattcatctaagggtctgggagagtcgggggtgttcctggggtgttccgtgtttttcgctatccatgacgcagtgagtgcagcacgacaggagagaggcctgcatggacccttgacccttaatagtccactgaccccggagaagattaggatggcctgtgaagacaagttcacaaaaatgattccgagagatgaacctggatcctacgttccttggaatgtacccatctgaatcaaatgcaaacttctggagaaaacagagtgcctcttcccagatggcaatctgtcctatctctgtgctggaagatgctagatctgaaagacagagtttccacagttcagaaatcatcccacagtgttgcttttctatggagctgatttaaagtattccatttagatttgatagatatgcttaagcaatctataaatcattttcaatgttataaacactaattggtttcctctagggtgatatccgtcattactctgtctcttcaatccatccagctaaatggaataggtgatgacttgcatgtgactcctacttggcttctatccaccaacagaaattataccatatagtgaaaggcaattttctaaataatttcattactaatatgaactgtgaagttgtcattttttcatttgtccttttctgctatcaccttcctcttgtcagaatgaatatagacactgtatctaagtgggaccaaagaaaaaatagcgaactttcaccaaagttttcatgaaaacccaaaagctttaaaagttactatcaagaaattgaaaggaaacccacagaataggataaaatatttgtaaatcatatatttgataaaagtcttgtaaccagatacataaagagctcttacaactcaataaaaggcaagtaatttaaaaataggcaaaagaattgctggatggtatggtagttctatttttagtttttaccctaactactctgacttgatcatttaacattctgtgtatgtaacaaaatatcacatgcataaatattatgtatcaataaaattttttaatgggcaaa

SEQ ID NO: 1136 - DNA, 581 bp, Homo sapiens
  source 1..581: mol_type = unassigned DNA
tttgagcagtgactgggatgcagtgaggagcaagccatgcaaacatctggggagacagcatccaggcagtgggaatggcaggtgcaaaggtcctgaggtgatagaaaaaaatgtcgatcctgaaacaatgctgttgccttatttgaggaagaagcttcgactcacaggaactaagtatggctgtggaggaggaggctgtggtgcttgtacagtgatgatatcacgatacaaccccatcaccaagaggataaggcatcacccagccaatgcctgtctgattcccatctgttctctgtatggtgctgccgtcaccacagtagaaggcataggaagcacccacaccagaattcatcctgttcaggagaggattgccaagtgtcatggcacccagtgtggcttctgcacacctgggatggtgatgtccatctacacgctgctcaggaaccacccagagcccactctggatcagttaactgatgcccttggtggtaacctgtgccgttgcactggatacaggcccataattgatgcatgcaagactttctgtaaaacttcgggctgctgtcaaagtaaagaaaatg

SEQ ID NO: 1137 - DNA, 665 bp, Homo sapiens
  source 1..665: mol_type = unassigned DNA
attcttttggaacagacaaaaaaaatagttctccaaagccttgcttaatccttattttagcacttgcttttttatgattacataaatgaaaataactcattatttttaaaagtctttagggggacacatcattagcaggcatccagattcagatctgaatcccatcctggctgtgggtaactgtaccctcaacttgctatcaaaagaaggaaaacgacagattcctttaaatgagcaattcctcagcaagtgccctaatgcagatcttaagcctcaagaaatcttggtctcagtgaacatcccctactcaaggaagtgggaatttgtgtcagccttccgacaagcccagcgacaggagaatgcgctagcgatagtcaattcaggaatgagagtcttttttggagaaggggatggcattattagagagttatgcatctcatatggaggcgttggtccagccaccatctgtgccaagaattcctgccagaaactcattggaaggcactggaacgaacagatgctggatatagcctgcaggcttattctgaatgaagtctcccttttgggctcggcgccaggtgggaaagtggagttcaagaggactctcatcatcagcttcctcttcaagttctacctggaagtgtcacagattttgaaaaagatgg

SEQ ID NO: 1138 - DNA, 3142 bp, Homo sapiens
  source 1..3142: mol_type = unassigned DNA
acagacaaaaaaaatagttctccaaagccttgcttaatccttattttagcacttgcttttttatgattacataaatgaaaataactcattatttttaaaagtctttagggggacacatcattagcaggcatccagattcagatctgaatcccatcctggctgtgggtaactgtaccctcaacttgctatcaaaagtgggaatttgtgtcagccttccgacaagcccagcgacaggagaatgcgctagcgatagtcaattcaggaatgagagtcttttttggagaaggggatggcattattagagagttatgcatctcatatggaggcgttggtccagccaccatctgtgccaagaattcctgccagaaactcattggaaggcactggaacgaacagatgctggatatagcctgcaggcttattctgaatgaagtctcccttttgggctcggcgccaggtgggaaagtggagttcaagaggactctcatcatcagcttcctcttcaagttctacctggaagtgtcacagattttgaaaaagatggatccagttcactatcctagccttgcagacaagtatgaaagtgctttagaagatcttcattccaaacatcactgcagtacattaaagtaccagaatataggcccaaagcagcatcctgaagacccaattggccaccccatcatgcatctgtctggtgtgaagcatgccacgggggaggccatctactgtgatgacatgcctctggtggaccaggaacttttcttgacttttgtgactagttcaagagctcatgctaagattgtgtctattgatctgtcagaagctctcagcatgcccggtgtggtggacatcatgacagcagaacatcttagtgacgtcaactccttctgcttttttactgaagctgagaaatttctggcgacagataaggtgttctgtgtgggtcagcttgtctgtgctgtgcttgccgattctgaggttcaggcaaagcgagctgctaagcgagtgaagattgtctatcaagacttggagccgctgatactaacaattgaggaaagtatacaacacaactcctccttcaagccagaaaggaaactggaatatggaaatgttgacgaagcatttaaagtggttgatcaaattcttgaaggtgaaatacatatgggaggtcaagaacatttttatatggaaacccaaagcatgcttgtcgttcccaagggagaggatcaagaaatggatgtctacgtgtccacacagtttcccaaatatatacaggacattgttgcctcaaccttgaagctcccagctaacaaggtcatgtgccatgtaaggcgtgttggtggagcgtttggagggaaggtgttaaaaaccggaatcattgcagccgtcactgcatttgccgcaaacaaacatggccgtgcagttcgctgtgttctggaacgaggagaagacatgttaataactggaggccgccatccttaccttggaaagtacaaagctggattcatgaacgatggcagaatcttggccctggacatggagcattacagcaatgcaggcgcctccttggatgaatcattattcgtgatagaaatgggacttctgaaaatggacaatgcttacaagtttcccaatctccgctgccggggttgggcatgcagaaccaaccttccatccaacacagcttttcgtgggtttggctttcctcaggcagcgctgatcaccgaatcttgtatcacggaagttgcagccaaatgtggactatcccctgagaaggtgcgaatcataaacatgtacaaggaaattgatcaaacaccctacaaacaagagatcaatgccaagaacctaatccagtgttggagagaatgtatggccatgtcttcctactccttgaggaaagttgctgtggaaaagttcaatgcagagaattattggaagaagaaaggactggccatggtccccctgaagtttcctgttggccttggctcacgtgctgctggtcaggctgctgccttggttcacatttatcttgatggctctgtgctggtcactcacggtggaattgaaatggggcagggggtccacactaaaatgattcaggtggtcagccgtgaattaagaatgccaatgtcgaatgtccacctgcgtggaacaagcacagaaactgtccctaatgcaaatatctctggaggttctgtggtggcagatctcaacggtttggcagtaaaggatgcctgtcaaactcttctaaaacgcctcgaacccatcatcagcaagaatcctaaaggaacttggaaagactgggcacagactgcttttgatgaaagcattaacctttcagctgttggatacttcagaggttatgagtcagacatgaactgggagaaaggcgaaggccagcccttcgaatactttgtttatggagctgcctgttccgaggttgaaatagactgcctgacgggggatcataagaacatcagaacagacattgtcatggatgttggctgcagtataaatccagccattgacataggccagattgaaggtgcatttattcaaggcatgggactttatacaatagaggaactgaattattctccccagggcattctgcacactcgtggtccagaccaatataaaatccctgccatctgtgacatgcccacggagttgcacattgctttgttgcctccttctcaaaactcaaatactctttattcatctaagggtctgggagagtcgggggtgttcctggggtgttccgtgtttttcgctatccatgacgcagtgagtgcagcacgacaggagagaggcctgcatggacccttgacccttaatagtccactgaccccggagaagattaggatggcctgtgaagacaagttcacaaaaatgattccgagagatgaacctggatcctacgttccttggaatgtacccatctgaatcaaatgcaaacttctggagaaaacagagtgcctcttcccagatggcaatctgtcctatctctgtgctggaagatgctagatctgaaagacagagtttccacagttcagaaatcatcccacagtgttgcttttctatggagctgatttaaagtattccatttagatttgatagatatgcttaagcaatctat

SEQ ID NO: 1139 - DNA, 3213 bp, Homo sapiens
  source 1..3213: mol_type = unassigned DNA
aaagccttgcttaatccttattttagcacttgcttttttatgattacataaatgaaaataactcattatttttaaaagtctttagggggacacatcattagcaggcatccagattcagatctgaatcccatcctggctgtgggtaactgtaccctcaacttgctatcaaaagtgggaatttgtgtcagccttccgacaagcccagcgacaggagaatgcgctagcgatagtcaattcaggaatgagagtcttttttggagaaggggatggcattattagagagttatgcatctcatatggaggcgttggtccagccaccatctgtgccaagaattcctgccagaaactcattggaaggcactggaacgaacagatgctggatatagcctgcaggcttattctgaatgaagtctcccttttgggctcggcgccaggtgggaaagtggagttcaagaggactctcatcatcagcttcctcttcaagttctacctggaagtgtcacagattttgaaaaagatggatccagttcactatcctagccttgcagacaagtatgaaagtgctttagaagatcttcattccaaacatcactgcagtacattaaagtaccaggtctattgatctgtcagaagctctcagcatgcccggtgtggtggacatcatgacagcagaacatcttagtgacgtcaactccttctgcttttttactgaagctgagaaatttctggcgacagataaggtgttctgtgtgggtcagcttgtctgtgctgtgcttgccgattctgaggttcaggcaaagcgagctgctaagcgagtgaagattgtctatcaagacttggagccgctgatactaacaattgaggaaagtatacaacacaactcctccttcaagccagaaaggaaactggaatatggaaatgttgacgaagcatttaaagtggttgatcaaattcttgaaggtgaaatacatatgggaggtcaagaacatttttatatggaaacccaaagcatgcttgtcgttcccaagggagaggatcaagaaatggatgtctacgtgtccacacagtttcccaaatatatacaggacattgttgcctcaaccttgaagctcccagctaacaaggtcatgtgccatgtaaggcgtgttggtggagcgtttggagggaaggtgttaaaaaccggaatcattgcagccgtcactgcatttgccgcaaacaaacatggccgtgcagttcgctgtgttctggaacgaggagaagacatgttaataactggaggccgccatccttaccttggaaagtacaaagctggattcatgaacgatggcagaatcttggccctggacatggagcattacagcaatgcaggcgcctccttggatgaatcattattcgtgatagaaatgggacttctgaaaatggacaatgcttacaagtttcccaatctccgctgccggggttgggcatgcagaaccaaccttccatccaacacagcttttcgtgggtttggctttcctcaggcagcgctgatcaccgaatcttgtatcacggaagttgcagccaaatgtggactatcccctgagaaggtgcgaatcataaacatgtacaaggaaattgatcaaacaccctacaaacaagagatcaatgccaagaacctaatccagtgttggagagaatgtatggccatgtcttcctactccttgaggaaagttgctgtggaaaagttcaatgcagagaattattggaagaagaaaggactggccatggtccccctgaagtttcctgttggccttggctcacgtgctgctggtcaggctgctgccttggttcacatttatcttgatggctctgtgctggtcactcacggtggaattgaaatggggcagggggtccacactaaaatgattcaggtggtcagccgtgaattaagaatgccaatgtcgaatgtccacctgcgtggaacaagcacagaaactgtccctaatgcaaatatctctggaggttctgtggtggcagatctcaacggtttggcagtaaaggatgcctgtcaaactcttctaaaacgcctcgaacccatcatcagcaagaatcctaaaggaacttggaaagactgggcacagactgcttttgatgaaagcattaacctttcagctgttggatacttcagaggttatgagtcagacatgaactgggagaaaggcgaaggccagcccttcgaatactttgtttatggagctgcctgttccgaggttgaaatagactgcctgacgggggatcataagaacatcagaacagacattgtcatggatgttggctgcagtataaatccagccattgacataggccagattgaaggtgcatttattcaaggcatgggactttatacaatagaggaactgaattattctccccagggcattctgcacactcgtggtccagaccaatataaaatccctgccatctgtgacatgcccacggagttgcacattgctttgttgcctccttctcaaaactcaaatactctttattcatctaagggtctgggagagtcgggggtgttcctggggtgttccgtgtttttcgctatccatgacgcagtgagtgcagcacgacaggagagaggcctgcatggacccttgacccttaatagtccactgaccccggagaagattaggatggcctgtgaagacaagttcacaaaaatgattccgagagatgaacctggatcctacgttccttggaatgtacccatctgaatcaaatgcaaacttctggagaaaacagagtgcctcttcccagatggcaatctgtcctatctctgtgctggaagatgctagatctgaaagacagagtttccacagttcagaaatcatcccacagtgttgcttttctatggagctgatttaaagtattccatttagatttgatagatatgcttaagcaatctataaatcattttcaatgttataaacactaattggtttcctctagggtgatatccgtcattactctgtctcttcaatccatccagctaaatggaataggtgatgacttgcatgtgactcctacttggcttctatccaccaacagaaattataccatatagtgaaaggcaattttctaaataatttcattactaatatgaactgtgaagttgtcattttttcatttgtccttttctgctatcaccttcctcttgtcagaatgaatata

SEQ ID NO: 1140 - DNA, 452 bp, Homo sapiens
  source 1..452: mol_type = unassigned DNA
ggctcttgccaggagttatataaaccccagagaatgcctgctaggtaaaagaggttacctcacttactttttttctgttttagacatggccgtgcagttcgctgtgttctggaacgaggagaagacatgttaataactggaggccgccatccttaccttggaaagtacaaagctggattcatgaacgatggcagaatcttggccctggacatggagcattacagcaatgcaggcgcctccttggatgaatcattattcgtgatagaaatgggacttctgaaaatggacaatgcttacaagtttcccaatctccgctgccggggttgggcatgcagaaccaaccttccatccaacacagcttttcgtgggtttggctttcctcaggcagcgctgatcaccgaatcttgtatcacggaagttgcagccaaatgtggactatcccctgagaaggt

SEQ ID NO: 1141 - DNA, 580 bp, Homo sapiens
  source 1..580: mol_type = unassigned DNA
agcaagaatcctaaaggaacttggaaagactgggcacagactgcttttgatgaaagcattaacctttcagctgttggatacttcagaggttatgagtcagacatgaactgggagaaaggcgaaggccagcccttcgaatactttgtttatggagctgcctgttccgaggttgaaatagactgcctgacgggggatcataagaacatcagaacagacattgtcatggatgttggctgcagtataaatccagccattgacataggccagggcattctgcacactcgtggtccagaccaatataaaatccctgccatctgtgacatgcccacggagttgcacattgctttgttgcctccttctcaaaactcaaatactctttattcatctaagggtctgggagagtcgggggtgttcctggggtgttccgtgtttttcgctatccatgacgcagtgagtgcagcacgacaggagagaggcctgcatggacccttgacccttaatagtccactgaccccggagaagattaggatggcctgtgaagacaagttcacaaaaatgattccgagagatgaacctggat

SEQ ID NO: 1142 - DNA, 673 bp, Homo sapiens
  source 1..673: mol_type = unassigned DNA
tactttgtttatggagctgcctgttccgaggttgaaatagactgcctgacgggggatcataagaacatcagaacagacattgtcatggatgttggctgcagtataaatccagccattgacataggccagattgaaggtgcatttattcaaggcatgggactttatacaatagaggaactgaattattctccccagggcattctgcacactcgtggtccagaccaatataaaatccctgccatctgtgacatgcccacggagttgcacattgctttgttgcctccttctcaaaactcaaatactctttattcatctaagggtctgggagagtcgggggtgttcctggggtgttccgtgtttttcgctatccatgacgcagtgagtgcagcacgacaggagagaggcctgcatggacccttgacccttaatagtccactgaccccggagaagattaggatggcctgtgaagacaagttcacaaaaatgggagcacatggcaagcctgtcaggcggacacaggaacaggtgcttttgatacaacttcacaagattcagccaatgctggtggcataatgtcacattccaaggcgtcagatgaacttggtttgtttgtatgtgaatggaagaacagtaagttttctacattattaataaattcatataaagaaagaaa

SEQ ID NO: 1143 - DNA, 1785 bp, Homo sapiens
  source 1..1785: mol_type = unassigned DNA
cacactttcagtgccagggcattgtgggaagcagccatggtctaagccgggcgcctcacctgtcagccgcaccggctccagcgctcgcctctcgccctcgcttctccagcgctccttgctcgcaaggcgggggaggcggcggcccagccacgatgatacatttcatattgctcttcagtcgacaagggaaattacggctacagaaatggtacatcactctccctgataaagagaggaagaagatcacccgggaaattgttcagattattctctcccgtggtcacaggacaagcagttttgttgactggaaggagctaaaacttgtttataaaaggtatgctagtttatatttttgctgtgcaatagaaaatcaggacaatgagctcttgacgctagagattgtgcatcgttacgtggagctgctggacaaatattttggaaatgtctgtgagctggatattatctttaattttgaaaaggcttatttcatcctggacgagtttataataggtggggaaattcaggaaacatccaagaaaattgctgtcaaagccattgaagactctgatatgttacaggagaatcgtttgagccccagaggcagagattgcagtgagccgagatcatgccattgcactctagcctaggcaacaagagcaaaactccatctaaaaaaaaaaaaaaagaaaagaaaaaggagaattatgaagaacttggttccacaagtaagatagtcctcatactgcatcagtagtgacttaaacttttttaaaacttttattttttgtggggggatctgttgaatttgggaagcctccagttttaataaaatttttttattatggtggaaacatgtctgtaaaacttaggactatagaaatgcaaagaataaagaactgagggagttacacacatttgtagtcagaaattaagttcaaaaaataatttaggtcatttgcattttttagtatgcaaaataaatggaaaaattaaagtgcaataaaaatataatttgggaaatgaatgcagtaaaattgaaaacattgaaatattataatttaataaaataaacttcaaaaaatgtatgaaaatataagtatctttacttatataggattaaatatatttctgataatctgtcctctataatgaattggtttaattatgtttttctgtttttagaaatgggcatctttttatttctggaaacaactttttaatgagattttatcaaacattagactatgactaattataatattcaaagccaataccaaaacgatggataaataaatgaataaaacaaggcacattaatagaaaaaaatgaatgaaatcaattacgggttctacttgaaacacctaatctcattataatagcaataataaaacaatttgtacatactttattagtcgaacatttattaaaaatataagagcatagagcaaattaatttggaagaaaatttaaatcttttacatacaaataccctcaagaataataaatcatggagtattaataaaattaaaccagctgataattttagaaagtgcttcatgcacagagacttttattcaagtcctctttgctttctgctagtgcttttttttttttcttgaaatgggatgggatctcactctgtcacccaggctggagtgcagtagcacgatagcagcgcactgcaacctggacctcctgggctcaagcaatcctctcaccgcagcctcctgagtagctggggctacaggtgtgtgccaccatacttggctaattaaaaaaaaaaaa

SEQ ID NO: 1144 - DNA, 2515 bp, Homo sapiens
  source 1..2515: mol_type = unassigned DNA
ggaggagaaaggggaaaggaagaaagaaggagagcaggagggcgaggagcggggggagcggggaggagggcgcggggaggaggcagcggggaggagcgtgcagggaggaggcagccgcgctgggaggagtctgcacactttcagtgccagggcattgtgggaagcagccatggtctaagccgggcgcctcacctgtcagccgcaccggctccagcgctcgcctctcgccctcgcttctccagcgctccttgctcgcaaggcgggggaggcggcggcccagccacgatgatacatttcatattgctcttcagtcgacaagggaaattacggctacagaaatggtacatcactctccctgataaagagaggaagaagatcacccgggaaattgttcagattattctctcccgtggtcacaggacaagcagttttgttgactggaaggagctaaaacttgtttataaaaggtatgctagtttatatttttgctgtgcaatagaaaatcaggacaatgagctcttgacgctagagattgtgcatcgttacgtggagctgctggacaaatattttggaaatacttggccttttgcaagagcctgaagaagtttccttgaggtctgtgagctggatattatctttaattttgaaaaggcttatttcatcctggacgagtttataataggtggggaaattcaggaaacatccaagaaaattgctgtcaaagccattgaagactctgatatgttacaggagacaatggaagaatacatgaacaagcctacattttaactggaaatctacttgaagactccagcactacatgttatgaagctgtaaataagcaacgcctcccatccggttttttgatggagcctcaggcaccatgccaaaaataatttaaagggattctttgttaactaacaaagttaaagttgtttaacatatttataattactatgtgtctgtattattaaaaaaaattatgtgtctgtgttatactgtataggtacttgtagctctaaatgtttaaagtaactaccacctaacccaacagacaatatttgtaatgtattaactccatgttatgtttttaagctggtttagatacattagctgcaattttttttgcatttgacacaatattgtaataatccatgattttgaatgtaaagtatatatgatgtcattaatactttttctaaatgtttagttttctaaattgtataataattcaaaattatgttaatagtgcagagtttatatgtaatgctagacatttttcatacacttaatagtactgtaactgcaattcacatacaaaatgtctgattttaatgtgctgaattcatttattttttttagaattgggattatgaaaataaccaaagagtatagaacttaataagtgtttttgatgccttagaagctgctatcttgactgaggttttaatttatcttttaattgaatataagggacattccaataaggttttctatgaactatatatttattaaggtttatagagacctagagatacagcatctatgacttcctttattattctaaaatagtatgataagaattaatagcaataataattattgctactattttttaaaattcacgttccaagcactcttagatgctggaaatttcatttcaaatatgttttaatgtatctctaatgcatttgaagacttattacatggcttacttagagcatttaagattatcacagcctatatggtagattcctttccttcttttttcttttcttaccctttcctccccaaagaaaagatttgctgctgaccattattactgtaagtatatcacatttgtgcttcctggaatgaaaattctgtataaccaggtcctaacagtgatcagacatattacagggaaatagcttgtaggccgggagtggtggcttacacctgtaatcccagcactttgggaggccgaggcaggtggatcacttgaggtcaggagttcgagagcagcctggccaatatgatgaaaccccatctctactaaaaatacaaaaattaggccgggtacagtggctcatgcctataattccagcactttgggaggcagaggtgggcggatcacaaggtcaagagatcaagaccatcctcgccaacaaggtgaaaccccacctctattaaaaatacaaaaattagccgggagtggtggtgcgtgcctgtagtcccagctacttgggaggctgaggcaggagaatcgcttgaacctgggaggcagaagttgcagtgagctgagattgtgccactgcactccagcctgggcgacagagcgagacttcgtctcaaacaaacaaaaaaattagccgggcatggtggcaggtgcctgtaatcccagctactcagggggctgaggcaggggaatggcttgaacccaggaggcagaggttgcagtgagccaaggtcataccagtgcactccaggcgggtgacagagcaagactgcgtctcaagaaaaaaaaaaaaaaaaa

SEQ ID NO: 1145 - DNA, 2201 bp, Homo sapiens
  source 1..2201: mol_type = unassigned DNA
agccatggtctaagccgggcgcctcacctgtcagccgcaccggctccagcgctcgcctctcgccctcgcttctccagcgctccttgctcgcaaggcgggggaggcggcggcccagccacgatgatacatttcatattgctcttcagtcgacaagggaaattacggctacagaaatggtacatcactctccctgataaagagaggaagaagatcacccgggaaattgttcagattattctctcccgtggtcacaggacaagcagttttgttgactggaaggagctaaaacttgtttataaaaggtctgtgagctggatattatctttaattttgaaaaggcttatttcatcctggacgagtttataataggtggggaaattcaggaaacatccaagaaaattgctgtcaaagccattgaagactctgatatgttacaggagacaatggaagaatacatgaacaagcctacattttaactggaaatctacttgaagactccagcactacatgttatgaagctgtaaataagcaacgcctcccatccggttttttgatggagcctcaggcaccatgccaaaaataatttaaagggattctttgttaactaacaaagttaaagttgtttaacatatttataattactatgtgtctgtattattaaaaaaaattatgtgtctgtgttatactgtataggtacttgtagctctaaatgtttaaagtaactaccacctaacccaacagacaatatttgtaatgtattaactccatgttatgtttttaagctggtttagatacattagctgcaattttttttgcatttgacacaatattgtaataatccatgattttgaatgtaaagtatatatgatgtcattaatactttttctaaatgtttagttttctaaattgtataataattcaaaattatgttaatagtgcagagtttatatgtaatgctagacatttttcatacacttaatagtactgtaactgcaattcacatacaaaatgtctgattttaatgtgctgaattcatttattttttttagaattgggattatgaaaataaccaaagagtatagaacttaataagtgtttttgatgccttagaagctgctatcttgactgaggttttaatttatcttttaattgaatataagggacattccaataaggttttctatgaactatatatttattaaggtttatagagacctagagatacagcatctatgacttcctttattattctaaaatagtatgataagaattaatagcaataataattattgctactattttttaaaattcacgttccaagcactcttagatgctggaaatttcatttcaaatatgttttaatgtatctctaatgcatttgaagacttattacatggcttacttagagcatttaagattatcacagcctatatggtagattcctttccttcttttttcttttcttaccctttcctccccaaagaaaagatttgctgctgaccattattactgtaagtatatcacatttgtgcttcctggaatgaaaattctgtataaccaggtcctaacagtgatcagacatattacagggaaatagcttgtaggccgggagtggtggcttacacctgtaatcccagcactttgggaggccgaggcaggtggatcacttgaggtcaggagttcgagagcagcctggccaatatgatgaaaccccatctctactaaaaatacaaaaattaggccgggtacagtggctcatgcctataattccagcactttgggaggcagaggtgggcggatcacaaggtcaagagatcaagaccatcctcgccaacaaggtgaaaccccacctctattaaaaatacaaaaattagccgggagtggtggtgcgtgcctgtagtcccagctacttgggaggctgaggcaggagaatcgcttgaacctgggaggcagaagttgcagtgagctgagattgtgccactgcactccagcctgggcgacagagcgagacttcgtctcaaacaaacaaaaaaattagccgggcatggtggcaggtgcctgtaatcccagctactcagggggctgaggcaggggaatggcttgaacccaggaggcagaggttgcagtgagccaaggtcataccagtgcactccaggcgggtgacagagcaagactgcgtctcaagaaaaaaaaaaaaaaaa

SEQ ID NO: 1146 - DNA, 830 bp, Homo sapiens
  source 1..830: mol_type = unassigned DNA
attgtgggaagcagccatggtctaagccgggcgcctcacctgtcagccgcaccggctccagcgctcgcctctcgccctcgcttctccagcgctccttgctcgcaaggcgggggaggcggcggcccagccacgatgatacatttcatattgctcttcagtcgacaagggaaattacggctacagaaatggtacatcactctccctgataaagagaggaagaagatcacccgggaaattgttcagattattctctcccgtggtcacaggacaagcagttttgttgactggaaggagctaaaacttgtttataaaaggtatgctagtttatatttttgctgtgcaatagaaaatcaggacaatgagctcttgacgctagagattgtgcatcgttacgtggagctgctggacaaatattttggaaatgtctgtgagctggatattatctttaattttgaaaaggcttatttcatcctggacgagtttataataggtggggaaattcaggaaacatccaagaaaattgctgtcaaagccattgaagactctgatatgttacaggagacaatggaagaatacatgaacaagcctacattttaactggaaatctacttgaagactccagcactacatgttatgaagctgtaaataagcaacgcctcccatccggttttttgatggagcctcaggcaccatgccaaaaataatttaaagggattctttgttaactaacaaagttaaagttgtttaacatatttataattactatgtgtctgtattattaaaaaaaattatgtgtctgtgttatactgtataggtacttgtagctctaa

SEQ ID NO: 1147 - DNA, 589 bp, Homo sapiens
  source 1..589: mol_type = unassigned DNA
attgtgggaagcagccatggtctaagccgggcgcctcacctgtcagccgcaccggctccagcgctcgcctctcgccctcgcttctccagcgctccttgctcgcaaggcgggggaggcggcggcccagccacgatgatacatttcatattgctcttcagtcgacaagggaaattacggctacagaaatggtacatcactctccctgataaagagaggaagaagatcacccgggaaattgttcagattattctctcccgtggtcacaggacaagcagttttgttgactggaaggagctaaaacttgtttataaaaggtgtctgtgagctggatattatctttaattttgaaaaggcttatttcatcctggacgagtttataataggtggggaaattcaggaaacatccaagaaaattgctgtcaaagccattgaagactctgatatgttacaggaggtcagtacggtttcccaaaccatgggagaaagatgatgatgatgatgatgatggtgttaataattataatattaaccagacttactgagtacttactctgtgctgggtacagtttctaaactatttatatgtatt

SEQ ID NO: 1148 - DNA, 499 bp, Homo sapiens
  source 1..499: mol_type = unassigned DNA
ctcgcaaggcgggggaggcggcggcccagccacgatgatacatttcatattgctcttcagtcgacaagggaaattacggctacagaaatggtacatcactctccctgataaagagaggaagaagatcacccgggaaattgttcagattattctctcccgtggtcacaggacaagcagttttgttgactggaaggagctaaaacttgtttataaaaggtatgctagtttatatttttgctgtgcaatagaaaatcaggacaatgagctcttgacgctagagattgtgcatcgttacgtggagctgctggacaaatattttggaaatgtctgtgagctggatattatctttaattttgaaaaggcttatttcatcctggacgagtttataataggtggggaaattcaggaaacatccaagaaaattgctgtcaaagccattgaagactctgatatgttacaggaggtcagtacggtttcccaaaccatgggagaaagatga

SEQ ID NO: 1149 - DNA, 561 bp, Homo sapiens
  source 1..561: mol_type = unassigned DNA
aaacgtttgcggaaggaatacaggacacactcgcgcggcagaatcgcgaaaagtccccggtgttctccgcgcagggagttccccgcgcagggagttcctagcgggccacgcgctctcgcctgaccacccgcgccgagctgcgggctgtcggggtacagacgcccgcgcgcgcaggtgcattcgctccagatacatttcatattgctcttcagtcgacaagggaaattacggctacagaaatggtacatcactctccctgataaagagaggaagaagatcacccgggaaattgttcagattattctctcccgtggtcacaggacaagcagttttgttgactggaaggagctaaaacttgtttataaaaggaggctattgggggtgatgaataatgatttcattcttggatgaggagaggctcggcgggggaggaggtgactgcatattcgtgggaaaaactgtctccaggttgcttaatgtctgtgagctggatattatctttaattttgaaaaggcttatttcatcctggacgagtttataataggtggggaaattcagga

SEQ ID NO: 1150 - DNA, 552 bp, Homo sapiens
  source 1..552: mol_type = unassigned DNA
gtcagccgcaccggctccagcgctcgcctctcgccctcgcttctccagcgctccttgctcgcaaggcgggggaggcggcggcccagccacgatgatacatttcatattgctcttcagtcgacaagggaaattacggctacagaaatggtacatcactctccctgataaagagaggaagaagatcacccgggaaattgttcagattattctctcccgtggtcacaggacaagcagttttgttgactggaaggagctaaaacttgtttataaaaggtatgctagtttatatttttgctgtgcaatagaaaatcaggacaatgagctcttgacgctagagattgtgcatcgttacgtggagctgctggacaaatattttggaaatgagtttaattgctggtttctcctaatgaggctcctgtctgtcttggattcctggtctacgcctgccttgaactccgaggttcctcagcttgctactataactcctgacttctgccttttctgacctctggtctgtgagctggatattatctttaattttgaaaaggctta

SEQ ID NO: 1151 - DNA, 535 bp, Homo sapiens
  source 1..535: mol_type = unassigned DNA
aacaaccgctgacttcctggttcctgggtgccgcatcactgcccctctgctccgggtcaaaccggctgtatgcttagcttcaggaacatgtggcaggtggcagcccccggccccgtggcagtctcctgaatatttacgcgttgctgaatctcctgtggacaaaccaccaataggccaggactgtcctgtggacagacggggtgagcctcttcttgtgtctggagattctgaaaagatttgatcaccaggagatttttcgggacattaccaaaccactcattttagtggctgcctccgggtgatgatggctgtgtgaacgactgccatggcccaccggaagcttgagagcgtggggagcggcatgttggaccatagggtgagaccaggtcctgtccctcacagccaggagcccgagagcgaggacatggagctgcccttggagggctatgtgcccgagggcctggagctggctgccctgcggccagagagccccgcgccagaggaacaggagtgccacaaccacagccccgatggg

SEQ ID NO: 1152 - DNA, 217 bp, Homo sapiens
  source 1..217: mol_type = unassigned DNA
tctcctgaatatttacgcgttgctgaatctcctgtggacaaaccaccaataggccaggactgtcctgtggacagacggggtgagcctcttcttgtgtctggagattctgaaaagatttgatcaccaggagatttttcgggacattaccaaaccactcattttagtggctgcctccgggtgatgatggctgtgtgaacgactgccatggcccaccgga

SEQ ID NO: 1153 - DNA, 2436 bp, Homo sapiens
  source 1..2436: mol_type = unassigned DNA
tctcctgaatatttacgcgttgctgaatctcctgtggacaaaccaccaataggccaggactgtcctgtggacagacggggtgagcctcttcttgtgtctggagattctgaaaagatttgatcaccaggagatttttcgggacattaccaaaccactcattttagtggctgcctccgggtgatgatggctgtgtgaacgactgccatggcccaccggaagcttgagagcgtggggagcggcatgttggaccatagggtgagaccaggtcctgtccctcacagccaggagcccgagagcgaggacatggagctgcccttggagggctatgtgcccgagggcctggagctggctgccctgcggccagagagccccgcgccagaggaacaggagtgccacaaccacagccccgatggggactccagctctgactacgtgaacaacacctctgaggaggaggactatgacgagggcctccctgaggaggaggagggcatcacctactacatccgctactgccctgaggacgacagctacctagagggcatggactgcaacggggaggagtacctggcccacagtgcacaccctgtggacactgatgagtgccaggaggcggtggaggagtggacggactcggcgggcccgcacccccacggccacgaggctgaaggcagccaggactacccagacggccaactgcccattccggaggatgagccctccgtccttgaggcccatgaccaggaagaagatggtcactactgtgccagcaaagagggctaccaggactactaccccgaggaggccaacgggaacaccggcgcctccccctaccgcctgaggcgtggggatggggacctggaggaccaggaggaggacattgaccagatcgtggcagagatcaagatgagtctgagcatgaccagcatcaccagcgccagtgaggccagccccgagcatgggcctgagccagggcctgaggactctgtagaggcctgcccacccatcaaggccagctgcagccccagcaggcacgaggcgaggcccaagtcgctgaacctccttcccgaggccaagcaccccggagacccccagagaggcttcaagcccaagaccaggaccccagaagagaggctgaagtggccccacgagcaggtttgcaatggtctggagcagccaaggaagcagcagcgctctgatctcaatggacctgttgacaataacaacattccagagacaaagaaggtggcatcatttccaagttttgtggctgttccagggccctgcgaaccagaagacctcatcgacgggatcatctttgctgccaattacctggggtccacccagctgctatcagaacggaacccttccaaaaacatcagaatgatgcaagcgcaggaggccgtcagccgggtcaagaattctgagggggatgcccagacgctgacggaagtggacctcttcatttccacccagaggatcaaggttttaaatgcagacacgcaggaaaccatgatggaccacgccttgcgtaccatctcctacatcgccgacattgggaacattgtagtgctgatggccagacgccgcatgccccggtcagcctctcaggactgcatcgagaccacgcccggggcccaggaaggcaagaagcagtataagatgatctgccatgtgttcgagtcggaggatgcccagctcatcgcccagtctatcggccaggccttcagcgtggcctaccaggagttcctgcgagccaatggcatcaaccccgaagacttgagccagaaggaatacagcgacatcatcaacacccaggagatgtacaacgacgacctcatccacttctcaaactcggagaactgcaaggagctgcagctggagaagcacaagggcgagatcctgggcgtggtggtggtggagtcgggctggggctccatcctgcccacggtgatcctggccaacatgatgaatggcggcccggctgcccgctcggggaagctgagcatcggggaccagatcatgtccatcaatggcaccagcctggtggggctgcccctcgccacctgccaaggcatcatcaagggcctgaagaaccagacacaggtgaagctcaacattgtcagctgtcccccggtcaccacggtccttatcaagcggccagacctcaagtaccagctgggcttcagcgtgcagaatggaattgtgagttccccctcctgctctgggccaccaccaccactgcagggcccagggagggggagcagctcccgtccaatggggcaggctatgtctggcagcctggtaggacctggcctgtggttgcagctgcccacagccaggccacctggggcaggaactttccatggctctctgggaggtcctggctagaaggggagggccagggcatggccgtggattgggcccctccagcct

SEQ ID NO: 1154 - DNA, 3006 bp, Homo sapiens
  source 1..3006: mol_type = unassigned DNA
tctcctgaatatttacgcgttgctgaatctcctgtggacaaaccaccaataggccaggactgtcctgtggacagacggggtgagcctcttcttgtgtctggagattctgaaaagatttgatcaccaggagatttttcgggacattaccaaaccactcattttagtggctgcctccgggtgatgatggctgtgtgaacgactgccatggcccaccggaagcttgagagcgtggggagcggcatgttggaccatagggtgagaccaggtcctgtccctcacagccaggagcccgagagcgaggacatggagctgcccttggagggctatgtgcccgagggcctggagctggctgccctgcggccagagagccccgcgccagaggaacaggagtgccacaaccacagccccgatggggactccagctctgactacgtgaacaacacctctgaggaggaggactatgacgagggcctccctgaggaggaggagggcatcacctactacatccgctactgccctgaggacgacagctacctagagggcatggactgcaacggggaggagtacctggcccacagtgcacaccctgtggacactgatgagtgccaggaggcggtggaggagtggacggactcggcgggcccgcacccccacggccacgaggctgaaggcagccaggactacccagacggccaactgcccattccggaggatgagccctccgtccttgaggcccatgaccaggaagaagatggtcactactgtgccagcaaagagggctaccaggactactaccccgaggaggccaacgggaacaccggcgcctccccctaccgcctgaggcgtggggatggggacctggaggaccaggaggaggacattgaccagatcgtggcagagatcaagatgagtctgagcatgaccagcatcaccagcgccagtgaggccagccccgagcatgggcctgagccagggcctgaggactctgtagaggcctgcccacccatcaaggccagctgcagccccagcaggcacgaggcgaggcccaagtcgctgaacctccttcccgaggccaagcaccccggagacccccagagaggcttcaagcccaagaccaggaccccagaagagaggctgaagtggccccacgagcaggtttgcaatggtctggagcagccaaggaagcagcagcgctctgatctcaatggacctgttgacaataacaacattccagagacaaagaaggtggcatcatttccaagttttgtggctgttccagggccctgcgaaccagaagacctcatcgacgggatcatctttgctgccaattacctggggtccacccagctgctatcagaacggaacccttccaaaaacatcagaatgatgcaagcgcaggaggccgtcagccgggtcaagaattctgagggggatgcccagacgctgacggaagtggacctcttcatttccacccagaggatcaaggttttaaatgcagacacgcaggaaaccatgatggaccacgccttgcgtaccatctcctacatcgccgacattgggaacattgtagtgctgatggccagacgccgcatgccccggtcagcctctcaggactgcatcgagaccacgcccggggcccaggaaggcaagaagcagtataagatgatctgccatgtgttcgagtcggaggatgcccagctcatcgcccagtctatcggccaggccttcagcgtggcctaccaggagttcctgcgagccaatggcatcaaccccgaagacttgagccagaaggaatacagcgacatcatcaacacccaggagatgtacaacgacgacctcatccacttctcaaactcggagaactgcaaggagctgcagctggagaagcacaagggcgagatcctgggcgtggtggtggtggagtcgggctggggctccatcctgcccacggtgatcctggccaacatgatgaatggcggcccggctgcccgctcggggaagctgagcatcggggaccagatcatgtccatcaatggcaccagcctggtggggctgcccctcgccacctgccaaggcatcatcaagggcctgaagaaccagacacaggtgaagctcaacattgtcagctgtcccccggtcaccacggtccttatcaagcggccagacctcaagtaccagctgggcttcagcgtgcagaatggaattatctgcagcctcatgagagggggcattgctgagcgagggggcgtccgtgtgggccaccgcatcatcgagatcaacgggcagagcgtggtggccacagcccacgagaagatagtccaagctctgtccaactcggtcggagagatccacatgaagaccatgcccgccgccatgttcaggctcctcacgggtcaggagaccccgctgtacatctaggccaccccagcctggccacgcagccaggacaccgggcagggccgcccgggcccagaggagctgggagccgggccgcagacttgaccccgacgccacagcccagccacggacgctggctccccaaagggtgtgccctcaccacccacttgatttttttcattttgccaaaaaggggtatgtctttatcaaaggagagtcacagaacaaatgtttgtttgtaaagcgttccaagtattttgccacgttctggactgtcttctccctgcacaagccagggtgtgtctcggtagctgtgcgtggtgtggagtgtgtgtctttcctccctgaagctgtgcggagcgaactggcgcctccgagggacgcggctcccggggcagggcagccgtcacccctgcctcccgcccccttggctgggacgtctggggtcctgtggggcccccacaatggtcccaaacagctgcctctgccactgactgcagggacacgggcagcctggctcccaggacacgacttgtaatgaaagtttggggacatgtgattgattgattgattgattgtaaataaaggatgatggccacaacatgaaaa

SEQ ID NO: 1155 - DNA, 3011 bp, Homo sapiens
  source 1..3011: mol_type = unassigned DNA
tctcctgaatatttacgcgttgctgaatctcctgtggacaaaccaccaataggccaggactgtcctgtggacagacgggaaagatttgatcaccaggagatttttcgggacattaccaaaccactcattttagtggctgcctccgggtgatgatggctgtgtgaacgactgccatggcccaccggaagcttgagagcgtggggagcggcatgttggaccatagggtgagaccaggtcctgtccctcacagccaggagcccgagagcgaggacatggagctgcccttggagggctatgtgcccgagggcctggagctggctgccctgcggccagagagccccgcgccagaggaacaggagtgccacaaccacagccccgatggggactccagctctgactacgtgaacaacacctctgaggaggaggactatgacgagggcctccctgaggaggaggagggcatcacctactacatccgctactgccctgaggacgacagctacctagagggcatggactgcaacggggaggagtacctggcccacagtgcacaccctgtggacactgatgagtgccaggaggcggtggaggagtggacggactcggcgggcccgcacccccacggccacgaggctgaaggcagccaggactacccagacggccaactgcccattccggaggatgagccctccgtccttgaggcccatgaccaggaagaagatggtcactactgtgccagcaaagagggctaccaggactactaccccgaggaggccaacgggaacaccggcgcctccccctaccgcctgaggcgtggggatggggacctggaggaccaggaggaggacattgaccagatcgtggcagagatcaagatgagtctgagcatgaccagcatcaccagcgccagtgaggccagccccgagcatgggcctgagccagggcctgaggactctgtagaggcctgcccacccatcaaggccagctgcagccccagcaggcacgaggcgaggcccaagtcgctgaacctccttcccgaggccaagcaccccggagacccccagagaggcttcaagcccaagaccaggaccccagaagagaggctgaagtggccccacgagcaggtttgcaatggtctggagcagccaaggaagcagcagcgctctgatctcaatggacctgttgacaataacaacattccagagacaaagaaggtggcatcatttccaagttttgtggctgttccagggccctgcgaaccagaagacctcatcgacgggatcatctttgctgccaattacctggggtccacccagctgctatcagaacggaacccttccaaaaacatcagaatgatgcaagcgcaggaggccgtcagccgggtcaagaggatgcaaaaggctgctaagatcaagaaaaaagcgaattctgagggggatgcccagacgctgacggaagtggacctcttcatttccacccagaggatcaaggttttaaatgcagacacgcaggaaaccatgatggaccacgccttgcgtaccatctcctacatcgccgacattgggaacattgtagtgctgatggccagacgccgcatgccccggtcagcctctcaggactgcatcgagaccacgcccggggcccaggaaggcaagaagcagtataagatgatctgccatgtgttcgagtcggaggatgcccagctcatcgcccagtctatcggccaggccttcagcgtggcctaccaggagttcctgcgagccaatggcatcaaccccgaagacttgagccagaaggaatacagcgacatcatcaacacccaggagatgtacaacgacgacctcatccacttctcaaactcggagaactgcaaggagctgcagctggagaagcacaagggcgagatcctgggcgtggtggtggtggagtcgggctggggctccatcctgcccacggtgatcctggccaacatgatgaatggcggcccggctgcccgctcggggaagctgagcatcggggaccagatcatgtccatcaatggcaccagcctggtggggctgcccctcgccacctgccaaggcatcatcaagggcctgaagaaccagacacaggtgaagctcaacattgtcagctgtcccccggtcaccacggtccttatcaagcggccagacctcaagtaccagctgggcttcagcgtgcagaatggaattatctgcagcctcatgagagggggcattgctgagcgagggggcgtccgtgtgggccaccgcatcatcgagatcaacgggcagagcgtggtggccacagcccacgagaagatagtccaagctctgtccaactcggtcggagagatccacatgaagaccatgcccgccgccatgttcaggctcctcacgggtcaggagaccccgctgtacatctaggccaccccagcctggccacgcagccaggacaccgggcagggccgcccgggcccagaggagctgggagccgggccgcagacttgaccccgacgccacagcccagccacggacgctggctccccaaagggtgtgccctcaccacccacttgatttttttcattttgccaaaaaggggtatgtctttatcaaaggagagtcacagaacaaatgtttgtttgtaaagcgttccaagtattttgccacgttctggactgtcttctccctgcacaagccagggtgtgtctcggtagctgtgcgtggtgtggagtgtgtgtctttcctccctgaagctgtgcggagcgaactggcgcctccgagggacgcggctcccggggcagggcagccgtcacccctgcctcccgcccccttggctgggacgtctggggtcctgtggggcccccacaatggtcccaaacagctgcctctgccactgactgcagggacacgggcagcctggctcccaggacacgacttgtaatgaaagtttggggacatgtgattgattgattgattgattgtaaataaaggatgatggccacaacatgaaaa

SEQ ID NO: 1156 - DNA, 3640 bp, Homo sapiens
  source 1..3640: mol_type = unassigned DNA
tctcctgaatatttacgcgttgctgaatctcctgtggacaaaccaccaataggccaggactgtcctgtggacagacggggtgagcctcttcttgtgtctggagattctgaaaagatttgatcaccaggagatttttcgggacattaccaaaccactcattttagtggctgcctccgggtgatgatggctgtgtgaacgactgccatggcccaccggaagcttgagagcgtggggagcggcatgttggaccatagggtgagaccaggtcctgtccctcacagccaggagcccgagagcgaggacatggagctgcccttggagggctatgtgcccgagggcctggagctggctgccctgcggccagagagccccgcgccagaggaacaggagtgccacaaccacagccccgatggggactccagctctgactacgtgaacaacacctctgaggaggaggactatgacgagggcctccctgaggaggaggagggcatcacctactacatccgctactgccctgaggacgacagctacctagagggcatggactgcaacggggaggagtacctggcccacagtgcacaccctgtggacactgatgagtgccaggaggcggtggaggagtggacggactcggcgggcccgcacccccacggccacgaggctgaaggcagccaggactacccagacggccaactgcccattccggaggatgagccctccgtccttgaggcccatgaccaggaagaagatggtcactactgtgccagcaaagagggctaccaggactactaccccgaggaggccaacgggaacaccggcgcctccccctaccgcctgaggcgtggggatggggacctggaggaccaggaggaggacattgaccagatcgtggcagagatcaagatgagtctgagcatgaccagcatcaccagcgccagtgaggccagccccgagcatgggcctgagccagggcctgaggactctgtagaggcctgcccacccatcaaggccagctgcagccccagcaggcacgaggcgaggcccaagtcgctgaacctccttcccgaggccaagcaccccggagacccccagagaggcttcaagcccaagaccaggaccccagaagagaggctgaagtggccccacgagcaggtttgcaatggtctggagcagccaaggaagcagcagcgctctgatctcaatggacctgttgacaataacaacattccagagacaaagaaggtggcatcatttccaagttttgtggctgttccagggccctgcgaaccagaagacctcatcgacgggatcatctttgctgccaattacctggggtccacccagctgctatcagaacggaacccttccaaaaacatcagaatgatgcaagcgcaggaggccgtcagccgggtcaagaggatgcaaaaggctgctaagatcaagaaaaaagcgaattctgagggggatgcccagacgctgacggaagtggacctcttcatttccacccagaggatcaaggttttaaatgcagacacgcaggaaaccatgatggaccacgccttgcgtaccatctcctacatcgccgacattgggaacattgtagtgctgatggccagacgccgcatgccccggtcagcctctcaggactgcatcgagaccacgcccggggcccaggaaggcaagaagcagtataagatgatctgccatgtgttcgagtcggaggatgcccagctcatcgcccagtctatcggccaggccttcagcgtggcctaccaggagttcctgcgagccaatggcatcaaccccgaagacttgagccagaaggaatacagcgacatcatcaacacccaggagatgtacaacgacgacctcatccacttctcaaactcggagaactgcaaggagctgcagctggagaagcacaagggcgagatcctgggcgtggtggtggtggagtcgggctggggctccatcctgcccacggtgatcctggccaacatgatgaatggcggcccggctgcccgctcggggaagctgagcatcggggaccagatcatgtccatcaatggcaccagcctggtggggctgcccctcgccacctgccaaggcatcatcaagggcctgaagaaccagacacaggtgaagctcaacattgtcagctgtcccccggtcaccacggtccttatcaagcggccagacctcaagtaccagctgggcttcagcgtgcagaatggaattatctgcagcctcatgagagggggcattgctgagcgagggggcgtccgtgtgggccaccgcatcatcgagatcaacgggcagagcgtggtggccacagcccacgagaagatagtccaagctctgtccaactcggtcggagagatccacatgaagaccatgcccgccgccatgttcaggctcctcacgggtcaggagaccccgctgtacatctaggccaccccagcctggccacgcagccaggacaccgggcagggccgcccgggcccagaggagctgggagccgggccgcagacttgaccccgacgccacagcccagccacggacgctggctccccaaagggtgtgccctcaccacccacttgatttttttcattttgccaaaaaggggtatgtctttatcaaaggagagtcacagaacaaatgtttgtttgtaaagcgttccaagtattttgccacgttctggactgtcttctccctgcacaagccagggtgtgtctcggtagctgtgcgtggtgtggagtgtgtgtctttcctccctgaagctgtgcggagcgaactggcgcctccgagggacgcggctcccggggcagggcagccgtcacccctgcctcccgcccccttggctgggacgtctggggtcctgtggggcccccacaatggtcccaaacagctgcctctgccactgactgcagggacacgggcagcctggctcccaggacacgacttgtaatgaaagtttggggacatgtgattgattgattgattgattgtaaataaaggatgatggccacaacatgaaaactccatatttatttagatgctattattactgtttggacttttattttggcaggcttttttccagactctagggttttccaatgtgactaatgaccacacctgcctctcccgtcgtctcttctgggcaccctcccacccggctgcatacccggccagggctcccacagagacaaggagggcacaggtgtctgccccctctttaaaatcgatctacacacatccacgcacatgcgaccccgaggaaacgaaacccactctagaaaacgcgaccttggccgcacctaaagcagccagccgtgagtgcagaccccttggccagcgtggcgcagtggccctgagcagtagtggcatgtgtgtagatcaagtcggatctagtccagctcggttcattagcgatccatgtaatctgacgtcatcttgtctcgaagtctctttttttggcccaggccttgaagaatacactgtgacttaagaagccttaccacgcagtaactaaagctttaggatgactgtattcgaggagtgccgtgtgttgcatgcagctacccgtaggaagacttcgcgcatatcactaataaacctgaagtcgtgatgaaaa

SEQ ID NO: 1157 - DNA, 711 bp, Homo sapiens
  source 1..711: mol_type = unassigned DNA
gcagatgagggcctgcttgggtctggggcgtcagtggggattggctgcaggcagccatgaggagccttcagggtgatgagggttctaaaagtgcgtcgtgtgcctgagccactgcgacattcactagaagtcctccgtgctgacggagggtgaactgtgtggggcccaagttctatctcaggaaagccagggaagccactcagttcagctttgtgaaaatcaagggagtcttcttggaggaagtggactctgagctggatgtgaatgacggagtgtctttgaaagatttgatcaccaggagatttttcgggacattaccaaaccactcattttagtggctgcctccgggtgatgatggctgtgtgaacgactgccatggcccaccggaagcttgagagcgtggggagcggcatgttggaccatagggtgagaccaggtcctgtccctcacagccaggagcccgagagcgaggacatggagctgcccttggagggctatgtgcccgagggcctggagctggctgccctgcggccagagagccccgcgccagaggaacaggagtgccacaaccacagccccgatggggactccagctctgactacgtgaacaacacctctgaggaggaggactatgacgagggcctccctgaggaggaggagggcatcacctactacatccgctactgccctgaggacgacagctacctagag

SEQ ID NO: 1158 - DNA, 554 bp, Homo sapiens
  source 1..554: mol_type = unassigned DNA
cagctcagccccactgcaaggagctcctgggtttatttaagtgagcctcagataactttacataaaagcaaatgtgtaaaaagcgataaagtcagatatattgaacatttgtcctgagggcaaatttctgagctctaaaagccagtttggttttagataacatctgtgagtctggaaacaggctgagatactctatatctgcactcccaactctgcctttggctttgtgagccctgtggtctccttgaaagaattggtccccagtgggtgaactaatcacccatgaagagtctcccaattcaaatctggaataaaaagtgaggacatgggggcagaatgttactcatcacatgtggcccgtcagtactagacttcaagaaagatttgatcaccaggagatttttcgggacattaccaaaccactcattttagtggctgcctccgggtgatgatggctgtgtgaacgactgccatggcccaccggaagcttgagagcgtggggagcggcatgttggaccatagggtgagaccaggtcctgtccctcacagccagg

SEQ ID NO: 1159 - DNA, 936 bp, Homo sapiens
  source 1..936: mol_type = unassigned DNA
agtggtgagcacggtgtcgggggccgcattagctattgatttatgtgctgttatagaattaattgagtctggacatggagactcattttcttggacatgtagcagtggctgcctccgggtgatgatggctgtgtgaacgactgccatggcccaccggaagcttgagagcgtggggagcggcatgttggaccatagggtgagaccaggtcctgtccctcacagccaggagcccgagagcgaggacatggagctgcccttggagggctatgtgcccgagggcctggagctggctgccctgcggccagagagccccgcgccagaggaacaggagtgccacaaccacagccccgatggggactccagctctgactacgtgaacaacacctctgaggaggaggactatgacgagggcctccctgaggaggaggagggcatcacctactacatccgctactgccctgaggacgacagctacctagagggcatggactgcaacggggaggagtacctggcccacagtgcacaccctgtggacactgatgagtgccaggaggcggtggaggagtggacggactcggcgggcccgcacccccacggccacgaggctgaaggcagccaggactacccagacggccaactgcccattccggaggatgagccctccgtccttgaggcccatgaccaggaagaagatggtcactactgtgccagcaaagagggctaccaggactactaccccgaggaggccaacgggaacaccggcgcctccccctaccgcctgaggcgtggggatggggacctggaggaccaggaggaggacattgaccagatcgtggcagagatcaagatgagtctgagcatgaccagcatcaccagcgccagtgaggccagccccgagcatgggcctgagccagggcctgaggactctgtagaggc

SEQ ID NO: 1160 - DNA, 1954 bp, Homo sapiens
  source 1..1954: mol_type = unassigned DNA
gaaagaagacgtccacgctgctgagtgagaccttcctctgtgctgctgagtgagaccttccatctgaccagggggtcatgctctcactgctcctgcttggagttctggtgctgtagcgggtctcggccgccccttctgagctgggtggaggaagaagtccctgttgaaatatcagatgagtagggatgatcgcctcttttgaaaacaggagccgtgaagggattcccagagaagattgtcatctaacggagtcattcgtccgcccaggacttctctgtcacagggttacgtttgggagaattttcacaggccactggggatggctgtggctagcctggctttccactgatgccctctatccctaacctcagctcctgacatggctgtcattccagagagtgcttggaagcatcctgactatgttgacgatggcctgagcggagtttgcaatggtctggagcagccaaggaagcagcagcgctctgatctcaatggacctgttgacaataacaacattccagagacaaagaaggtggcatcatttccaagttttgtggctgttccagggccctgcgaaccagaagacctcatcgacgggatcatctttgctgccaattacctggggtccacccagctgctatcagaacggaacccttccaaaaacatcagaatgatgcaagcgcaggaggccgtcagccgggtcaagaattctgagggggatgcccagacgctgacggaagtggacctcttcatttccacccagaggatcaaggttttaaatgcagacacgcaggaaaccatgatggaccacgccttgcgtaccatctcctacatcgccgacattgggaacattgtagtgctgatggccagacgccgcatgccccggtcagcctctcaggactgcatcgagaccacgcccggggcccaggaaggcaagaagcagtataagatgatctgccatgtgttcgagtcggaggatgtaagtaagcccttgccagggcactcccctcccaaagttcacagcccagggcggctccaggatccaggcgctgtggaaaccaccctcaggtggaaagcctccatgctgttactgatgtttccagtggatcagtgatcttttgcatactctttgggtttgcaaagatagtgaatacagttttattctacttcttgaaataggttcttcaggagctgtttataaattgagttgtggttaaatatatgagggagctatttgaagaaatccctttacaaaacattttctctactaaaaatgaagttaatctttgcataacttttgttattaaaatgcaaattttcgcatggccctggcatgctgtataaagaaagcacatctgcacatgaggcttagttctgcctttgcgtgtggtcttcagaggaagtaaaaagtgattctgaagtataagataccaaagactcaggaaaagatcacaagccctttggctccctccttggctggagaagagtgttgtttttagcctggagggggacagaggggctgaggaaggagcagcagggccaagaggggagctcagagaggaactgtccttcctggaggctgatcttactcacagaccagcagggggcgctgctggtgagccagttttgtggctgttgccagagtgaaattttaaaatatgatctatggctgggcacggtagctcatgcctgtaatcccaacacttttgggaggctgaggtgcgtggatcacctgaggtcaggagttcaaaaccagcctggccaacattgcgaaaccctagtctctactaaagatacaaaaaaattagccaagcttggtggtgcgtgcctgtaatcccagctacgtgggaggctgaggcaggagaattgcttgaacctgggaggcggagattgcagtgagctgagatcgtgccattgcactccagcctgggtgacaagagtgaaactccgtctc

SEQ ID NO: 1161 - DNA, 3138 bp, Homo sapiens
  source 1..3138: mol_type = unassigned DNA
acataacagtaaggcaagaagatgactgcatttatcttctcagaatcacttcttcttaattgttgcttcccactattggcattggtgaaaggctgggccacaggaggctggatgaactttgtgttagccagtctcctgaatatttacgcgttgctgaatctcctgtggacaaaccaccaataggccaggactgtcctgtggacagacgggaaagatttgatcaccaggagatttttcgggacattaccaaaccactcattttagtggctgcctccgggtgatgatggctgtgtgaacgactgccatggcccaccggaagcttgagagcgtggggagcggcatgttggaccatagggtgagaccaggtcctgtccctcacagccaggagcccgagagcgaggacatggagctgcccttggagggctatgtgcccgagggcctggagctggctgccctgcggccagagagccccgcgccagaggaacaggagtgccacaaccacagccccgatggggactccagctctgactacgtgaacaacacctctgaggaggaggactatgacgagggcctccctgaggaggaggagggcatcacctactacatccgctactgccctgaggacgacagctacctagagggcatggactgcaacggggaggagtacctggcccacagtgcacaccctgtggacactgatgagtgccaggaggcggtggaggagtggacggactcggcgggcccgcacccccacggccacgaggctgaaggcagccaggactacccagacggccaactgcccattccggaggatgagccctccgtccttgaggcccatgaccaggaagaagatggtcactactgtgccagcaaagagggctaccaggactactaccccgaggaggccaacgggaacaccggcgcctccccctaccgcctgaggcgtggggatggggacctggaggaccaggaggaggacattgaccagatcgtggcagagatcaagatgagtctgagcatgaccagcatcaccagcgccagtgaggccagccccgagcatgggcctgagccagggcctgaggactctgtagaggcctgcccacccatcaaggccagctgcagccccagcaggcacgaggcgaggcccaagtcgctgaacctccttcccgaggccaagcaccccggagacccccagagaggcttcaagcccaagaccaggaccccagaagagaggctgaagtggccccacgagcaggtttgcaatggtctggagcagccaaggaagcagcagcgctctgatctcaatggacctgttgacaataacaacattccagagacaaagaaggtggcatcatttccaagttttgtggctgttccagggccctgcgaaccagaagacctcatcgacgggatcatctttgctgccaattacctggggtccacccagctgctatcagaacggaacccttccaaaaacatcagaatgatgcaagcgcaggaggccgtcagccgggtcaagaggatgcaaaaggctgctaagatcaagaaaaaagcgaattctgagggggatgcccagacgctgacggaagtggacctcttcatttccacccagaggatcaaggttttaaatgcagacacgcaggaaaccatgatggaccacgccttgcgtaccatctcctacatcgccgacattgggaacattgtagtgctgatggccagacgccgcatgccccggtcagcctctcaggactgcatcgagaccacgcccggggcccaggaaggcaagaagcagtataagatgatctgccatgtgttcgagtcggaggatgcccagctcatcgcccagtctatcggccaggccttcagcgtggcctaccaggagttcctgcgagccaatggcatcaaccccgaagacttgagccagaaggaatacagcgacatcatcaacacccaggagatgtacaacgacgacctcatccacttctcaaactcggagaactgcaaggagctgcagctggagaagcacaagggcgagatcctgggcgtggtggtggtggagtcgggctggggctccatcctgcccacggtgatcctggccaacatgatgaatggcggcccggctgcccgctcggggaagctgagcatcggggaccagatcatgtccatcaatggcaccagcctggtggggctgcccctcgccacctgccaaggcatcatcaagggcctgaagaaccagacacaggtgaagctcaacattgtcagctgtcccccggtcaccacggtccttatcaagcggccagacctcaagtaccagctgggcttcagcgtgcagaatggaattatctgcagcctcatgagagggggcattgctgagcgagggggcgtccgtgtgggccaccgcatcatcgagatcaacgggcagagcgtggtggccacagcccacgagaagatagtccaagctctgtccaactcggtcggagagatccacatgaagaccatgcccgccgccatgttcaggctcctcacgggtcaggagaccccgctgtacatctaggccaccccagcctggccacgcagccaggacaccgggcagggccgcccgggcccagaggagctgggagccgggccgcagacttgaccccgacgccacagcccagccacggacgctggctccccaaagggtgtgccctcaccacccacttgatttttttcattttgccaaaaaggggtatgtctttatcaaaggagagtcacagaacaaatgtttgtttgtaaagcgttccaagtattttgccacgttctggactgtcttctccctgcacaagccagggtgtgtctcggtagctgtgcgtggtgtggagtgtgtgtctttcctccctgaagctgtgcggagcgaactggcgcctccgagggacgcggctcccggggcagggcagccgtcacccctgcctcccgcccccttggctgggacgtctggggtcctgtggggcccccacaatggtcccaaacagctgcctctgccactgactgcagggacacgggcagcctggctcccaggacacgacttgtaatgaaagtttggggacatgtgattgattgattgattgtaaataaaggatgatggccacaacatgaaaa

SEQ ID NO: 1162 - DNA, 4031 bp, Homo sapiens
  source 1..4031: mol_type = unassigned DNA
agtgtgcccggcgcgggtgaggcggaagcggccggggcgggggcgcaggcccggcagccgcaggccggtgcgggatgcgccccgcagccgcgccgcgtgcgcccggcagaggcggccctgcgtgccgtacgctgcgtccggggcgcgcccgccgctattcgggaagctattcagcttcccgggctcattagcagtcgcggtgtgcggctcggcgcgggctcacaaagagctcggcctcgcggactgagccggcggcagcggggcggggacggcggcgtacccgggcagcccagcgccctggccaggcggagggagctgttcatcctctgggggctgctgggccagaaatatctcttacctgataatgtcaggcatcagaggttcctgtttcgtggtctcctgaatatttacgcgttgctgaatctcctgtggacaaaccaccaataggccaggactgtcctgtggacagacggggtgagcctcttcttgtgtctggagattctgaaaagatttgatcaccaggagatttttcgggacattaccaaaccactcattttagtggctgcctccgggtgatgatggctgtgtgaacgactgccatggcccaccggaagcttgagagcgtggggagcggcatgttggaccatagggtgagaccaggtcctgtccctcacagccaggagcccgagagcgaggacatggagctgcccttggagggctatgtgcccgagggcctggagctggctgccctgcggccagagagccccgcgccagaggaacaggagtgccacaaccacagccccgatggggactccagctctgactacgtgaacaacacctctgaggaggaggactatgacgagggcctccctgaggaggaggagggcatcacctactacatccgctactgccctgaggacgacagctacctagagggcatggactgcaacggggaggagtacctggcccacagtgcacaccctgtggacactgatgagtgccaggaggcggtggaggagtggacggactcggcgggcccgcacccccacggccacgaggctgaaggcagccaggactacccagacggccaactgcccattccggaggatgagccctccgtccttgaggcccatgaccaggaagaagatggtcactactgtgccagcaaagagggctaccaggactactaccccgaggaggccaacgggaacaccggcgcctccccctaccgcctgaggcgtggggatggggacctggaggaccaggaggaggacattgaccagatcgtggcagagatcaagatgagtctgagcatgaccagcatcaccagcgccagtgaggccagccccgagcatgggcctgagccagggcctgaggactctgtagaggcctgcccacccatcaaggccagctgcagccccagcaggcacgaggcgaggcccaagtcgctgaacctccttcccgaggccaagcaccccggagacccccagagaggcttcaagcccaagaccaggaccccagaagagaggctgaagtggccccacgagcaggtttgcaatggtctggagcagccaaggaagcagcagcgctctgatctcaatggacctgttgacaataacaacattccagagacaaagaaggtggcatcatttccaagttttgtggctgttccagggccctgcgaaccagaagacctcatcgacgggatcatctttgctgccaattacctggggtccacccagctgctatcagaacggaacccttccaaaaacatcagaatgatgcaagcgcaggaggccgtcagccgggtcaagaggatgcaaaaggctgctaagatcaagaaaaaagcgaattctgagggggatgcccagacgctgacggaagtggacctcttcatttccacccagaggatcaaggttttaaatgcagacacgcaggaaaccatgatggaccacgccttgcgtaccatctcctacatcgccgacattgggaacattgtagtgctgatggccagacgccgcatgccccggtcagcctctcaggactgcatcgagaccacgcccggggcccaggaaggcaagaagcagtataagatgatctgccatgtgttcgagtcggaggatgcccagctcatcgcccagtctatcggccaggccttcagcgtggcctaccaggagttcctgcgagccaatggcatcaaccccgaagacttgagccagaaggaatacagcgacatcatcaacacccaggagatgtacaacgacgacctcatccacttctcaaactcggagaactgcaaggagctgcagctggagaagcacaagggcgagatcctgggcgtggtggtggtggagtcgggctggggctccatcctgcccacggtgatcctggccaacatgatgaatggcggcccggctgcccgctcggggaagctgagcatcggggaccagatcatgtccatcaatggcaccagcctggtggggctgcccctcgccacctgccaaggcatcatcaagggcctgaagaaccagacacaggtgaagctcaacattgtcagctgtcccccggtcaccacggtccttatcaagcggccagacctcaagtaccagctgggcttcagcgtgcagaatggaattatctgcagcctcatgagagggggcattgctgagcgagggggcgtccgtgtgggccaccgcatcatcgagatcaacgggcagagcgtggtggccacagcccacgagaagatagtccaagctctgtccaactcggtcggagagatccacatgaagaccatgcccgccgccatgttcaggctcctcacgggtcaggagaccccgctgtacatctaggccaccccagcctggccacgcagccaggacaccgggcagggccgcccgggcccagaggagctgggagccgggccgcagacttgaccccgacgccacagcccagccacggacgctggctccccaaagggtgtgccctcaccacccacttgatttttttcattttgccaaaaaggggtatgtctttatcaaaggagagtcacagaacaaatgtttgtttgtaaagcgttccaagtattttgccacgttctggactgtcttctccctgcacaagccagggtgtgtctcggtagctgtgcgtggtgtggagtgtgtgtctttcctccctgaagctgtgcggagcgaactggcgcctccgagggacgcggctcccggggcagggcagccgtcacccctgcctcccgcccccttggctgggacgtctggggtcctgtggggcccccacaatggtcccaaacagctgcctctgccactgactgcagggacacgggcagcctggctcccaggacacgacttgtaatgaaagtttggggacatgtgattgattgattgattgtaaataaaggatgatggccacaacatgaaaactccatatttatttagatgctattattactgtttggacttttattttggcaggcttttttccagactctagggttttccaatgtgactaatgaccacacctgcctctcccgtcgtctcttctgggcaccctcccacccggctgcatacccgggcagggctcccacagagacaaggagggcacaggtgtctgccccctctttaaaatcgatctacacacatccacgcacatgcgaccccgaggaaacgaaacccactctagaaaacgcgaccttggccgcacctaaagcagccagccgtgagtgcagaccccttggccagcgtggcgcagtggccctgagcagtagtggcatgtgtgtagatcaagtcggatctagtccagctcggttcattagcgatccatgtaatctgacgtcatcttgtctcgaagtctctttttttggcccaggccttgaagaatacactgtgacttaagaagccttaccacgcagtaactaaagctttaggatgactgtattcgaggagtgccgtgtgttgcatgcagctacccgtaggaagacttcgcgcatatcactaataaacctgaagtcgtgatgaaaa

SEQ ID NO: 1163 - DNA, 3349 bp, Homo sapiens
  source 1..3349: mol_type = unassigned DNA
gcccggcagccgcaggccggtgcgggatgcgccccgcagccgcgccgcgtgcgcccggcagaggcggccctgcgtgccgtacgctgcgtccggggcgcgcccgccgctattcgggaagctattcagcttcccgggctcattagcagtcgcggtgtgcggctcggcgcgggctcacaaagagctcggcctcgcggactgagccggcggcagcggggcggggacggcggcgtacccgggcagcccagcgccctggccaggcggagggagctgttcatcctctgggggctgctgggccagaaatatctcttacctgataatgtcaggcatcagaggttcctgtttcgtggtctcctgaatatttacgcgttgctgaatctcctgtggacaaaccaccaataggccaggactgtcctgtggacagacggggtgagcctcttcttgtgtctggagattctgaaaagatttgatcaccaggagatttttcgggacattaccaaaccactcattttagtggctgcctccgggtgatgatggctgtgtgaacgactgccatggcccaccggaagcttgagagcgtggggagcggcatgttggaccatagggtgagaccaggtcctgtccctcacagccaggagcccgagagcgaggacatggagctgcccttggagggctatgtgcccgagggcctggagctggctgccctgcggccagagagccccgcgccagaggaacaggagtgccacaaccacagccccgatggggactccagctctgactacgtgaacaacacctctgaggaggaggactatgacgagggcctccctgaggaggaggagggcatcacctactacatccgctactgccctgaggacgacagctacctagagggcatggactgcaacggggaggagtacctggcccacagtgcacaccctgtggacactgatgagtgccaggaggcggtggaggagtggacggactcggcgggcccgcacccccacggccacgaggctgaaggcagccaggactacccagacggccaactgcccattccggaggatgagccctccgtccttgaggcccatgaccaggaagaagatggtcactactgtgccagcaaagagggctaccaggactactaccccgaggaggccaacgggaacaccggcgcctccccctaccgcctgaggcgtggggatggggacctggaggaccaggaggaggacattgaccagatcgtggcagagatcaagatgagtctgagcatgaccagcatcaccagcgccagtgaggccagccccgagcatgggcctgagccagggcctgaggactctgtagaggcctgcccacccatcaaggccagctgcagccccagcaggcacgaggcgaggcccaagtcgctgaacctccttcccgaggccaagcaccccggagacccccagagaggcttcaagcccaagaccaggaccccagaagagaggctgaagtggccccacgagcaggtttgcaatggtctggagcagccaaggaagcagcagcgctctgatctcaatggacctgttgacaataacaacattccagagacaaagaaggtggcatcatttccaagttttgtggctgttccagggccctgcgaaccagaagacctcatcgacgggatcatctttgctgccaattacctggggtccacccagctgctatcagaacggaacccttccaaaaacatcagaatgatgcaagcgcaggaggccgtcagccgggtcaagaattctgagggggatgcccagacgctgacggaagtggacctcttcatttccacccagaggatcaaggttttaaatgcagacacgcaggaaaccatgatggaccacgccttgcgtaccatctcctacatcgccgacattgggaacattgtagtgctgatggccagacgccgcatgccccggtcagcctctcaggactgcatcgagaccacgcccggggcccaggaaggcaagaagcagtataagatgatctgccatgtgttcgagtcggaggatgcccagctcatcgcccagtctatcggccaggccttcagcgtggcctaccaggagttcctgcgagccaatggcatcaaccccgaagacttgagccagaaggaatacagcgacatcatcaacacccaggagatgtacaacgacgacctcatccacttctcaaactcggagaactgcaaggagctgcagctggagaagcacaagggcgagatcctgggcgtggtggtggtggagtcgggctggggctccatcctgcccacggtgatcctggccaacatgatgaatggcggcccggctgcccgctcggggaagctgagcatcggggaccagatcatgtccatcaatggcaccagcctggtggggctgcccctcgccacctgccaaggcatcatcaagggcctgaagaaccagacacaggtgaagctcaacattgtcagctgtcccccggtcaccacggtccttatcaagcggccagacctcaagtaccagctgggcttcagcgtgcagaatggaattatctgcagcctcatgagagggggcattgctgagcgagggggcgtccgtgtgggccaccgcatcatcgagatcaacgggcagagcgtggtggccacagcccacgagaagatagtccaagctctgtccaactcggtcggagagatccacatgaagaccatgcccgccgccatgttcaggctcctcacgggtcaggagaccccgctgtacatctaggccaccccagcctggccacgcagccaggacaccgggcagggccgcccgggcccagaggagctgggagccgggccgcagacttgaccccgacgccacagcccagccacggacgctggctccccaaagggtgtgccctcaccacccacttgatttttttcattttgccaaaaaggggtatgtctttatcaaaggagagtcacagaacaaatgtttgtttgtaaagcgttccaagtattttgccacgttctggactgtcttctccctgcacaagccagggtgtgtctcggtagctgtgcgtggtgtggagtgtgtgtctttcctccctgaagctgtgcggagcgaactggcgcctccgagggacgcggctcccggggcagggcagccgtcacccctgcctcccgcccccttggctgggacgtctggggtcctgtggggcccccacaatggtcccaaacagctgcctctgccactgactgcagggacacgggcagcctggctcccaggacacgacttgtaatgaaagtttggggacatgtgattgattgattgattgtaaataaaggatgatggccacaacatgaaaa

SEQ ID NO: 1164 - DNA, 2555 bp, Homo sapiens
  source 1..2555: mol_type = unassigned DNA
attagcagtcgcggtgtgcggctcggcgcgggctcacaaagagctcggcctcgcggactgagccggcggcagcggggcggggacggcggcgtacccgggcagcccagcgccctggccagtctcctgaatatttacgcgttgctgaatctcctgtggacaaaccaccaataggccaggactgtcctgtggacagacggggtgagcctcttcttgtgtctggagattctgaaaagatttgatcaccaggagatttttcgggacattaccaaaccactcattttagtggctgcctccgggtgatgatggctgtgtgaacgactgccatggcccaccggaagcttgagagcgtggggagcggcatgttggaccatagggtgagaccaggtcctgtccctcacagccaggagcccgagagcgaggacatggagctgcccttggagggctatgtgcccgagggcctggagctggctgccctgcggccagagagccccgcgccagaggaacaggagtgccacaaccacagccccgatggggactccagctctgactacgtgaacaacacctctgaggaggaggactatgacgagggcctccctgaggaggaggagggcatcacctactacatccgctactgccctgaggacgacagctacctagagggcatggactgcaacggggaggagtacctggcccacagtgcacaccctgtggacactgatgagtgccaggaggcggtggaggagtggacggactcggcgggcccgcacccccacggccacgaggctgaaggcagccaggactacccagacggccaactgcccattccggaggatgagccctccgtccttgaggcccatgaccaggaagaagatggtcactactgtgccagcaaagagggctaccaggactactaccccgaggaggccaacgggaacaccggcgcctccccctaccgcctgaggcgtggggatggggacctggaggaccaggaggaggacattgaccagatcgtggcagagatcaagatgagtctgagcatgaccagcatcaccagcgccagtgaggccagccccgagcatgggcctgagccagggcctgaggactctgtagaggcctgcccacccatcaaggccagctgcagccccagcaggcacgaggcgaggcccaagtcgctgaacctccttcccgaggccaagcaccccggagacccccagagaggcttcaagcccaagaccaggaccccagaagagaggctgaagtggccccacgagcaggtttgcaatggtctggagcagccaaggaagcagcagcgctctgatctcaatggacctgttgacaataacaacattccagagacaaagaaggtggcatcatttccaagttttgtggctgttccagggccctgcgaaccagaagacctcatcgacgggatcatctttgctgccaattacctggggtccacccagctgctatcagaacggaacccttccaaaaacatcagaatgatgcaagcgcaggaggccgtcagccgggtcaagaattctgagggggatgcccagacgctgacggaagtggacctcttcatttccacccagaggatcaaggttttaaatgcagacacgcaggaaaccatgatggaccacgccttgcgtaccatctcctacatcgccgacattgggaacattgtagtgctgatggccagacgccgcatgccccggtcagcctctcaggactgcatcgagaccacgcccggggcccaggaaggcaagaagcagtataagatgatctgccatgtgttcgagtcggaggatgcccagctcatcgcccagtctatcggccaggccttcagcgtggcctaccaggagttcctgcgagccaatggcatcaaccccgaagacttgagccagaaggaatacagcgacatcatcaacacccaggagatgtacaacgacgacctcatccacttctcaaactcggagaactgcaaggagctgcagctggagaagcacaagggcgagatcctgggcgtggtggtggtggagtcgggctggggctccatcctgcccacggtgatcctggccaacatgatgaatggcggcccggctgcccgctcggggaagctgagcatcggggaccagatcatgtccatcaatggcaccagcctggtggggctgcccctcgccacctgccaaggcatcatcaagggcctgaagaaccagacacaggtgaagctcaacattgtcagctgtcccccggtcaccacggtccttatcaagcggccagacctcaagtaccagctgggcttcagcgtgcagaatggaattgtgagttccccctcctgctctgggccaccaccaccactgcagggcccagggagggggagcagctcccgtccaatggggcaggctatgtctggcagcctggtaggacctggcctgtggttgcagctgcccacagccaggccacctggggcaggaactttccatggctctctgggaggtcctggctagaaggggagggccagggcatggccgtggattgggcccctccagcct

SEQ ID NO: 1165 - DNA, 594 bp, Homo sapiens
  source 1..594: mol_type = unassigned DNA
agcagtcgcggtgtgcggctcggcgcgggctcacaaagagctcggcctcgcggactgagccggcggcagcggggcggggacggcggcgtacccgggcagcccagcgccctggccaggcgtgcctgtgcttaatcagcactgacgactggtgctgcttcagttgatttgatacacctagaggcagcctcatctccaacttgccttgacttcgtctggggagctgccgtgggggacccctggactggcagcattcccacccctcactttggcaaccctggtctaactccgcggagggagctgttcatcctctgggggctgctgggccagaaatatctcttacctgataatgtcaggcatcagaggttcctgtttcgtggtctcctgaatatttacgcgttgctgaatctcctgtggacaaaccaccaataggccaggactgtcctgtggacagacggggtgagcctcttcttgtgtctggagattctgaaaagatttgatcaccaggagatttttcgggacattaccaaaccactcattttagtggctgcctccgggtgatgatggctgtgtgaacgactgccatggcccaccgga

SEQ ID NO: 1166 - DNA, 535 bp, Homo sapiens; identical to SEQ ID NO: 1151
  source 1..535: mol_type = unassigned DNA

SEQ ID NO: 1167 - DNA, 711 bp, Homo sapiens; identical to SEQ ID NO: 1157
  source 1..711: mol_type = unassigned DNA

SEQ ID NO: 1168 - DNA, 554 bp, Homo sapiens; identical to SEQ ID NO: 1158
  source 1..554: mol_type = unassigned DNA

SEQ ID NO: 1169 - DNA, 936 bp, Homo sapiens; identical to SEQ ID NO: 1159
  source 1..936: mol_type = unassigned DNA

SEQ ID NO: 1170 - DNA, 1954 bp, Homo sapiens
  source 1..1954: mol_type = unassigned DNA
gaaagaagacgtccacgctgctgagtgagaccttcctctgtgctgctgagtgagaccttccatctgaccagggggtcatgctctcactgctcctgcttggagttctggtgctgtagcgggtctcggccgccccttctgagctgggtggaggaagaagtccctgttgaaatatcagatgagtagggatgatcgcctcttttgaaaacaggagccgtgaagggattcccagagaagattgtcatctaacggagtcattcgtccgcccaggacttctctgtcacagggttacgtttgggagaattttcacaggccactggggatggctgtggctagcctggctttccactgatgccctctatccctaacctcagctcctgacatggctgtcattccagagagtgcttggaagcatcctgactatgttgacgatggcctgagcggagtttgcaatggtctggagcagccaaggaagcagcagcgctctgatctcaatggacctgttgacaataacaacattccagagacaaagaaggtggcatcatttccaagttttgtggctgttccagggccctgcgaaccagaagacctcatcgacgggatcatctttgctgccaattacctggggtccacccagctgctatcagaacggaacccttccaaaaacatcagaatgatgcaagcgcaggaggccgtcagccgggtcaagaattctgagggggatgcccagacgctgacggaagtggacctcttcatttccacccagaggatcaaggttttaaatgcagacacgcaggaaaccatgatggaccacgccttgcgtaccatctcctacatcgccgacattgggaacattgtagtgctgatggccagacgccgcatgccccggtcagcctctcaggactgcatcgagaccacgcccggggcccaggaaggcaagaagcagtataagatgatctgccatgtgttcgagtcggaggatgtaagtaagcccttgccagggcactcccctcccaaagttcacagcccagggcggctccaggatccaggcgctgtggaaaccaccctcaggtggaaagcctccatgctgttactgatgtttccagtggatcagtgatcttttgcatactctttgggtttgcaaagatagtgaatacagttttattctacttcttgaaataggttcttcaggagctgtttataaattgagttgtggttaaatatatgagggagctatttgaagaaatccctttacaaaacattttctctactaaaaatgaagttaatctttgcataacttttgttattaaaatgcaaattttcgcatggccctggcatgctgtataaagaaagcacatctgcacatgaggcttagttctgcctttgcgtgtggtcttcagaggaagtaaaaagtgattctgaagtataagataccaaagactcaggaaaagatcacaagccctttggctccctccttggctggagaagagtgttgtttttagcctggagggggacagaggggctgaggaaggagcagcagggccaagaggggagctcagagaggaactgtccttcctggaggctgatcttactcacagaccagcagggggcgctgctggtgagccagttttgtggctgttgccagagtgaaattttaaaatatgatctatggctgggcacggtagttcatgcctgtaatcccaacacttttgggaggctgaggtgcgtggatcacctgaggtcaggagttcaaaaccagcctggccaacattgcgaaaccctagtctctactaaagatacaaaaaaattagccaagcttggtggtgcgtgcctgtaatcccagctacgtgggaggctgaggcaggagaattgcttgaacctgggaggcggagattgcagtgagctgagatcgtgccattgcactccagcctgggtgacaagagtgaaactccgtctc

SEQ ID NO: 1171 - DNA, 3635 bp, Homo sapiens
  source 1..3635: mol_type = unassigned DNA
cagtctcctgaatatttacgcgttgctgaatctcctgtggacaaaccaccaataggccaggactgtcctgtggacagacggggtgagcctcttcttgtgtctggagattctgaaaagatttgatcaccaggagatttttcgggacattaccaaaccactcattttagtggctgcctccgggtgatgatggctgtgtgaacgactgccatggcccaccggaagcttgagagcgtggggagcggcatgttggaccatagggtgagaccaggtcctgtccctcacagccaggagcccgagagcgaggacatggagctgcccttggagggctatgtgcccgagggcctggagctggctgccctgcggccagagagccccgcgccagaggaacaggagtgccacaaccacagccccgatggggactccagctctgactacgtgaacaacacctctgaggaggaggactatgacgagggcctccctgaggaggaggagggcatcacctactacatccgctactgccctgaggacgacagctacctagagggcatggactgcaacggggaggagtacctggcccacagtgcacaccctgtggacactgatgagtgccaggaggcggtggaggagtggacggactcggcgggcccgcacccccacggccacgaggctgaaggcagccaggactacccagacggccaactgcccattccggaggatgagccctccgtccttgaggcccatgaccaggaagaagatggtcactactgtgccagcaaagagggctaccaggactactaccccgaggaggccaacgggaacaccggcgcctccccctaccgcctgaggcgtggggatggggacctggaggaccaggaggaggacattgaccagatcgtggcagagatcaagatgagtctgagcatgaccagcatcaccagcgccagtgaggccagccccgagcatgggcctgagccagggcctgaggactctgtagaggcctgcccacccatcaaggccagctgcagccccagcaggcacgaggcgaggcccaagtcgctgaacctccttcccgaggccaagcaccccggagacccccagagaggcttcaagcccaagaccaggaccccagaagagaggctgaagtggccccacgagcaggtttgcaatggtctggagcagccaaggaagcagcagcgctctgatctcaatggacctgttgacaataacaacattccagagacaaagaaggtggcatcatttccaagttttgtggctgttccagggccctgcgaaccagaagacctcatcgacgggatcatctttgctgccaattacctggggtccacccagctgctatcagaacggaacccttccaaaaacatcagaatgatgcaagcgcaggaggccgtcagccgggtcaagaggatgcaaaaggctgctaagatcaagaaaaaagcgaattctgagggggatgcccagacgctgacggaagtggacctcttcatttccacccagaggatcaaggttttaaatgcagacacgcaggaaaccatgatggaccacgccttgcgtaccatctcctacatcgccgacattgggaacattgtagtgctgatggccagacgccgcatgccccggtcagcctctcaggactgcatcgagaccacgcccggggcccaggaaggcaagaagcagtataagatgatctgccatgtgttcgagtcggaggatgcccagctcatcgcccagtctatcggccaggccttcagcgtggcctaccaggagttcctgcgagccaatggcatcaaccccgaagacttgagccagaaggaatacagcgacatcatcaacacccaggagatgtacaacgacgacctcatccacttctcaaactcggagaactgcaaggagctgcagctggagaagcacaagggcgagatcctgggcgtggtggtggtggagtcgggctggggctccatcctgcccacggtgatcctggccaacatgatgaatggcggcccggctgcccgctcggggaagctgagcatcggggaccagatcatgtccatcaatggcaccagcctggtggggctgcccctcgccacctgccaaggcatcatcaagggcctgaagaaccagacacaggtgaagctcaacattgtcagctgtcccccggtcaccacggtccttatcaagcggccagacctcaagtaccagctgggcttcagcgtgcagaatggaattatctgcagcctcatgagagggggcattgctgagcgagggggcgtccgtgtgggccaccgcatcatcgagatcaacgggcagagcgtggtggccacagcccacgagaagatagtccaagctctgtccaactcggtcggagagatccacatgaagaccatgcccgccgccatgttcaggctcctcacgggtcaggagaccccgctgtacatctaggccaccccagcctggccacgcagccaggacaccgggcagggccgcccgggcccagaggagctgggagccgggccgcagacttgaccccgacgccacagcccagccacggacgctggctccccaaagggtgtgccctcaccacccacttgatttttttcattttgccaaaaaggggtatgtctttatcaaaggagagtcacagaacaaatgtttgtttgtaaagcgttccaagtattttgccacgttctggactgtcttctccctgcacaagccagggtgtgtctcggtagctgtgcgtggtgtggagtgtgtgtctttcctccctgaagctgtgcggagcgaactggcgcctccgagggacgcggctcccggggcagggcagccgtcacccctgcctcccgcccccttggctgggacgtctggggtcctgtggggcccccacaatggtcccaaacagctgcctctgccactgactgcagggacacgggcagcctggctcccaggacacgacttgtaatgaaagtttggggacatgtgattgattgattgattgtaaataaaggatgatggccacaacatgaaaactccatatttatttagatgctattattactgtttggacttttattttggcaggcttttttccagactctagggttttccaatgtgactaatgaccacacctgcctctcccgtcgtctcttctgggcaccctcccacccggctgcatacccgggcagggctcccacagagacaaggagggcacaggtgtctgccccctctttaaaatcgatctacacacatccacgcacatgcgaccccgaggaaacgaaacccactctagaaaacgcgaccttggccgcacctaaagcagccagccgtgagtgcagaccccttggccagcgtggcgcagtggccctgagcagtagtggcatgtgtgtagatcaagtcggatctagtccagctcggttcattagcgatccatgtaatctgacgtcatcttgtctcgaagtctctttttttggcccaggccttgaagaatacactgtgacttaagaagccttaccacgcagtaactaaagctttaggatgactgtattcgaggagtgccgtgtgttgcatgcagctacccgtaggaagacttcgcgcatatcactaataaacctgaagtcgtgatg

SEQ ID NO: 1172 - DNA, 3599 bp, Homo sapiens
  source 1..3599: mol_type = unassigned DNA
cagtctcctgaatatttacgcgttgctgaatctcctgtggacaaaccaccaataggccaggactgtcctgtggacagacggggtgagcctcttcttgtgtctggagattctgaaaagatttgatcaccaggagatttttcgggacattaccaaaccactcattttagtggctgcctccgggtgatgatggctgtgtgaacgactgccatggcccaccggaagcttgagagcgtggggagcggcatgttggaccatagggtgagaccaggtcctgtccctcacagccaggagcccgagagcgaggacatggagctgcccttggagggctatgtgcccgagggcctggagctggctgccctgcggccagagagccccgcgccagaggaacaggagtgccacaaccacagccccgatggggactccagctctgactacgtgaacaacacctctgaggaggaggactatgacgagggcctccctgaggaggaggagggcatcacctactacatccgctactgccctgaggacgacagctacctagagggcatggactgcaacggggaggagtacctggcccacagtgcacaccctgtggacactgatgagtgccaggaggcggtggaggagtggacggactcggcgggcccgcacccccacggccacgaggctgaaggcagccaggactacccagacggccaactgcccattccggaggatgagccctccgtccttgaggcccatgaccaggaagaagatggtcactactgtgccagcaaagagggctaccaggactactaccccgaggaggccaacgggaacaccggcgcctccccctaccgcctgaggcgtggggatggggacctggaggaccaggaggaggacattgaccagatcgtggcagagatcaagatgagtctgagcatgaccagcatcaccagcgccagtgaggccagccccgagcatgggcctgagccagggcctgaggactctgtagaggcctgcccacccatcaaggccagctgcagccccagcaggcacgaggcgaggcccaagtcgctgaacctccttcccgaggccaagcaccccggagacccccagagaggcttcaagcccaagaccaggaccccagaagagaggctgaagtggccccacgagcaggtttgcaatggtctggagcagccaaggaagcagcagcgctctgatctcaatggacctgttgacaataacaacattccagagacaaagaaggtggcatcatttccaagttttgtggctgttccagggccctgcgaaccagaagacctcatcgacgggatcatctttgctgccaattacctggggtccacccagctgctatcagaacggaacccttccaaaaacatcagaatgatgcaagcgcaggaggccgtcagccgggtcaagaattctgagggggatgcccagacgctgacggaagtggacctcttcatttccacccagaggatcaaggttttaaatgcagacacgcaggaaaccatgatggaccacgccttgcgtaccatctcctacatcgccgacattgggaacattgtagtgctgatggccagacgccgcatgccccggtcagcctctcaggactgcatcgagaccacgcccggggcccaggaaggcaagaagcagtataagatgatctgccatgtgttcgagtcggaggatgcccagctcatcgcccagtctatcggccaggccttcagcgtggcctaccaggagttcctgcgagccaatggcatcaaccccgaagacttgagccagaaggaatacagcgacatcatcaacacccaggagatgtacaacgacgacctcatccacttctcaaactcggagaactgcaaggagctgcagctggagaagcacaagggcgagatcctgggcgtggtggtggtggagtcgggctggggctccatcctgcccacggtgatcctggccaacatgatgaatggcggcccggctgcccgctcggggaagctgagcatcggggaccagatcatgtccatcaatggcaccagcctggtggggctgcccctcgccacctgccaaggcatcatcaagggcctgaagaaccagacacaggtgaagctcaacattgtcagctgtcccccggtcaccacggtccttatcaagcggccagacctcaagtaccagctgggcttcagcgtgcagaatggaattatctgcagcctcatgagagggggcattgctgagcgagggggcgtccgtgtgggccaccgcatcatcgagatcaacgggcagagcgtggtggccacagcccacgagaagatagtccaagctctgtccaactcggtcggagagatccacatgaagaccatgcccgccgccatgttcaggctcctcacgggtcaggagaccccgctgtacatctaggccaccccagcctggccacgcagccaggacaccgggcagggccgcccgggcccagaggagctgggagccgggccgcagacttgaccccgacgccacagcccagccacggacgctggctccccaaagggtgtgccctcaccacccacttgatttttttcattttgccaaaaaggggtatgtctttatcaaaggagagtcacagaacaaatgtttgtttgtaaagcgttccaagtattttgccacgttctggactgtcttctccctgcacaagccagggtgtgtctcggtagctgtgcgtggtgtggagtgtgtgtctttcctccctgaagctgtgcggagcgaactggcgcctccgagggacgcggctcccggggcagggcagccgtcacccctgcctcccgcccccttggctgggacgtctggggtcctgtggggcccccacaatggtcccaaacagctgcctctgccactgactgcagggacacgggcagcctggctcccaggacacgacttgtaatgaaagtttggggacatgtgattgattgattgattgtaaataaaggatgatggccacaacatgaaaactccatatttatttagatgctattattactgtttggacttttattttggcaggcttttttccagactctagggttttccaatgtgactaatgaccacacctgcctctcccgtcgtctcttctgggcaccctcccacccggctgcatacccgggcagggctcccacagagacaaggagggcacaggtgtctgccccctctttaaaatcgatctacacacatccacgcacatgcgaccccgaggaaacgaaacccactctagaaaacgcgaccttggccgcacctaaagcagccagccgtgagtgcagaccccttggccagcgtggcgcagtggccctgagcagtagtggcatgtgtgtagatcaagtcggatctagtccagctcggttcattagcgatccatgtaatctgacgtcatcttgtctcgaagtctctttttttggcccaggccttgaagaatacactgtgacttaagaagccttaccacgcagtaactaaagctttaggatgactgtattcgaggagtgccgtgtgttgcatgcagctacccgtaggaagacttcgcgcatatcactaataaacctgaagtcgtgatg

SEQ ID NO: 1173 - DNA, 8972 bp, Homo sapiens
  source 1..8972: mol_type = unassigned DNA
gccaaagcctggagaagtggaatctcgtcagcgccgctccctgcgcgggactcgcggaacggcactgagcatgctcagttgccggagcccgttctggtctcaagtaggaagctagtgcgctgtaaccgcatctgatctgggcgctccgggaagggcgagactggagcagagccgctgggcgccggagccgaggcgagcgccgcgcgcaccactggttggagttgctgtgggtgagctgctgtggtctgtagccaagcatgctgtggtcggatctgcccagccgtggaacagaaacatttgctggatggaaaatccataaaagaaagctcctgtgaaaagctgaggctgacaataatttaagcaaaatcagatcgatctctttgggctgcctgacctccttgggtgcttgctattaattaacagactttgtggggaaaaaaaggagcttgccttctgagctttgtaccaaagacctgggaaaactaaccatctcagtctttcctgaggacttgggaactgccgaggcctctgccaatgtgttgactgtcgctatgggctcactgttgtccaggcagctcatatttcaaattataacctatttcctgcaccattgctgacgcctggtgatccatgtcagaagtacttccagctgactcaggtgttgacaccttggcagtgtttatggccagcagcggaactacagacgtcacaaatcggaacagcccagccacaccaccaaacacccttaacctccgatcctcccacaatgaactgttgaacgctgaaataaaacacacagaaaccaagaacagcacacctcccaaatgcaggaaaaaatatgcactaactaacatccaggcggccatgggcctctcggatccagctgcacagcccctgctgggaaatggctctgccaacatcaagctggtgaaaaatggggagaaccagctccgtaaggctgcagagcaagggcagcaggaccccaacaaaaacctgagccccactgcagtcatcaacataacttctgagaagttagagggtaaagagccccacccacaggattcctcgagctgtgagattttaccctcccagcccaggagaactaagagcttcctaaattactatgcagatctggaaacctcagccagagaactagagcagaaccgaggcaatcaccatgggactgcggaagagaaatcccagccagtccagggccaggcctccaccatcattgggaatggcgatttgctgctgcagaaaccaaacagaccccagtccagccctgaagacggccaagtagccacagtgtcatccagcccagaaaccaagaaggatcatccgaaaacaggggccaaaaccgactgtgcactgcaccggatccagaacctggcaccgagcgatgaggagtccagctggacaacgttgtcccaagacagtgcctcacccagctccccggatgaaacagatatatggagtgatcactcatttcagactgatccagatttgccgcctggctggaaaagagtcagtgacattgccgggacctattattggcacatcccaacaggaacgactcagtgggaacggcccgtctccatcccagcagatctccagggttctaggaaagggtcacttagttctgtaacgccatctcccaccccagagaacgagaaacagccatggagtgattttgctgttctgaatgggggaaagattaatagtgacatttggaaggatttgcatgcagccactgttaacccggaccccagtttaaaagagtttgaaggagcaaccctacgctatgcatctttgaaactcagaaatgccccacaccctgatgatgatgattcttgtagtatcaacagtgacccagaagccaagtgttttgctgtgcgttctctgggatgggtagagatggcagaagaggacctcgcccccggtaaaagtagtgttgcggtcaacaactgcatcaggcaactttcctactgcaaaaatgacatccgagacacagtcgggatttggggagaggggaaagacatgtacctgatcctggagaatgacatgctcagcctggtggaccccatggaccgcagcgtgctgcactcgcagcccatcgtcagcatccgcgtgtggggcgtgggccgcgacaatggccgggattttgcttatgtagcaagagataaagatacaagaattttgaaatgtcatgtatttcgatgtgacacaccagcaaaagccattgccacaagtctccacgagatctgctccaagattatggctgaacggaagaatgccaaagcgctggcctgcagctccttacaggaaagggccaatgtgaacctcgatgtccctttgcaagtagattttccaacaccaaagactgagctggtccagaagttccacgtgcagtacttgggcatgttacctgtagacaaaccagtcggaatggatattttgaacagtgccatagaaaatcttatgacctcatccaacaaggaggactggctgtcagtgaacatgaacgtggctgatgccactgtgactgtcatcagtgaaaagaatgaagaggaagtcttagtggaatgtcgtgtgcgattcctgtccttcatgggtgttgggaaggacgtccacacatttgccttcatcatggacacggggaaccagcgctttgagtgccacgttttctggtgcgagcctaatgctggtaacgtgtctgaggcggtgcaggccgcctgcatgttacgatatcagaagtgcttggtagccaggccgccttctcagaaagttcgaccacctccaccgccagcagattcagtaaccagaagagtcacaaccaatgtaaaacgaggggtcttatccctcattgacactttgaaacagaaacgccctgtcaccgaaatgccatagctgcacatgcaaaaggactcggctatttacctgaagattgactagctacactaaagaaaatgaactccgccatccgaccttccatccagttgctgatgctttgtcttcagagaatttacccttaaccaagcagtgttagacaagcatgttctctcgtcttgccaccatcatgtgatatgaaaagaagcatgaataattttttttgctgtaagttacatcatgcgcagtggaaggtctttttcttattgtaaatattgtgaacattacttaacttcacacacacacagagaagagtgtggccccacccctcctagtgaactaacgctgcgtccttggaatgaatgatgcgtgagttagtttcactgtcttcttggctggacctgtcacaagcaacctttaagtcctacagcactttgccctgttttcaacattggagtaggcactgcatagcagataccattgaattgctgtaaaaataggatggcgagtttgtgttttaatttttcataaaattgaacctgttggttgacaaaattggctgttggcatcagtatagaaaccaactggcagctttccctgacaagctctttgacacatggacaccatttcatgtctacagctgtttgtgggatgttggaaaaaaatgaaacttcaaaattgatgaaaaactaaattcgaggaattaaaatcgaacaaaacatagcctttcttttccgatggttttcaaactgattatttttaaaagagattaataaaatcataatgcattttgggtgggacatatttcaaacttctgccttatattgtacggtgcagctagagaattatagttcactatggccattctctacataaacattaagatgaaatactcctcatcagcctttcatccttagtttgagaattagctgatatgcaatttgaagttgaggaaatatcattgatatttctatcatgcacgattattttagatttctaccaccgtgtgatttttgctagtccatgtgctagaggtaaacgttctgctggaattctgcatccagctctatccccctctgatgctttttgcccagaaagctgtctgtccatcatgtattgtccatggcaacaaattacattaggttgaacctttccttgattttatgtatttaatattagaatttgttggactcaactagatatattttttaatttatattttttccattttactttgaagatttgaaatgttcatacctgagcaaagtctacacaggagtaatggactgtttaacaagtttcccaaaacagcattttcctgctccttcgtatgtaggtgagaaacttagctggaaagacatacaaatttagactctcgttgacattgtcgttttaaaaggaagttgctaaggcgatcaatctcaatattagtcttgtttacttcttcttaatgtcaaaattaacatttacaacatccaattataaaagtaatgctttatgtttatacactgctatgtacttgtcaaaatggtttccacattcttatcacatctgagccttaccaggtagagaaggtactaaatacactttagaagtaaaaatatgaagtaccgagaggctaaacccactggcctaagatctcaccaaagttcatgaaaaccaggactaggacccacggctcccaaagcccgttcttgctgtgttgtgctgcctccatatccgtcaggaagagcctttccagaatgattctgggcatatactaagaagagcaggtatggaaagatctattgtcagggaatcttagaattccctacacgagtgggagaaagatgtccaaattccttacgcagtggtattcatgatggtgccctatctaagtccaggactgttttcctacagcgtgcctcaaaagtgttgtagagggcaggattctacattcacagcctgttccatctacgagattttccagatgctacttgtggtagacattcctaactcatggtacttagccaccagagatcatgatggaatgagtgggtggcttttctacctgccattccctcagaattcatgaggggtgggggacagggggaccggaattgtcttagcaccccaatgttatgacaaaactatgctactttagaaacgcagtctgtttttcaccaattgacatactactgatctgaagtaaccagtgccatcataagaaattactgcattaagaaaatccttgctgtgccctttgaaaagctgttcagaaatcatttacagtgatctttcatctcggtcgctgtagtgaaacattttagtgtgataaatttcaaaattctaaacaaattacccacttttatattggaaatctctaccagaactccctcttcattttttaaggcatacatttgcttgttttcaagatcaagaattctgagctagctttaagtagcaaactgatttatatgtgcaattataggatgcattaagatgaatgatagcctttacatattgaaaactttgcagacgttttgttttgaaaatggcattgtatagtaaatgcaaattaattttgtaaaattatgttaaagagtatgttcagacactttctgccatggccaaaaagtatgtatgaaagtatgtgtgtatttgtttgtaaaaggatgccaatgttttacctgatatcttagtgacacttcagttatctatgcattctttagatctgtgattcggtaaacaggcagccatgttcacgatgccttctatgtcttaccatatttttaattaacctgttaaatacagcttaaaatatttttattttatttattctatttttactgaaatatactgcattattgtgttaatgtattatctttcctggatattatctcccagtgtatccagatctaagtaatctcagtgaactatacattgcctaaaaagtggttttgtaatgatttgtagtcacatttctattgggatatgtagaagaaaaggcaaaatgcttaaagttccttttattttttaaaagcagctagatagacacagacttgccacctcatacatctgctccttggcaacatcaaggggaacgactagccaacatgcctatggctaaaaactttcctttgcagactaaagcactgcttggtgcttcgtttttctacccttcacaacatgtgtgatttcatctaagagatatatacatgtacacatgccctttgtttccacctggatacaagatcactcatagctaattaggaccattgttttttgttcatctgtcttgttgcatgaagggacattagacccatttccattaaaataagttcttggtgataaactgtggcactgctacttctttttaaatccactttatgatttcaagatggacacttgtaagatgactcgacacaaggccattgcctggaagccccagagctttcctctgtttgtatggcccgttcatgtcccaggcattgcaacacaaactcctcaagatttcaccacaacatgacaagcattttcctaactgatattagcacaatttaactaataagccccttcgctctctagttggccaggcttaacctaatacacatctaacgtgtgtgccacacggccagtagaaagtttaacttcagcttcagggcaaagatacccactcacaccgtgtcaacgcaagcagtagttcctggcctccagagcagcttacttcccctgaaagaacgctttgttttcctttatgcccttttcctgttgaccacttttacacatttaaatgtaatttgttgtgagaataaatttagctgcataaaacgttcggctcatttatctgacatcttagtcacatatacaaggaatagaaatagaaactcggtgtctctagttatttttaaattattcttacctcagacttcttagaaatcactttagtaatggagcattttgctttgattagttactacatatttctgcctggtaagaactaggaagtaacttcaaattttgagtaatcaccctgtacttatttggtgatcaggaaggccagctggccttccggacatagaagcctatttagtcaccaactcgagtcttttgtaagcggtcttgctaggattgtgatattttagcacgaagaagtttatcacttcctttaagaacctgacatcaaagaataaagaatagaggtgtacacacactaaatccaaaatgaaaggtaactagagaaatcagttgaatctggtttagcttaactgttaggcgcaggaaggcagataaacagaatttaaagtatgtccccgctttttgttcatcttgcacttccacagtggtttctctctagtcagtaacaaaatttcattatggtttcaggcattatatggtggtaaataatttcagattaaaaatgtgtttgctattggagtatctgaatactagtaatttcattatttagaattttgcagcacttttatctcaagaagaagtccaagaatgtaaaatgccaaatgaaacatgtcagtggaatcaatattctccttcattagaattccctcatattgctttttttttttttcttcagacagaggagtcttactctggagtgcagtggtgtaatttcagctcaccacaacctccacctcccaagttcaagcaattctcgcctcagcctcctgagtagctgggattacaggcatgcaccgccacgcctggccaatttgtatatttttagtagagacagggtttcgccacgttggccaggctggtctcgaactcctgacctcaggtgatccgcccgccccaacctcccaaagtatgtgagccaccacgtccggcctcatattgcttttatccaaaattcttttcccttttcactctaccaaagtatttaaataatcctgtccttcatagaagattctcaaagaagaaaactgcagtgtaattaatgaatggtttaattcagaatcttcatatacttctaaagagaaaaataatttagtgccaaatgcatgttaggagataatcaatgtaagtggcaacaaattgtgacttcacatgctactgtagagatcagaaaattatcctaaactattccataacaatgagacaacatcacagaaaatacacttgaaaataaaaatctcaagaccagctacttctggacaatggaatacttttcagtctggtatggtggagggcccgaaaaggataagggattcttatgatacacaatgggattctttactgaacaatatgttaaattaagctgcaccgccttccttgaggcatggactaccctaaccaaccagatagaaatctgggtgggataagaggatgagccacacgctataattttagggcaaggagatagtgtttgattttcaaaatcagcaaaataagctgagcactttatatctttctgtacaagagtgataacatgaagaattcttcttcagggatttaaaatacaataagcctggttcaactataaaaagtcttgtttcctttcttcattgacacttttttttttttttttttttttttgaggcaaggtctcactctgcttcccaggctggagtgcagtggggcaatattggctcactgcaacctgcacctcctggactcaagagatcctcgtacctcagcctcctaagtagctgggactacaggcgtgtcccaccacacccagctaatttttgtattttttgtagagatggggttttggggtttcgccatgttgtccaggctcgtctggaactccggtgctcaagtggcgtgcccacctcagcctcccaaactgctgagattacagatgtgagccactgcacccagcccactgacacgttttactgataaatgtaaatctaagctaaaataaaaataatgtattaccgctataatacaattcaccattctcttttctcacttcaagtaagaaagtaaaaatagaatatcagagctgaagtagacctaagtattcatcttgaagaagataatattctaaaaatcatgccacctgaattgagcatttaggaatttatgtaacatttctatacaactgaattgcaaaaataaaactttaaattcaaacttta

SEQ ID NO: 1174 - DNA, 4166 bp, Homo sapiens
  source 1..4166: mol_type = unassigned DNA
ctggagcagagccgctgggcgccggagccgaggcgagcgccgcgcgcaccactggttggagttgctgtgggtgagctgctgtggtctgtagccaagcatgctgtggtcggatctgcccagccgtggaacagaaacatttgctggatggaaaatccataaaagaaagctcctgtgaaaagctgaggctgacaataatttaagcaaaatcagatcgatctctttgggctgcctgacctccttgggtgcttgctattaattaacagactttgtggggaaaaaaaggagcttgccttctgagctttgtaccaaagacctgggaaaactaaccatctcagtctttcctgaggacttgggaactgccgaggcctctgccaatgtgttgactgtcgctatgggctcactgttgtccaggcagctcatatttcaaattataacctatttcctgcaccattgctgacgcctggtgatccatgtcagaagtacttccagctgactcaggtgttgacaccttggcagtgtttatggccagcagcggaactacagacgtcacaaatcggaacagcccagccacaccaccaaacacccttaacctccgatcctcccacaatgaactgttgaacgctgaaataaaacacacagaaaccaagaacagcacacctcccaaatgcaggaaaaaatatgcactaactaacatccaggcggccatgggcctctcggatccagctgcacagcccctgctgggaaatggctctgccaacatcaagctggtgaaaaatggggagaaccagctccgtaaggctgcagagcaagggcagcaggaccccaacaaaaacctgagccccactgcagtcatcaacataacttctgagaagttagagggtaaagagccccacccacaggattcctcgagctgtgagattttaccctcccagcccaggagaactaagagcttcctaaattactatgcagatctggaaacctcagccagagaactagagcagaaccgaggcaatcaccatgggactgcggaagagaaatcccagccagtccagggccaggcctccaccatcattgggaatggcgatttgctgctgcagaaaccaaacagaccccagtccagccctgaagacggccaagtagccacagtgtcatccagcccagaaaccaagaaggatcatccgaaaacaggggccaaaaccgactgtgcactgcaccggatccagaacctggcaccgagcgatgaggagtccagctggacaacgttgtcccaagacagtgcctcacccagctccccggatgaaacagatatatggagtgatcactcatttcagactgatccagatttgccgcctggctggaaaagagtcagtgacattgccgggacctattattggcacatcccaacaggaacgactcagtgggaacggcccgtctccatcccagcagatctccagggttctaggaaagggtcacttagttctgtaacgccatctcccaccccagagaacgaggatttgcatgcagccactgttaacccggaccccagtttaaaagagtttgaaggagcaaccctacgctatgcatctttgaaactcagaaatgccccacaccctgatgatgatgattcttgtagtatcaacagtgacccagaagccaagtgttttgctgtgcgttctctgggatgggtagagatggcagaagaggacctcgcccccggtaaaagtagtgttgcggtcaacaactgcatcaggcaactttcctactgcaaaaatgacatccgagacacagtcgggatttggggagaggggaaagacatgtacctgatcctggagaatgacatgctcagcctggtggaccccatggaccgcagcgtgctgcactcgcagcccatcgtcagcatccgcgtgtggggcgtgggccgcgacaatggccgggattttgcttatgtagcaagagataaagatacaagaattttgaaatgtcatgtatttcgatgtgacacaccagcaaaagccattgccacaagtctccacgagatctgctccaagattatggctgaacggaagaatgccaaagcgctggcctgcagctccttacaggaaagggccaatgtgaacctcgatgtccctttgcaagattttccaacaccaaagactgagctggtccagaagttccacgtgcagtacttgggcatgttacctgtagacaaaccagtcggaatggatattttgaacagtgccatagaaaatcttatgacctcatccaacaaggaggactggctgtcagtgaacatgaacgtggctgatgccactgtgactgtcatcagtgaaaagaatgaagaggaagtcttagtggaatgtcgtgtgcgattcctgtccttcatgggtgttgggaaggacgtccacacatttgccttcatcatggacacggggaaccagcgctttgagtgccacgttttctggtgcgagcctaatgctggtaacgtgtctgaggcggtgcaggccgcctgcatgttacgatatcagaagtgcttggtagccaggccgccttctcagaaagttcgaccacctccaccgccagcagattcagtaaccagaagagtcacaaccaatgtaaaacgaggggtcttatccctcattgacactttgaaacagaaacgccctgtcaccgaaatgccatagctgcacatgcaaaaggactcggctatttacctgaagattgactagctacactaaagaaaatgaactccgccatccgaccttccatccagttgctgatgctttgtcttcagagaatttacccttaaccaagcagtgttagacaagcatgttctctcgtcttgccaccatcatgtgatatgaaaagaagcatgaataattttttttgctgtaagttacatcatgcgcagtggaaggtctttttcttattgtaaatattgtgaacattacttaacttcacacacacacagagaagagtgtggccccacccctcctagtgaactaacgctgcgtccttggaatgaatgatgcgtgagttagtttcactgtcttcttggctggacctgtcacaagcaacctttaagtcctacagcactttgccctgttttcaacattggagtaggcactgcatagcagataccattgaattgctgtaaaaataggatggcgagtttgtgttttaatttttcataaaattgaacctgttggttgacaaaattggctgttggcatcagtatagaaaccaactggcagctttccctgacaagctctttgacacatggacaccatttcatgtctacagctgtttgtgggatgttggaaaaaaatgaaacttcaaaattgatgaaaaactaaattcgaggaattaaaatcgaacaaaacatagcctttcttttccgatggttttcaaactgattatttttaaaagagattaataaaatcataatgcattttgggtgggacatatttcaaacttctgccttatattgtacggtgcagctagagaattatagttcactatggccattctctacataaacattaagatgaaatactcctcatcagcctttcatccttagtttgagaattagctgatatgcaatttgaagttgaggaaatatcattgatatttctatcatgcacgattattttagatttctaccaccgtgtgatttttgctagtccatgtgctagaggtaaacgttctgctggaattctgcatccagctctatccccctctgatgctttttgcccagaaagctgtctgtccatcatgtattgtccatggcaacaaattacattaggttgaacctttccttgattttatgtatttaatattagaatttgttggactcaactagatatattttttaatttatattttttccattttactttgaagatttgaaatgttcatacctgagcaaagtctacacaggagtaatggactgtttaacaagtttcccaaaacagcattttcctgctccttcgtatgtaggtgagaaacttagctggaaagacatacaaatttagactctcgttgacattgtcgttttaaaaggaagttgctaaggcgatcaatctcaatattagtcttgtttacttcttcttaatgtcaaaattaacatttacaacatccaattataaaagtaatgctttatgtttata

SEQ ID NO: 1175 - DNA, 2964 bp, Homo sapiens
  source 1..2964: mol_type = unassigned DNA
tgacaccttggcagtgtttatggccagcagcggaactacagacgtcacaaatcggaacagcccagccacaccaccaaacacccttaacctccgatcctcccacaatgaactgttgaacgctgaaataaaacacacagaaaccaagaacagcacacctcccaaatgcaggaaaaaatatgcactaactaacatccaggcggccatgggcctctcggatccagctgcacagcccctgctgggaaatggctctgccaacatcaagctggtgaaaaatggggagaaccagctccgtaaggctgcagagcaagggcagcaggaccccaacaaaaacctgagccccactgcagtcatcaacataacttctgagaagttagagggtaaagagccccacccacaggattcctcgagctgtgagattttaccctcccagcccaggagaactaagagcttcctaaattactatgcagatctggaaacctcagccagagaactagagcagaaccgaggcaatcaccatgggactgcggaagagaaatcccagccagtccagggccaggcctccaccatcattgggaatggcgatttgctgctgcagaaaccaaacagaccccagtccagccctgaagacggccaagtagccacagtgtcatccagcccagaaaccaagaaggatcatccgaaaacaggggccaaaaccgactgtgcactgcaccggatccagaacctggcaccgagcgatgaggagtccagctggacaacgttgtcccaagacagtgcctcacccagctccccggatgaaacagcagatatatggagtgatcactcatttcagactgatccagatttgccgcctggctggaaaagagtcagtgacattgccgggacctattattggcacatcccaacaggaacgactcagtgggaacggcccgtctccatcccagcagatctccagggttctaggaaagggtcacttagttctgtaacgccatctcccaccccagagaacgaggatttgcatgcagccactgttaacccggaccccagtttaaaagagtttgaaggagcaaccctacgctatgcatctttgaaactcagaaatgccccacaccctgatgatgatgattcttgtagtatcaacagtgacccagaagccaagtgttttgctgtgcgttctctgggatgggtagagatggcagaagaggacctcgcccccggtaaaagtagtgttgcggtcaacaactgcatcaggcaactttcctactgcaaaaatgacatccgagacacagtcgggatttggggagaggggaaagacatgtacctgatcctggagaatgacatgctcagcctggtggaccccatggaccgcagcgtgctgcactcgcagcccatcgtcagcatccgcgtgtggggcgtgggccgcgacaatggccgggattttgcttatgtagcaagagataaagatacaagaattttgaaatgtcatgtatttcgatgtgacacaccagcaaaagccattgccacaagtctccacgagatctgctccaagattatggctgaacggaagaatgccaaagcgctggcctgcagctccttacaggaaagggccaatgtgaacctcgatgtccctttgcaagtagattttccaacaccaaagactgagctggtccagaagttccacgtgcagtacttgggcatgttacctgtagacaaaccagtcggaatggatattttgaacagtgccatagaaaatcttatgacctcatccaacaaggaggactggctgtcagtgaacatgaacgtggctgatgccactgtgactgtcatcagtgaaaagaatgaagaggaagtcttagtggaatgtcgtgtgcgattcctgtccttcatgggtgttgggaaggacgtccacacatttgccttcatcatggacacggggaaccagcgctttgagtgccacgttttctggtgcgagcctaatgctggtaacgtgtctgaggcggtgcaggccgcctgcatgttacgatatcagaagtgcttggtagccaggccgccttctcagaaagttcgaccacctccaccgccagcagattcagtaaccagaagagtcacaaccaatgtaaaacgaggggtcttatccctcattgacactttgaaacagaaacgccctgtcaccgaaatgccatagctgcacatgcaaaaggactcggctatttacctgaagattgactagctacactaaagaaaatgaactccgccatccgaccttccatccagttgctgatgctttgtcttcagagaatttacccttaaccaagcagtgttagacaagcatgttctctcgtcttgccaccatcatgtgatatgaaaagaagcatgaataattttttttgctgtaagttacatcatgcgcagtggaaggtctttttcttattgtaaatattgtgaacattacttaacttcacacacacacagagaagagtgtggccccacccctcctagtgaactaacgctgcgtccttggaatgaatgatgcgtgagttagtttcactgtcttcttggctggacctgtcacaagcaacctttaagtcctacagcactttgccctgttttcaacattggagtaggcactgcatagcagataccattgaattgctgtaaaaataggatggcgagtttgtgttttaatttttcataaaattgaacctgttggttgacaaaattggctgttggcatcagtatagaaaccaactggcagctttccctgacaagctctttgacacatggacaccatttcatgtctacagctgtttgtgggatgttggaaaaaaatgaaacttcaaaattgatgaaaaactaaattcgaggaattaaaatcgaacaaaacatagcctttcttttccgatggttttcaaactgattatttttaaaagagattaataaaatcataatgcattttgggtggga

SEQ ID NO: 1176 - DNA, 3592 bp, Homo sapiens
  source 1..3592: mol_type = unassigned DNA
gcccgttctggtctcaagtaggaagctagtgcgctgtaaccgcatctgatctgggcgctccgggaagggcgagactggagcagagccgctgggcgccggagccgaggcgagcgccgcgcgcaccactggttggagttgctgtgggtgagctgctgtggtctgtagccaagcatgctgtggtcggatctgcccagccgtggaacagaaacatttgctggatggaaaatccataaaagaaagctcctgtgaaaagctgaggctgacaataatttaagcaaaatcagatcgatctctttgggctgcctgacctccttgggtgcttgctattaattaacagactttgtggggaaaaaaaggagcttgccttctgagctttgtaccaaagacctgggaaaactaaccatctcagtctttcctgaggacttgggaactgccgaggcctctgccaatgtgttgactgtcgctatgggctcactgttgtccaggcagctcatatttcaaattataacctatttcctgcaccattgctgacgcctggtgatccatgtcagaagtacttccagctgactcaggtgttgacaccttggcagtgtttatggccagcagcggaactacagacgtcacaaatcggaacagcccagccacaccaccaaacacccttaacctccgatcctcccacaatgaactgttgaacgctgaaataaaacacacagaaaccaagaacagcacacctcccaaatgcaggaaaaaatatgcactaactaacatccaggcggccatgggcctctcggatccagctgcacagcccctgctgggaaatggctctgccaacatcaagctggtgaaaaatggggagaaccagctccgtaaggctgcagagcaagggcagcaggaccccaacaaaaacctgagccccactgcagtcatcaacataacttctgagaagttagagggtaaagagccccacccacaggattcctcgagctgtgagattttaccctcccagcccaggagaactaagagcttcctaaattactatgcagatctggaaacctcagccagagaactagagcagaaccgaggcaatcaccatgggactgcggaagagaaatcccagccagtccagggccaggcctccaccatcattgggaatggcgatttgctgctgcagaaaccaaacagaccccagtccagccctgaagacggccaagtagccacagtgtcatccagcccagaaaccaagaaggatcatccgaaaacaggggccaaaaccgactgtgcactgcaccggatccagaacctggcaccgagcgatgaggagtccagctggacaacgttgtcccaagacagtgcctcacccagctccccggatgaaacagcagatatatggagtgatcactcatttcagactgatccagatttgccgcctggctggaaaagagtcagtgacattgccgggacctattattggcacatcccaacaggaacgactcagtgggaacggcccgtctccatcccagcagatctccagggttctaggaaagggtcacttagttctgtaacgccatctcccaccccagagaacgagaaacagccatggagtgattttgctgttctgaatgggggaaagattaatagtgacatttggaaggatttgcatgcagccactgttaacccggaccccagtttaaaagagtttgaaggagcaaccctacgctatgcatctttgaaactcagaaatgccccacaccctgatgatgatgattcttgtagtatcaacagtgacccagaagccaagtgttttgctgtgcgttctctgggatgggtagagatggcagaagaggacctcgcccccggtaaaagtagtgttgcggtcaacaactgcatcaggcaactttcctactgcaaaaatgacatccgagacacagtcgggatttggggagaggggaaagacatgtacctgatcctggagaatgacatgctcagcctggtggaccccatggaccgcagcgtgctgcactcgcagcccatcgtcagcatccgcgtgtggggcgtgggccgcgacaatggccgggattttgcttatgtagcaagagataaagatacaagaattttgaaatgtcatgtatttcgatgtgacacaccagcaaaagccattgccacaagtctccacgagatctgctccaagattatggctgaacggaagaatgccaaagcgctggcctgcagctccttacaggaaagggccaatgtgaacctcgatgtccctttgcaagtagattttccaacaccaaagactgagctggtccagaagttccacgtgcagtacttgggcatgttacctgtagacaaaccagtcggaatggatattttgaacagtgccatagaaaatcttatgacctcatccaacaaggaggactggctgtcagtgaacatgaacgtggctgatgccactgtgactgtcatcagtgaaaagaatgaagaggaagtcttagtggaatgtcgtgtgcgattcctgtccttcatgggtgttgggaaggacgtccacacatttgccttcatcatggacacggggaaccagcgctttgagtgccacgttttctggtgcgagcctaatgctggtaacgtgtctgaggcggtgcaggccgcctgcatgttacgatatcagaagtgcttggtagccaggccgccttctcagaaagttcgaccacctccaccgccagcagattcagtaaccagaagagtcacaaccaatgtaaaacgaggggtcttatccctcattgacactttgaaacagaaacgccctgtcaccgaaatgccatagctgcacatgcaaaaggactcggctatttacctgaagattgactagctacactaaagaaaatgaactccgccatccgaccttccatccagttgctgatgctttgtcttcagagaatttacccttaaccaagcagtgttagacaagcatgttctctcgtcttgccaccatcatgtgatatgaaaagaagcatgaataattttttttgctgtaagttacatcatgcgcagtggaaggtctttttcttattgtaaatattgtgaacattacttaacttcacacacacacagagaagagtgtggccccacccctcctagtgaactaacgctgcgtccttggaatgaatgatgcgtgagttagtttcactgtcttcttggctggacctgtcacaagcaacctttaagtcctacagcactttgccctgttttcaacattggagtaggcactgcatagcagataccattgaattgctgtaaaaataggatggcgagtttgtgttttaatttttcataaaattgaacctgttggttgacaaaattggctgttggcatcagtatagaaaccaactggcagctttccctgacaagctctttgacacatggacaccatttcatgtctacagctgtttgtgggatgttggaaaaaaatgaaacttcaaaattgatgaaaaactaaattcgaggaattaaaatcgaacaaaacatagcctttcttttccgatggttttcaaactgattatttttaaaagagattaataaaatcataatgcat

SEQ ID NO: 1177 - DNA, 1681 bp, Homo sapiens
  source 1..1681: mol_type = unassigned DNA
aacttgagcccggggcagtgcgcgcggctgcttgagcgacggcaccgctggctggtgccggcaccctggggcttgtcgtagcacctggggcggcatccccgcccgacttcggaaggaccgggaggcaaaggtgaggaagttggcgaaggaacggctctcctttgtttgcagggattttgcttatgtagcaagagataaagatacaagaattttgaaatgtcatgtatttcgatgtgacacaccagcaaaagccattgccacaagtctccacgagatctgctccaagattatggctgaacggaagaatgccaaagcgctggcctgcagctccttacaggaaagggccaatgtgaacctcgatgtccctttgcaagtagattttccaacaccaaagactgagctggtccagaagttccacgtgcagtacttgggcatgttacctgtagacaaaccagtcggaatggatattttgaacagtgccatagaaaatcttatgacctcatccaacaaggaggactggctgtcagtgaacatgaacgtggctgatgccactgtgactgtcatcagtgaaaagaatgaagaggaagtcttagtggaatgtcgtgtgcgattcctgtccttcatgggtgttgggaaggacgtccacacatttgccttcatcatggacacggggaaccagcgctttgagtgccacgttttctggtgcgagcctaatgctggtaacgtgtctgaggcggtgcaggccgcctgcatgttacgatatcagaagtgcttggtagccaggccgccttctcagaaagttcgaccacctccaccgccagcagattcagtaaccagaagagtcacaaccaatgtaaaacgaggggtcttatccctcattgacactttgaaacagaaacgccctgtcaccgaaatgccatagctgcacatgcaaaaggactcggctatttacctgaagattgactagctacactaaagaaaatgaactccgccatccgaccttccatccagttgctgatgctttgtcttcagagaatttacccttaaccaagcagtgttagacaagcatgttctctcgtcttgccaccatcatgtgatatgaaaagaagcatgaataattttttttgctgtaagttacatcatgcgcagtggaaggtctttttcttattgtaaatattgtgaacattacttaacttcacacacacacagagaagagtgtggccccacccctcctagtgaactaacgctgcgtccttggaatgaatgatgcgtgagttagtttcactgtcttcttggctggacctgtcacaagcaacctttaagtcctacagcactttgccctgttttcaacattggagtaggcactgcatagcagataccattgaattgctgtaaaaataggatggcgagtttgtgttttaatttttcataaaattgaacctgttggttgacaaaattggctgttggcatcagtatagaaaccaactggcagctttccctgacaagctctttgacacatggacaccatttcatgtctacagctgtttgtgggatgttggaaaaaaatgaaacttcaaaattgatgaaaaactaaattcgaggaattaaaatcgaacaaaacatagcctttcttttccgatggttttcaaactgattatttttaaaagagattaataaaatc

SEQ ID NO: 1178 - DNA, 3316 bp, Homo sapiens
  source 1..3316: mol_type = unassigned DNA
aaagcctggagaagtggaatctcgtcagcgccgctccctgcgcgggactcgcggaacggcactgagcatgctcagttgccggagcccgttctggtctcaagtaggaagctagtgcgctgtaaccgcatctgatctgggcgctccgggaagggcgagactggagcagagccgctgggcgccggagccgaggcgagcgccgcgcgcaccactggttggagttgctgtgggtgagctgctgtggtctgtagccaagcatgctgtggtcggatctgcccagccgtggaacagaaacatttgctggatggaaaatccataaaagaaagctcctgtgaaaagctgaggctgacaataatttaagcaaaatcagatcgatctctttgggctgcctgacctccttgggtgcttgctattaattaacagactttgtggggaaaaaaaggagcttgccttctgagctttgtaccaaagacctgggaaaactaaccatctcagtctttcctgaggacttgggaactgccgaggcctctgccaatgtgttgactgtcgctatgggctcactgttgtccaggcagctcatatttcaaattataacctatttcctgcaccattgctgacgcctggtgatccatgtcagaagtacttccagctgactcaggtgttgacaccttggcagtgtttatggccagcagcggaactacagacgtcacaaatcggaacagcccagccacaccaccaaacacccttaacctccgatcctcccacaatgaactgttgaacgctgaaataaaacacacagaaaccaagaacagcacacctcccaaatgcaggaaaaaatatgcactaactaacatccaggcggccatgggcctctcggatccagctgcacagcccctgctgggaaatggctctgccaacatcaagctggtgaaaaatggggagaaccagctccgtaaggctgcagagcaagggcagcaggaccccaacaaaaacctgagccccactgcagtcatcaacataacttctgagaagttagagggtaaagagccccacccacaggattcctcgagctgtgagattttaccctcccagcccaggagaactaagagcttcctaaattactatgcagatctggaaacctcagccagagaactagagcagaaccgaggcaatcaccatgggactgcggaagagaaatcccagccagtccagggccaggcctccaccatcattgggaatggcgatttgctgctgcagaaaccaaacagaccccagtccagccctgaagacggccaagtagccacagtgtcatccagcccagaaaccaagaaggatcatccgaaaacaggggccaaaaccgactgtgcactgcaccggatccagaacctggcaccgagcgatgaggagtccagctggacaacgttgtcccaagacagtgcctcacccagctccccggatgaaacagatatatggagtgatcactcatttcagactgatccagatttgccgcctggctggaaaagagtcagtgacattgccgggacctattattggcacatcccaacaggaacgactcagtgggaacggcccgtctccatcccagcagatctccagggttctaggaaagggtcacttagttctgtaacgccatctcccaccccagagaacgaggatttgcatgcagccactgttaacccggaccccagtttaaaagagtttgaaggagcaaccctacgctatgcatctttgaaactcagaaatgccccacaccctgatgatgatgattcttgtagtatcaacagtgacccagaagccaagtgttttgctgtgcgttctctgggatgggtagagatggcagaagaggacctcgcccccggtaaaagtagtgttgcggtcaacaactgcatcaggcaactttcctactgcaaaaatgacatccgagacacagtcgggatttggggagaggggaaagacatgtacctgatcctggagaatgacatgctcagcctggtggaccccatggaccgcagcgtgctgcactcgcagcccatcgtcagcatccgcgtgtggggcgtgggccgcgacaatggccgggattttgcttatgtagcaagagataaagatacaagaattttgaaatgtcatgtatttcgatgtgacacaccagcaaaagccattgccacaagtctccacgagatctgctccaagattatggctgaacggaagaatgccaaagcgctggcctgcagctccttacaggaaagggccaatgtgaacctcgatgtccctttgcaagtagattttccaacaccaaagactgagctggtccagaagttccacgtgcagtacttgggcatgttacctgtagacaaaccagtcggaatggatattttgaacagtgccatagaaaatcttatgacctcatccaacaaggaggactggctgtcagtgaacatgaacgtggctgatgccactgtgactgtcatcagtgaaaagaatgaagaggaagtcttagtggaatgtcgtgtgcgattcctgtccttcatgggtgttgggaaggacgtccacacatttgccttcatcatggacacggggaaccagcgctttgagtgccacgttttctggtgcgagcctaatgctggtaacgtgtctgaggcggtgcaggccgcctgcatgttacgatatcagaagtgcttggtagccaggccgccttctcagaaagttcgaccacctccaccgccagcagattcagtaaccagaagagtcacaaccaatgtaaaacgaggggtcttatccctcattgacactttgaaacagaaacgccctgtcaccgaaatgccatagctgcacatgcaaaaggactcggctatttacctgaagattgactagctacactaaagaaaatgaactccgccatccgaccttccatccagttgctgatgctttgtcttcagagaatttacccttaaccaagcagtgttagacaagcatgttctctcgtcttgccaccatcatgtgatatgaaaagaagcatgaataattttttttgctgtaagttacatcatgcgcagtggaaggtctttttcttattgtaaatattgtgaacattacttaacttcacacacacacagagaagagtgtggccccacccctcctagtgaactaacgctgcgtccttggaatgaatgatgcgtgagttagtttcactgtcttcttggctggacctgtcacaagcaacctttaagtcctacagcactttgccctgttttcaacattggagtaggcactgcatagcagataccattgaattgctgtaaaa

SEQ ID NO: 1179 - DNA, 1274 bp, Homo sapiens
  source 1..1274: mol_type = unassigned DNA
aacttgagcccggggcagtgcgcgcggctgcttgagcgacggcaccgctggctggtgccggcaccctggggcttgtcgtagcacctggggcggcatccccgcccgacttcggaaggaccgggaggcaaaggtgaggaagttggcgaaggaacggctctcctttgtttgcagagagagggattttgcttatgtagcaagagataaagatacaagaattttgaaatgtcatgtatttcgatgtgacacaccagcaaaagccattgccacaagtctccacgagatctgctccaagattatggctgaacggaagaatgccaaagcgctggcctgcagctccttacaggaaagggccaatgtgaacctcgatgtccctttgcaagtagattttccaacaccaaagactgagctggtccagaagttccacgtgcagtacttgggcatgttacctgtagacaaaccagtcggaatggatattttgaacagtgccatagaaaatcttatgacctcatccaacaaggaggactggctgtcagtgaacatgaacgtggctgatgccactgtgactgtcatcagtgaaaagaatgaagaggaagtcttagtggaatgtcgtgtgcgattcctgtccttcatgggtgttgggaaggacgtccacacatttgccttcatcatggacacggggaaccagcgctttgagtgccacgttttctggtgcgagcctaatgctggtaacgtgtctgaggcggtgcaggccgcctgcatgttacgatatcagaagtgcttggtagccaggccgccttctcagaaagttcgaccacctccaccgccagcagattcagtaaccagaagagtcacaaccaatgtaaaacgaggggtcttatccctcattgacactttgaaacagaaacgccctgtcaccgaaatgccatagctgcacatgcaaaaggactcggctatttacctgaagattgactagctacactaaagaaaatgaactccgccatccgaccttccatccagttgctgatgctttgtcttcagagaatttacccttaaccaagcagtgttagacaagcatgttctctcgtcttgccaccatcatgtgatatgaaaagaagcatgaataattttttttgctgtaagttacatcatgcgcagtggaaggtctttttcttattgtaaatattgtgaacattacttaacttcacacacacacagagaagagtgtggccccacccctcctagtgaactaacgctgcgtccttggaatgaatgat

SEQ ID NO: 1180 - DNA, 883 bp, Homo sapiens
  source 1..883: mol_type = unassigned DNA
atcactggacgaagaaagataccgtgaatcccttttttctggtgctctgggggtttacttggccaaatgggttttgggccaccaggtgtcctgtatttgggctagatgtaagaagtatggacggcactgtccctccccacagtgaactcacagccacgtagcataatggagaatgggacccacatcacaccccatgacagcagtgtagttcagagcaagaatgacctccagaacagggtagccatgcagtgatggcctcttcagacatttgggcaaggttccgcctttcgagaaaaacacaggtcctttctgaattcggcctggctatactttctgaatgccagttcctatgtgctgccactcttaagcttgatcctgggatctcctgattggatgccgcataatgtctcttgcagaatgaagaggaagtcttagtggaatgtcgtgtgcgattcctgtccttcatgggtgttgggaaggacgtccacacatttgccttcatcatggacacggggaaccagcgctttgagtgccacgttttctggtgcgagcctaatgctggtaacgtgtctgaggcggtgcaggccgcctgcatgttacgatatcagaagtgcttggtagccaggccgccttctcagaaagttcgaccacctccaccgccagcagattcagtaaccagaagagtcacaaccaatgtaaaacgaggggtcttatccctcattgacactttgaaacagaaacgccctgtcaccgaaatgccatagctgcacatgcaaaaggactcggctatttacctgaagattgactagctacactaaagaaaatgaactccgccatccgaccttccatccagttgctgatgctttgtcttcagagaatttac

SEQ ID NO: 1181 - DNA, 701 bp, Homo sapiens
  source 1..701: mol_type = unassigned DNA
gtgacacaccagcaaaagccattgccacaagtctccacgagatctgctccaaggtaagattatggctgaacggaagaatgccaaagcgctggcctgcagctccttacaggaaagggccaatgtgaacctcgatgtccctttgcaagtagattttccaacaccaaagactgagctggtccagaagttccacgtgcagtacttgggcatgttacctgtagacaaaccagtcggaatggatattttgaacagtgccatagaaaatcttatgacctcatccaacaaggaggactggctgtcagtgaacatgaacgtggctgatgccactgtgactgtcatcagtgaaaagaatgaagaggaagtcttagtggaatgtcgtgtgcgattcctgtccttcatgggtgttgggaaggacgtccacacatttgccttcatcatggacacggggaaccagcgctttgagtgccacgttttctggtgcgagcctaatgctggtaacgtgtctgaggcggtgcaggccgcctgcatgttacgatatcagaagtgcttggtagccaggccgccttctcagaaagttcgaccacctccaccgccagcagattcagtaaccagaagagtcacaaccaatgtaaaacgaggggtcttatccctcattgacactttgaaacagaaacgccctgtcaccgaaatgccatagctgcaca

SEQ ID NO: 1182 - DNA, 539 bp, Homo sapiens
  source 1..539: mol_type = unassigned DNA
gtgctgcactcgcagcccatcgtcagcatccgcgtgtggggcgtgggccgcgacaatggccgagagagggattttgcttatgtagcaagagataaagatacaagaattttgaaatgtcatgtatttcgatgtgacacaccagcaaaagccattgccacaagtctccacgagatctgctccaagattatggctgaacggaagaatgccaaagcgctggcctgcagctccttacaggaaagggccaatgtgaacctcgatgtccctttgcaagtagattttccaacaccaaagactgagctggtccagaagttccacgtgcagtacttgggcatgttacctgtagacaaaccagtcggaatggatattttgaacagtgccatagaaaatcttatgacctcatccaacaaggaggactggctgtcagtgaacatgaacgtggctgatgccactgtgactgtcatcagtgaaaagaatgaagaggaagtcttagtggaatgtcgtgtgcgattcctgtccttcatgggtgttgggaaggacgt

SEQ ID NO: 1183 - DNA, 591 bp, Homo sapiens
  source 1..591: mol_type = unassigned DNA
agggagggcgcagggaggcgcgggcgccgctctcttcaacttgagcccggggcagtgcgcgcggctgcttgagcgacggcaccgctggctggtgccggcaccctggggcttgtcgtagcacctggggcggcatccccgcccgacttcggaaggaccgggaggcaaagggattttgcttatgtagcaagagataaagatacaagaattttgaaatgtcatgtatttcgatgtgacacaccagcaaaagccattgccacaagtctccacgagatctgctccaagattatggctgaacggaagaatgccaaagcgctggcctgcagctccttacaggaaagggccaatgtgaacctcgatgtccctttgcaagtagattttccaacaccaaagactgagctggtccagaagttccacgtgcagtacttgggcatgttacctgtagacaaaccagtcggaatggatattttgaacagtgccatagaaaatcttatgacctcatccaacaaggaggactggctgtcagtgaacatgaacgtggctgatgccactgtgactgtcatcagtgaaaagaatgaagaggaagtcttagtg

SEQ ID NO: 1184 - DNA, 550 bp, Homo sapiens
  source 1..550: mol_type = unassigned DNA
attaattgctgcagagttgggaaattagatgagctgtcagtgctcagactcgctgttaacggggctgtgttattggcgggatgccgtgtgaatgctaacgtgttgtttctgctctgttccctcacgccttcccggattcagagagagggattttgcttatgtagcaagagataaagatacaagaattttgaaatgtcatgtatttcgatgtgacacaccagcaaaagccattgccacaagtctccacgagatctgctccaagattatggctgaacggaagaatgccaaagcgctggcctgcagctccttacaggaaagggccaatgtgaacctcgatgtccctttgcaagtagattttccaacaccaaagactgagctggtccagaagttccacgtgcagtacttgggcatgttacctgtagacaaaccagtcggaatggatattttgaacagtgccatagaaaatcttatgacctcatccaacaaggaggactggctgtcagtgaacatgaacgtggctgatgccactgtgactgtcatcagtgaaaag

SEQ ID NO: 1185 - DNA, 575 bp, Homo sapiens
  source 1..575: mol_type = unassigned DNA
gtgggtttggaaaggccatcgaggggatgcttggtaggatctggccagaagaatggggagagacaggggaaagacatgtacctgatcctggagaatgacatgctcagcctggtggaccccatggaccgcagcgtgctgcactcgcagcccatcgtcagcatccgcgtgtggggcgtgggccgcgacaatggccgggattttgcttatgtagcaagagataaagatacaagaattttgaaatgtcatgtatttcgatgtgacacaccagcaaaagccattgccacaagtctccacgagatctgctccaagattatggctgaacggaagaatgccaaagcgctggcctgcagctccttacaggaaagggccaatgtgaacctcgatgtccctttgcaagtagattttccaacaccaaagactgagctggtccagaagttccacgtgcagtacttgggcatgttacctgtagacaaaccagtcggaatggatattttgaacagtgccatagaaaatcttatgacctcatccaacaaggaggactggctgtcagtgaacatgaacgtggctgatgccac

SEQ ID NO: 1186 - DNA, 537 bp, Homo sapiens
  source 1..537: mol_type = unassigned DNA
aggcgcgggcgccgctctcttcaacttgagcccggggcagtgcgcgcggctgcttgagcgacggcaccgctggctggtgccggcaccctggggcttgtcgtagcacctggggcggcatccccgcccgacttcggaaggaccgggaggcaaagagagagggattttgcttatgtagcaagagataaagatacaagaattttgaaatgtcatgtatttcgatgtgacacaccagcaaaagccattgccacaagtctccacgagatctgctccaagattatggctgaacggaagaatgccaaagcgctggcctgcagctccttacaggaaagggccaatgtgaacctcgatgtccctttgcaagtagattttccaacaccaaagactgagctggtccagaagttccacgtgcagtacttgggcatgttacctgtagacaaaccagtcggaatggatattttgaacagtgccatagaaaatcttatgacctcatccaacaaggaggactggctgtcagtgaacatgaacgtggctgatgcc

SEQ ID NO: 1187 - DNA, 426 bp, Homo sapiens
  source 1..426: mol_type = unassigned DNA
ggggagaggggaaagacatgtacctgatcctggagaatgacatgctcagcctggtggaccccatggaccgcagcgtgctgcactcgcagcccatcgtcagcatccgcgtgtggggcgtgggccgcgacaatggccgagagagggattttgcttatgtagcaagagataaagatacaagaattttgaaatgtcatgtatttcgatgtgacacaccagcaaaagccattgccacaagtctccacgagatctgctccaagattatggctgaacggaagaatgccaaagcgctggcctgcagctccttacaggaaagggccaatgtgaacctcgatgtccctttgcaagattttccaacaccaaagactgagctggtccagaagttccacgtgcagtacttgggcatgttacctgtagacaaaccagtcg

SEQ ID NO: 1188 - DNA, 856 bp, Homo sapiens
  source 1..856: mol_type = unassigned DNA
cttgtagtatcaacagtgacccagaagccaagtgttttgctgtgcgttctctgggatgggtagagatggcagaagaggacctcgcccccggtaaaagtagtgttgcggtcaacaactgcatcaggcaactttcctactgcaaaaatgacatccgagacacagtcgggatttggggagaggggaaagacatgtacctgatcctggagaatgacatgctcagcctggtggaccccatggaccgcagcgtgctgcactcgcagcccatcgtcagcatccgcgtgtggggcgtgggccgcgacaatggccgggattttgcttatgtagcaagagataaagatacaagaattttgaaatgtcatgtatttcgatgtgacacaccagcaaaagccattgccacaagtctccacgagatctgctccaagattatggctgaacggaagaatgccaaagcgctggcctgcagctccttacaggaaagggccaatgtgaacctcgatgtccctttgcaaggtaagtcagtggcacctcatgtcttcattatggccctgtccctcctggtccaggactgaaggctctcagatggttctctggtatttcaagtctccttaaagagcacactcaactcagtaagcacaagttgagcctgcacgctgggtctcacagaggcacagagttgattttgcatcactagggttaggcataaagccaggatgagttttgttgttattggacaagattaaagaatattgtctttagtttttgccttcgttttcattttgttttgtattttatgttctttaagaatactgtcttcatattataattcatgtacaacctgggataaggaccctggctg

SEQ ID NO: 1189 - DNA, 1486 bp, Homo sapiens
  source 1..1486: mol_type = unassigned DNA
tgacaccttggcagtgtttatggccagcagcggaactacagacgtcacaaatcggaacagcccagccacaccaccaaacacccttaacctccgatcctcccacaatgaactgttgaacgctgaaataaaacacacagaaaccaagaacagcacacctcccaaatgcaggaaaaaatatgcactaactaacatccaggcggccatgggcctctcggatccagctgcacagcccctgctgggaaatggctctgccaacatcaagctggtgaaaaatggggagaaccagctccgtaaggctgcagagcaagggcagcaggaccccaacaaaaacctgagccccactgcagtcatcaacataacttctgagaagttagagggtaaagagccccacccacaggattcctcgagctgtgagattttaccctcccagcccaggagaactaagagcttcctaaattactatgcagatctggaaacctcagccagagaactagagcagaaccgaggcaatcaccatgggactgcggaagagaaatcccagccagtccagggccaggcctccaccatcattgggaatggcgatttgctgctgcagaaaccaaacagaccccagtccagccctgaagacggccaagtagccacagtgtcatccagcccagaaaccaagaaggatcatccgaaaacaggggccaaaaccgactgtgcactgcaccggatccagaacctggcaccgagcgatgaggagtccagctggacaacgttgtcccaagacagtgcctcacccagctccccggatgaaacagatatatggagtgatcactcatttcagactgatccagatttgccgcctggctggaaaagagtcagtgacattgccgggacctattattggcacatcccaacaggaacgactcagtgggaacggcccgtctccatcccagcagatctccagggttctaggaaagggtcacttagttctgtaacgccatctcccaccccagagaacgaggatttgcatgcagccactgttaacccggaccccagtttaaaagagtttgaaggagcaaccctacgctatgcatctttgaaactcagaaatgccccacaccctgatgatgatgattcttgtagtatcaacagtgacccagaagccaagtgttttgctgtgcgttctctgggatgggtagagatggcagaagaggacctcgcccccggtaaaagtagtgttgcggtcaacaactgcatcaggcaactttcctactgcaaaaatgacatccgagacacagtcgggatttggggagaggggaaagacatgtacctgatcctggagaatgacatgctcagcctggtggaccccatggaccgcagcgtgctgcactcgcagcccatcgtcagcatccgcgtgtggggcgtgggccgcgacaatggccggtgagtccctgggtggggcagtctgggtcacctcacccgtgtccctggtctagct

SEQ ID NO: 1190 - DNA, 2091 bp, Homo sapiens
  source 1..2091: mol_type = unassigned DNA
cttttaagtgaaaatatcttgacccccaacttttggggccctcagccatgggcattccctagtttccaaacaaacacggtacccgtccctcattccacccccaccaccagaaaacagttctgtttggtttatagggaggaaaatgattattatggaattaggtatgctagttattgaatacttggaattatattgtttgcttttaaaattaccttaaggaaataacttcactgtctgcttctaataatgtttagtcatttatttggtaagtaattaaagcaccatcactctcctgccctcgtcttcaggtgataatctagacatagagggagtgagccaacaagttgctgttagagttaacttgttccctaacccatcttgtgaatatcaatgctaacaacagtgtcttgtgttttttttttttcttttcttttctttttctttaaatcaatgtgcttttttcctatgtgaataattatatgtctagaaacagccatggagtgattttgctgttctgaatgggggaaagattaatagtgacatttggaaggcaagtatattgtcagatcttagatcatttaatattttatcctttctgcatggctgtggctgtatatttttcttctttgtgaatatcatgcattctgcagggacacagtgatcgggcttcttgctaggggcattcagctcacactcctgttgcctttttttggtgtctcccattgtgaatgccctaggttccccgttgttttgtaagaacaggagtttgcaccagtcagcattcaacagtccttgcatgcctttctctgcctaagctcacgtacactctctgcctcttgctgggaagacgtttctcccctttgatatttgaggcaatgaatggtcttctcccccattgtacattaacaaggttctattttcctctaggatttgcatgcagccactgttaacccggaccccagtttaaaagagtttgaaggagcaaccctacgctatgcatctttgaaactcagaaatgccccacaccctgatgatgatgattcttgtagtatcaacagtgacccagaagccaagtgttttgctgtgcgttctctgggatgggtagagatggcagaagaggacctcgcccccggtaaaagtagtgttgcggtcaacaactgcatcaggcaactttcctactgcaaaaatgacatccgagacacagtcgggatttggggagaggtaagtggcatgtagaatgatgcacggcaggctgtttacgttctcctgcatttcaggaagccccacagctcagtgacacatggtactgaggggctccgaggtgttcatcaggtgccttttcccattaatgcaggaagtgtaggcatggtacccccgtgtgactgatcccttagcactgccagatgccagtgaggactggggcctggagagagagcgtttctcagtagctaaggacacagattcacgggtgagctttaggggcccagaactcccctaaacatgcctgcaaaatgggatgtgccagtgtataagagcagttttgcagactggaagaaggacctgtattctcaaaggggaaggtgacttccacacgtccacacaaaaatgttgatgcctctgctttaaaagttgacaaattattcttttataacactcttctttacttagcgtctgaagaatcaacattatacatgaattgtggaattgatatttatatacttctcccttttaacagagtgattccattttgaaatgttagttgagataatttcagaaaggaaaaaataagtacagataccaaatgtgtatgaaactcacatcaaaccggaaaagctgtattcctggtgtgctctgagacctgtggaaaaagcattttgggagcatcttggaatagtgtttgctacatgaatagatagatgttgttctctctgcttctagtgaacagagcagtggtagaaaagtttgctttttggttgggctgattgggactccactcacattttctcctagcagcacatcccaatgggaagtaggtttccaagcctttccatggtggagtttgtctccttaaagtggagctgaatcactgca

SEQ ID NO: 1191 - DNA, 560 bp, Homo sapiens
  source 1..560: mol_type = unassigned DNA
attatattgtttgcttttaaaattaccttaaggaaataacttcactgtctgcttctaataatgtttagtcatttatttggtaagtaattaaagcaccatcactctcctgccctcgtcttcaggtgataatctagacatagagggagtgagccaacaagttgctgttagagttaacttgttccctaacccatcttgtgaatatcaatgctaacaacagtgtcttgtgttttttttttttcttttcttttctttttctttaaatcaatgtgcttttttcctatgtgaataattatatgtctagaaacagccatggagtgattttgctgttctgaatgggggaaagattaatagtgacatttggaaggatttgcatgcagccactgttaacccggaccccagtttaaaagagtttgaaggagcaaccctacgctatgcatctttgaaactcagaaatgccccacaccctgatgatgatgattcttgtagtatcaacagtgacccagaagccaagtgttttgctgtgcgttctctgggatgggtagagatggcagaagaggacc

SEQ ID NO: 1192 - DNA, 907 bp, Homo sapiens
  source 1..907: mol_type = unassigned DNA
ccgcatctgatctgggcgctccgggaagggcgagactggagcagagccgctgggcgccggagccgaggcgagcgccgcgcgcaccactggttggagttgctgtgggtgagctgctgtggtctgtagccaagcatgctgtggtcggatctgcccagccgtggaacagaaacatttgctggatggaaaatccataaaagaaagctcctgtgaaaagctgaggctgacaataatttaagcaaaatcagatcgatctctttgggctgcctgacctccttgggtgcttgctattaattaacagactttgtggggaaaaaaaggagcttgccttctgagctttgtaccaaagacctgggaaaactaaccatctcagtctttcctgaggacttgggaactgccgaggcctctgccaatgtgttgactgtcgctatgggctcactgttgtccaggcagctcatctgactcaggtgttgacaccttggcagtgtttatggccagcagcggaactacagacgtcacaaatcggaacagcccagccacaccaccaaacacccttaacctccgatcctcccacaatgaactgttgaacgctgaaataaaacacacagaaaccaagaacagcacacctcccaaatgcaggaaaaaatatgcactaactaacatccaggcggccatgggcctctcggatccagctgcacagcccctgctgggaaatggctctgccaacatcaagctggtgaaaaatggggagaaccagctccgtaaggctgcagagcaagggcagcaggaccccaacaaaaacctgagccccactgcagtcatcaacataacttctgagaagttagagggtaaagagccccacccacaggattcctcgagctgtgagattttaccctcccagcccaggaga

SEQ ID NO: 1193 - DNA, 639 bp, Homo sapiens
  source 1..639: mol_type = unassigned DNA
ctcaagtaggaagctagtgcgctgtaaccgcatctgatctgggcgctccgggaagggcgagactggagcagagccgctgggcgccggagccgaggcgagcgccgcgcgcaccactggttggagttgctgtgggtgagctgctgtggtctgtagccaagcatgctgtggtcggatctgcccagccgtggaacagaaacatttgctggatggaaaatccataaaagaaagctcctgtgaaaagctgaggctgacaataatttaagcaaaatcagatcgatctctttgggctgcctgacctccttgggtgcttgctattaattaacagactttgtggggaaaaaaaggagcttgccttctgagctttgtaccaaagacctgggaaaaatttcaaattataacctatttcctgcaccattgctgacgcctggtgatccatgtcagaagtacttccagctgactcaggtgttgacaccttggcagtgtttatggccagcagcggaactacagacgtcacaaatcggaacagcccagccacaccaccaaacacccttaacctccgatcctcccacaatgaactgttgaacgctgaaataaaacacacagaaaccaagaacagcacacctcccaaatgcaggaaaa

SEQ ID NO: 1194 - DNA, 493 bp, Homo sapiens
  source 1..493: mol_type = unassigned DNA
caagtaggaagctagtgcgctgtaaccgcatctgatctgggcgctccgggaagggcgagactggagcagagccgctgggcgccggagccgaggcgagcgccgcgcgcaccactggttggagttgctgtgggtgagctgctgtggtctgtagccaagcatgctgtggtcggatctgcccagccgtggaacagaaacatttgctggatggaaaatccataaaagaaagctcctgtgaaaagctgaggctgacaataatttaagcaaaatcagatcgatctctttgggctgcctgacctccttgggtgcttgctattaattaacagactttgtggggaaaaaaaggagcttgccttctgagctttgtaccaaagacctgggaaaactgactcaggtgttgacaccttggcagtgtttatggccagcagcggaactacagacgtcacaaatcggaacagcccagccacaccaccaaacacccttaacctccgatcct

SEQ ID NO: 1195 - DNA, 604 bp, Homo sapiens
  source 1..604: mol_type = unassigned DNA
ggagaagtggaatctcgtcagcgccgctccctgcgcgggactcgcggaacggcactgagcatgctcagttgccggagcccgttctggtctcaagtaggaagctagtgcgctgtaaccgcatctgatctgggcgctccgggaagggcgagactggagcagagccgctgggcgccggagccgaggcgagcgccgcgcgcaccactggttggagttgctgtgggtgagctgctgtggtctgtagccaagcatgctgtggtcggatctgcccagccgtggaacagaaacatttgctggatggaaaatccataaaagaaagctcctgtgaaaagctgaggctgacaataatttaagcaaaatcagatcgatctctttgggctgcctgacctccttgggtgcttgctattaattaacagactttgtggggaaaaaaaggagcttgccttctgagctttgtaccaaagacctgggaaaaatttcaaattataacctatttcctgcaccattgctgacgcctggtgatccatgtcagaagtacttccagctgactcaggtgttgacaccttggcagtgtttatggccagcagcggaactacagacgtcacaa

SEQ ID NO: 1196 - DNA, 544 bp, Homo sapiens
  source 1..544: mol_type = unassigned DNA
gatctgggcgctccgggaagggcgagactggagcagagccgctgggcgccggagccgaggcgagcgccgcgcgcaccactggttggagttgctgtgggtgagctgctgtggtctgtagccaagcatgctgtggtcggatctgcccagccgtggaacagaaacatttgctggatggaaaatccataaaagaaagctcctgtgaaaagctgaggctgacaataatttaagcaaaatcagtctcactctgtcaccaggctggagtgcagtgacgtgatctcggctcacagcaaccgctgtctgccaggttcaagtgattctcctgcctcagcctctcgagtaactggaactacagatcgatctctttgggctgcctgacctccttgggtgcttgctattaattaacagactttgtggggaaaaaaaggagcttgccttctgagctttgtaccaaagacctgggaaaaatttcaaattataacctatttcctgcaccattgctgacgcctggtgatccatgtcagaagtacttccagctgactcaggt

SEQ ID NO: 1197 - DNA, 565 bp, Homo sapiens
  source 1..565: mol_type = unassigned DNA
actcgcggaacggcactgagcatgctcagttgccggagcccgttctggtctcaagtaggaagctagtgcgctgtaaccgcatctgatctgggcgctccgggaagggcgagactggagcagagccgctgggcgccggagccgaggcgagcgccgcgcgcaccactggttggagttgctgtgggtgagctgctgtggtctgtagccaagcatgctgtggtcggatctgcccagccgtggaacagaaacatttgctggatggaaaatccataaaagaaagctcctgtgaaaagctgaggctgacaataatttaagcaaaatcaggatcttgctccatcacccaggctggagtgcgtggtacaatcatggctcactgcagccttgatctcccaggctcaactgatcttccttcctcagcctcctgaatagctgggaccacagatcgatctctttgggctgcctgacctccttgggtgcttgctattaattaacagactttgtggggaaaaaaaggagcttgccttctgagctttgtaccaaagacctgggaaaaatttcaaattataac

SEQ ID NO: 1198 - DNA, 556 bp, Homo sapiens
  source 1..556: mol_type = unassigned DNA
atttttgggtaagattcttttatgatttgataggaatatttttatctagccgctgaatggtccatgaaattgacagggaaactgaaacttcccaggctgtgcagctagtaggtgggacttggacccagaccaggtgtgtgtccatcgctgcattatcatctcttcataaaacaaagaatttaatattgtatgaacgaagataaggttggagttgctgtgggtgagctgctgtggtctgtagccaagcatgctgtggtcggatctgcccagccgtggaacagaaacatttgctggatggaaaatccataaaagaaagctcctgtgaaaagctgaggctgacaataatttaagcaaaatcagatcgatctctttgggctgcctgacctccttgggtgcttgctattaattaacagactttgtggggaaaaaaaggagcttgccttctgagctttgtaccaaagacctgggaaaactaaccatctcagtctttcctgaggacttgggaactgccgaggcctctgccaatgtgttgactgtcgctatgggctcactgttg

SEQ ID NO: 1199 - DNA, 619 bp, Homo sapiens
  source 1..619: mol_type = unassigned DNA
actcgcggaacggcactgagcatgctcagttgccggagcccgttctggtctcaagtaggaagctagtgcgctgtaaccgcatctgatctgggcgctccgggaagggcgagactggagcagagccgctgggcgccggagccgaggcgagcgccgcgcgcaccactggttggagttgctgtgggtgagctgctgtggtctgtagccaagcatgctgtggtcggatctgcccagccgtggaacagaaacatttgctggatggaaaatccataaaagaaagctcctgtgaaaagctgaggctgacaataatttaagcaaaatcaggatcttgctccatcacccaggctggagtgcgtggtacaatcatggctcactgcagccttgatctcccaggctcaactgatcttccttcctcagcctcctgaatagctgggaccacagatcgatctctttgggctgcctgacctccttgggtgcttgctattaattaacagactttgtggggaaaaaaaggagcttgccttctgagctttgtaccaaagacctgggaaaactaaccatctcagtctttcctgaggacttgggaactgccgaggcctctgccaatgtgttgactgtcgct

SEQ ID NO: 1200 - DNA, 482 bp, Homo sapiens
  source 1..482: mol_type = unassigned DNA
gcatttcagggattttgtgtgcccaggcagtgacttcccgacttctccggcgtatccccgacggggcgcagaacaccgcccgtggcgaagtcgggccgggggagtttgggaacccgtccccgggagctcagcggccagaggagggcgcggaagtgtttcctgggtgagcgcggcagcgggacccgtttccggaaggctgattgcatcaggttggagttgctgtgggtgagctgctgtggtctgtagccaagcatgctgtggtcggatctgcccagccgtggaacagaaacatttgctggatggaaaatccataaaagaaagctcctgtgaaaagctgaggctgacaataatttaagcaaaatcagatcgatctctttgggctgcctgacctccttgggtgcttgctattaattaacagactttgtggggaaaaaaaggagcttgccttctgagctttgtaccaaagacctgggaaaactaac

SEQ ID NO: 1201 - DNA, 446 bp, Homo sapiens
  source 1..446: mol_type = unassigned DNA
gtaaccgcatctgatctgggcgctccgggaagggcgagactggagcagagccgctgggcgccggagccgaggcgagcgccgcgcgcaccactgagatgcagtctcactgtgttgcccagaatggtttcaaactcctcaaagattgggctcaaagttcgggctcaagtgatcctcccgccttggcctcccgaagttcttggattacaagcttgagccactgcctggcctcaatttcactcttaacaaaatatttcaaatatacaaataatctaaaaagtggggactaatgttctagatactgatattcctaccacacccatcagaaaagaaatgcgaacactgttctagatgttttcagatttatctttacttctccattattgcagttatttttactatttttacttgtgccattcaacatacaccctcttacaactacttgctag

SEQ ID NO: 1202 - DNA, 6992 bp, Homo sapiens
  source 1..6992: mol_type = unassigned DNA
aacttgagcccggggcagtgcgcgcggctgcttgagcgacggcaccgctggctggtgccggcaccctggggcttgtcgtagcacctggggcggcatccccgcccgacttcggaaggaccgggaggcaaaggtgaggaagttggcgaaggaacggctctcctttgtttgcaggcacagggattttgcttatgtagcaagagataaagatacaagaattttgaaatgtcatgtatttcgatgtgacacaccagcaaaagccattgccacaagtctccacgagatctgctccaagattatggctgaacggaagaatgccaaagcgctggcctgcagctccttacaggaaagggccaatgtgaacctcgatgtccctttgcaagtagattttccaacaccaaagactgagctggtccagaagttccacgtgcagtacttgggcatgttacctgtagacaaaccagtcggaatggatattttgaacagtgccatagaaaatcttatgacctcatccaacaaggaggactggctgtcagtgaacatgaacgtggctgatgccactgtgactgtcatcagtgaaaagaatgaagaggaagtcttagtggaatgtcgtgtgcgattcctgtccttcatgggtgttgggaaggacgtccacacatttgccttcatcatggacacggggaaccagcgctttgagtgccacgttttctggtgcgagcctaatgctggtaacgtgtctgaggcggtgcaggccgcctgcatgttacgatatcagaagtgcttggtagccaggccgccttctcagaaagttcgaccacctccaccgccagcagattcagtaaccagaagagtcacaaccaatgtaaaacgaggggtcttatccctcattgacactttgaaacagaaacgccctgtcaccgaaatgccatagctgcacatgcaaaaggactcggctatttacctgaagattgactagctacactaaagaaaatgaactccgccatccgaccttccatccagttgctgatgctttgtcttcagagaatttacccttaaccaagcagtgttagacaagcatgttctctcgtcttgccaccatcatgtgatatgaaaagaagcatgaataattttttttgctgtaagttacatcatgcgcagtggaaggtctttttcttattgtaaatattgtgaacattacttaacttcacacacacacagagaagagtgtggccccacccctcctagtgaactaacgctgcgtccttggaatgaatgatgcgtgagttagtttcactgtcttcttggctggacctgtcacaagcaacctttaagtcctacagcactttgccctgttttcaacattggagtaggcactgcatagcagataccattgaattgctgtaaaaataggatggcgagtttgtgttttaatttttcataaaattgaacctgttggttgacaaaattggctgttggcatcagtatagaaaccaactggcagctttccctgacaagctctttgacacatggacaccatttcatgtctacagctgtttgtgggatgttggaaaaaaatgaaacttcaaaattgatgaaaaactaaattcgaggaattaaaatcgaacaaaacatagcctttcttttccgatggttttcaaactgattatttttaaaagagattaataaaatcataatgcattttgggtgggacatatttcaaacttctgccttatattgtacggtgcagctagagaattatagttcactatggccattctctacataaacattaagatgaaatactcctcatcagcctttcatccttagtttgagaattagctgatatgcaatttgaagttgaggaaatatcattgatatttctatcatgcacgattattttagatttctaccaccgtgtgatttttgctagtccatgtgctagaggtaaacgttctgctggaattctgcatccagctctatccccctctgatgctttttgcccagaaagctgtctgtccatcatgtattgtccatggcaacaaattacattaggttgaacctttccttgattttatgtatttaatattagaatttgttggactcaactagatatattttttaatttatattttttccattttactttgaagatttgaaatgttcatacctgagcaaagtctacacaggagtaatggactgtttaacaagtttcccaaaacagcattttcctgctccttcgtatgtaggtgagaaacttagctggaaagacatacaaatttagactctcgttgacattgtcgttttaaaaggaagttgctaaggcgatcaatctcaatattagtcttgtttacttcttcttaatgtcaaaattaacatttacaacatccaattataaaagtaatgctttatgtttatacactgctatgtacttgtcaaaatggtttccacattcttatcacatctgagccttaccaggtagagaaggtactaaatacactttagaagtaaaaatatgaagtaccgagaggctaaacccactggcctaagatctcaccaaagttcatgaaaaccaggactaggacccacggctcccaaagcccgttcttgctgtgttgtgctgcctccatatccgtcaggaagagcctttccagaatgattctgggcatatactaagaagagcaggtatggaaagatctattgtcagggaatcttagaattccctacacgagtgggagaaagatgtccaaattccttacgcagtggtattcatgatggtgccctatctaagtccaggactgttttcctacagcgtgcctcaaaagtgttgtagagggcaggattctacattcacagcctgttccatctacgagattttccagatgctacttgtggtagacattcctaactcatggtacttagccaccagagatcatgatggaatgagtgggtggcttttctacctgccattccctcagaattcatgaggggtgggggacagggggaccggaattgtcttagcaccccaatgttatgacaaaactatgctactttagaaacgcagtctgtttttcaccaattgacatactactgatctgaagtaaccagtgccatcataagaaattactgcattaagaaaatccttgctgtgccctttgaaaagctgttcagaaatcatttacagtgatctttcatctcggtcgctgtagtgaaacattttagtgtgataaatttcaaaattctaaacaaattacccacttttatattggaaatctctaccagaactccctcttcattttttaaggcatacatttgcttgttttcaagatcaagaattctgagctagctttaagtagcaaactgatttatatgtgcaattataggatgcattaagatgaatgatagcctttacatattgaaaactttgcagacgttttgttttgaaaatggcattgtatagtaaatgcaaattaattttgtaaaattatgttaaagagtatgttcagacactttctgccatggccaaaaagtatgtatgaaagtatgtgtgtatttgtttgtaaaaggatgccaatgttttacctgatatcttagtgacacttcagttatctatgcattctttagatctgtgattcggtaaacaggcagccatgttcacgatgccttctatgtcttaccatatttttaattaacctgttaaatacagcttaaaatatttttattttatttattctatttttactgaaatatactgcattattgtgttaatgtattatctttcctggatattatctcccagtgtatccagatctaagtaatctcagtgaactatacattgcctaaaaagtggttttgtaatgatttgtagtcacatttctattgggatatgtagaagaaaaggcaaaatgcttaaagttccttttattttttaaaagcagctagatagacacagacttgccacctcatacatctgctccttggcaacatcaaggggaacgactagccaacatgcctatggctaaaaactttcctttgcagactaaagcactgcttggtgcttcgtttttctacccttcacaacatgtgtgatttcatctaagagatatatacatgtacacatgccctttgtttccacctggatacaagatcactcatagctaattaggaccattgttttttgttcatctgtcttgttgcatgaagggacattagacccatttccattaaaataagttcttggtgataaactgtggcactgctacttctttttaaatccactttatgatttcaagatggacacttgtaagatgactcgacacaaggccattgcctggaagccccagagctttcctctgtttgtatggcccgttcatgtcccaggcattgcaacacaaactcctcaagatttcaccacaacatgacaagcattttcctaactgatattagcacaatttaactaataagccccttcgctctctagttggccaggcttaacctaatacacatctaacgtgtgtgccacacggccagtagaaagtttaacttcagcttcagggcaaagatacccactcacaccgtgtcaacgcaagcagtagttcctggcctccagagcagcttacttcccctgaaagaacgctttgttttcctttatgcccttttcctgttgaccacttttacacatttaaatgtaatttgttgtgagaataaatttagctgcataaaacgttcggctcatttatctgacatcttagtcacatatacaaggaatagaaatagaaactcggtgtctctagttatttttaaattattcttacctcagacttcttagaaatcactttagtaatggagcattttgctttgattagttactacatatttctgcctggtaagaactaggaagtaacttcaaattttgagtaatcaccctgtacttatttggtgatcaggaaggccagctggccttccggacatagaagcctatttagtcaccaactcgagtcttttgtaagcggtcttgctaggattgtgatattttagcacgaagaagtttatcacttcctttaagaacctgacatcaaagaataaagaatagaggtgtacacacactaaatccaaaatgaaaggtaactagagaaatcagttgaatctggtttagcttaactgttaggcgcaggaaggcagataaacagaatttaaagtatgtccccgctttttgttcatcttgcacttccacagtggtttctctctagtcagtaacaaaatttcattatggtttcaggcattatatggtggtaaataatttcagattaaaaatgtgtttgctattggagtatctgaatactagtaatttcattatttagaattttgcagcacttttatctcaagaagaagtccaagaatgtaaaatgccaaatgaaacatgtcagtggaatcaatattctccttcattagaattccctcatattgctttttttttttttcttcagacagaggagtcttactctggagtgcagtggtgtaatttcagctcaccacaacctccacctcccaagttcaagcaattctcgcctcagcctcctgagtagctgggattacaggcatgcaccgccacgcctggccaatttgtatatttttagtagagacagggtttcgccacgttggccaggctggtctcgaactcctgacctcaggtgatccgcccgccccaacctcccaaagtatgtgagccaccacgtccggcctcatattgcttttatccaaaattcttttcccttttcactctaccaaagtatttaaataatcctgtccttcatagaagattctcaaagaagaaaactgcagtgtaattaatgaatggtttaattcagaatcttcatatacttctaaagagaaaaataatttagtgccaaatgcatgttaggagataatcaatgtaagtggcaacaaattgtgacttcacatgctactgtagagatcagaaaattatcctaaactattccataacaatgagacaacatcacagaaaatacacttgaaaataaaaatctcaagaccagctacttctggacaatggaatacttttcagtctggtatggtggagggcccgaaaaggataagggattcttatgatacacaatgggattctttactgaacaatatgttaaattaagctgcaccgccttccttgaggcatggactaccctaaccaaccagatagaaatctgggtgggataagaggatgagccacacgctataattttagggcaaggagatagtgtttgattttcaaaatcagcaaaataagctgagcactttatatctttctgtacaagagtgataacatgaagaattcttcttcagggatttaaaatacaataagcctggttcaactataaaaagtcttgtttcctttcttcattgacacttttttttttttttttttttttttgaggcaaggtctcactctgcttcccaggctggagtgcagtggggcaatattggctcactgcaacctgcacctcctggactcaagagatcctcgtacctcagcctcctaagtagctgggactacaggcgtgtcccaccacacccagctaatttttgtattttttgtagagatggggttttggggtttcgccatgttgtccaggctcgtctggaactccggtgctcaagtggcgtgcccacctcagcctcccaaactgctgagattacagatgtgagccactgcacccagcccactgacacgttttactgataaatgtaaatctaagctaaaataaaaataatgtattaccgctataatacaattcaccattctcttttctcacttcaagtaagaaagtaaaaatagaatatcagagctgaagtagacctaagtattcatcttgaagaagataatattctaaaaatcatgccacctgaattgagcatttaggaatttatgtaacatttctatacaactgaattgcaaaaataaaactttaaattcaaacttt

SEQ ID NO: 1203 - DNA, 3809 bp, Homo sapiens
  source 1..3809: mol_type = unassigned DNA
gaaatatgaagagacgctgcagctgcggtggcggtggcggccactgcagctcagagcggcgcacgcggcggccggggcgggacgcggggccgggcgcggagaagtcggggcgggcggcagagaggccgggacgcggaccgggccggggcgcccacagccgcccgacggcgcccagagagcgcgcgccccgcagccccgcgcctagcccgccgggcatggggcgcgcggcagccgcctgaagccccggcctggcccggccgcacccggccggaggcggagggcagagcgcgcgcccagttgcccgggcaccaaatcggagcgcggcgtgcgggaggccccagagcaggactggaaatgtcctggccgcgccgcctcctgctcagatacctgttcccggccctcctgcttcacgggctgggagagggttctgccctccttcatccagacagcaggtctcatcctaggtccttagagaaaagtgcctggagggcttttaaggagtcacagtgccatcacatgctcaaacatctccacaatggtgcaaggatcacagtgcagatgccacctacaatcgagggccactgggtctccacaggctgtgaagtaaggtcaggcccagagttcatcacaaggtcctacagattctaccacaataacaccttcaaggcctaccaattttattatggcagcaaccggtgcacaaatcccacttatactctcatcatccggggcaagatccgcctccgccaggcctcctggatcatccgagggggcacggaagccgactaccagctgcacaacgtccaggtgatctgccacacagaggcggtggccgagaagctcggccagcaggtgaaccgcacatgcccgggcttcctcgcagacgggggtccctgggtgcaggacgtggcctatgacctctggcgagaggagaacggctgtgagtgcaccaaggccgtgaactttgccatgcatgaacttcagctcatccgggtggagaagcagtaccttcaccacaacctcgaccacctggtcgaggagctcttccttggtgacattcacactgatgccacccagaggatgttctaccggccctccagttaccagccccctctgcagaatgccaagaaccacgaccatgcctgcatcgcctgtcggatcatctatcggtcagacgagcaccaccctcccatcctgcccccaaaggcagacctgaccatcggcctgcacggggagtgggtgagccagcgctgtgaggtgcgccccgaagtcctcttcctcacccgccacttcatcttccatgacaacaacaacacctgggagggccactactaccactactcagacccggtgtgcaagcaccccaccttctccatctacgcccggggccgctacagccgcggcgtcctctcgtccagggtcatgggaggcaccgagttcgtgttcaaagtgaatcacatgaaggtcacccccatggatgcggccacagcctcactgctcaacgtcttcaacgggaatgagtgcggggccgagggctcctggcaggtgggcatccagcaggatgtgacccacaccaatggctgcgtggccctgggcatcaaactacctcacacggagtacgagatcttcaaaatggaacaggatgcccgggggcgctatctgctgttcaacggtcagaggcccagcgacgggtccagcccagacaggccagagaagagagccacgtcctaccagatgcccttggtccagtgtgcctcctcttcgccgagggcagaggacctcgcagaagacagtggaagcagcctgtatggccgggcccctgggaggcacacctggtccctgctgctggctgcacttgcctgccttgtccctctgctgcattggaacatccgcagatagaagttttagaaagttctatttttccaaaccaggattccttactattgacagatttgctttaccaaaagaaaagacatttattcttttgatgcacttgaatgccagagaactgtccttctttttctcctctccctccctcccagcccctgagtcatgaacagcaaggagtgtttgaagtttctgctttgaactccgtccagcctgatccctggcctgagcaacttcacaacagtaattgcactttaagacagcctagagttctggacgagcgtgtttggtagcagggatgaaagctagggcctcttatttttttctcttaattattattatatttctgagttaaacttagaagaaacaactatcaagctacaacttttcctgccattttcctgtggttgcagcctgtcttcctttgaaattgttttactctctgagttttatatgctggaatccaatgcagagttggtttgggactgtgatcaagacaccttttattaataaagaagagacacaggtgtagatatgtatatacaaaaagatgtacggtctggccaaaccaccttcccagcctttatgcaaaaaaaggggagaatcaaagctttcatttcagaaatgttgcgtggaaaagtatctgtaattaaagtttcgaagtaatttaacctatttttacatcatttgtcttaccttgttgagagaggagactggcttgttggcttctggttgttgcaggaggcatgtggcttcctgccttctcagtagacaggatcattaggaaaatagcaacatcaatcctgttacacaggagcagtgacacgggtggctgcagtgtggtacatgccacacaaatgatagagaaagtgcccgttcattgcagtttcctcttcctgggggacctgagccctgactcactgtcttattaggggcaggcggaagaagctgcactctggcatccatgccaccttctaagatgaacatgcagagacagaacttcagctgctcagagagagtgcagtgggcatggtctgccctgggggcttgctccattacaccctgacttggcatgcaaccgagtctttgtgtaaagccatcctgtcattgcacatactggctcactcagtgtctttcctgctgctgatgtggctctgtgctggcagtttcagggtcagtgtgctgctttcctagggacattagaagggcgcaggagtgcatgtctgcccattcctttggagtatcgcagatgatgctatacgataccaagtgttaccgctcacagagactgggaaagggaaatgggagtaaccgaaagccagatggaacgaaagcaaacatggaaaccatgatcacggcaaagagccatccttgtatttaagaagtaactttggccaggtgtgatggctcacgccgtaaccccagcactttgggagaccaaggagggtggatcacgaggtcaggagatcaagaccatcctggctaacactgtgaaatgctgtctctactaaaaatacaaaaaattagccaggcgtggtggtgggcacctgtagtcccagctactcgggaggctgaggcaggagaatggcatgaacctgggaggtggagcttgcagtgagccgagattgtgccactgcgctcgagcctgggcaacagagcgagactccatctcaaaaaaaaaaaaaagtaactttatgaaatgccacagcattcagtgtggcattaagttacaacgaccacatagagtaccaaagtgcttcaggttatattttaagttgtggtgcagactgagggggcttattcaaaatgaaaatactaacttaaatggccaccaagttcaataaacaaagatgtcaaaatactctcagaaatacaactgatactatctttaaaagacgtaataaaatcatgtgaaaaactgt

SEQ ID NO: 1204 - DNA, 833 bp, Homo sapiens
  source 1..833: mol_type = unassigned DNA
gccgggcatggggcgcgcggcagccgcctgaagccccggcctggcccggccgcacccggccggaggcggagggcagagcgcgcgcccagttgcccgggcaccaaatcggagcgcggcgtgcgggaggccccagagcaggactggaaatgtcctggccgcgccgcctcctgctcagatacctgttcccggccctcctgcttcacgaaccacgaccatgcctgcatcgcctgtcggatcatctatcggtcagacgagcaccaccctcccatcctgcccccaaaggcagacctgaccatcggcctgcacggggagtgggtgagccagcgctgtgaggtgcgccccgaagtcctcttcctcacccgccacttcatcttccatgacaacaacaacacctgggagggccactactaccactactcagacccggtgtgcaagcaccccaccttctccatctacgcccggggccgctacagccgcggcgtcctctcgtccagggtcatgggaggcaccgagttcgtgttcaaagtgaatcacatgaaggtcacccccatggatgcggccacagcctcactgctcaacgtcttcaacgggaatgagtgcggggccgagggctcctggcaggtgggcatccagcaggatgtgacccacaccaatggctgcgtggccctgggcatcaaactacctcacacggagtacgagatcttcaaaatggaacaggatgcccgggggcgctatctgctgttcaacggtcagaggcccagcgacgggtccagcccagacaggccagagaagagagccacgtcctaccagatgcccttggtccagtgtgcctc

SEQ ID NO: 1205 - DNA, 730 bp, Homo sapiens
  source 1..730: mol_type = unassigned DNA
gccgcacccggccggaggcggagggcagagcgcgcgcccagttgcccgggcaccaaatcggagcgcggcgtgcgggaggccccagagcaggactggaaatgtcctggccgcgccgcctcctgctcagatacctgttcccggccctcctgcttcacgctgtgaagtaaggtcaggcccagagttcatcacaaggtcctacagattctaccacaataacaccttcaaggcctaccaattttattatggcagcaaccggtgcacaaatcccacttatactctcatcatccggggcaagatccgcctccgccaggcctcctggatcatccgagggggcacggaagccgactaccagctgcacaacgtccaggtgatctgccacacagaggcggtggccgagaagctcggccagcaggtgaaccgcacatgcccgggcttcctcgcagacgggggtccctgggtgcaggacgtggcctatgacctctggcgagaggagaacggctgtgagtgcaccaaggccgtgaactttgccatgcatgaacttcagctcatccgggtggagaagcagtaccttcaccacaacctcgaccacctggtcgaggagctcttccttggtgacattcacactgatgccacccagaggatgttctaccggccctccagttaccagccccctctgcagaatgccaagaaccacgaccatgcctgcatcgcctgtcggatcatctatcgg

SEQ ID NO: 1206 - DNA, 559 bp, Homo sapiens
  source 1..559: mol_type = unassigned DNA
atgtcctggccgcgccgcctcctgctcagatacctgttcccggccctcctgcttcacgggctgggagagggttctgccctccttcatccagacagcaggtctcatcctaggtccttagagaaaagtgcctggagggcttttaaggagtcacagtgccatcacatgctcaaacatctccacaatggtgcaaggatcacagtgcagatgccacctacaatcgagggccactgggtctccacaggctgtgaagtaaggtcaggcccagagttcatcacaaggtcctacagattctaccacaataacaccttcaaggcctaccaattttattatggcagcaaccggtgcacaaatcccacttatactctcatcatccggggcaagatccgcctccgccaggcctcctggatcatccgagggggcacggaagccgactaccagctgcacaacgtccagggtcatgggaggcaccgagttcgtgttcaaagtgaatcacatgaaggtcacccccatggatgcggccacagcctcactgctcaacgtcttcaacgggaatgagtgc

SEQ ID NO: 1207 - DNA, 2218 bp, Homo sapiens
  source 1..2218: mol_type = unassigned DNA
ggacgtggcctatgacctctggcgagaggagaacggctgtgagtgcaccaaggccgtgaactttgccatgcatgaacttcagctcatccgggtggagaagcagtaccttcaccacaacctcgaccacctggtcgaggagctcttccttggtgacattcacactgatgccacccagaggatgttctaccggccctccagttaccagccccctctgcagaatgccaagtgtgcagcggagtcttcaggaagttttcagatccttccccaggacagctctgagaaggaacaaaatggactcagccattggtgtctttccagacccgggcaccagaaagactgggcactgtgtgcccacgcgggcccagccacagcaggttgtccgagctgtctgtggccgccagcggagacaggaagaaaggctgggagaacgtcttcaaagaccgtacacgcctgcccaggagaggctggaacctcctcctttgaactcttctacttccctaattgctggtccatagagaccaagctgaaaattagtttaaatgctaaattgagtttcaaaccacgagcctcagcccctctagaaacaggacaccgtgtaaaaatagaaactttaagtcaacttgtttttctaagctttatacagctttgctgtgaggtccagagtcctttggcaaataagtgacgtttgaagagattcaggtgtgctgggagggttcattcaggatggaactggctactcttcattataaaaaagtcaagacagcgtaaagtaaccctgaaagaagatgctttgcctgaatcaagtttagcgtcagagcagccataatcctctgccgagattcttcagaactatgcagttggaggggtagaagccaggctcattctttcagggatggaatcaaatggtaattaaaagcaaatgattgccaaggtcgttagagatgccagagcctcaggatcagactcgtaagcaaatggaattggtctttctccaaaatcctgcactgatttaaccacaggatcgtaaatcaaaggggctgtctgaaaaccagacagccttccccaggctgtgcatctgaaatactcgatcccagcacatgtacagcaggggagctacacacgggagggagaaaagcaccgggctttgggagtacctgagaactgcagaaaaagagcatgctgtgctttctctctcaaattctttaggagccgctaggctggagccagcatatgtttttgaggtagcttgcctctcagaggctttttagaggatgtgtgacctgtgcagcttcctgatgtcagtgacaccatggggatgttgagtcaggtggtcttggagcctggacttttcagcctagctgcaggagccagcatggagggacgtctcctgagcatgtgcttggtgtggctcctgggtgggtgggcggctgcgtctctggggtatagaaggagccaggtgcttgtggaagaattccataccacttttctttctgctagtgtggatttgcagaggtgatgggagatggacgaggtggtggacaaccagaagttcaagaagtcatgacctaagacagtttcaagaactagtcttacaggaaggagaaccctagaagaaaactgtgactgctccctggagccaggtgtttcctataaggcagcaaatgttgcacaattctatgaaaaaacagagctggcaattgggataggttgagggggtcttgaccctgaaggggttgcttttgtggaccttttatctgggccgaggtgtgcagtgtcacaatcactgggctacaaggctgctgatagacacttctattgcagaaacagctcattatatttcttgactccagagtatttcagcagataaacaggcatgcaaggttgctttatttaaggagttaggggaccaggaaatatttgttgtcagggacaatgcaagtggtaaatattttatcccttaaaaggcaagaaagctcagaggacatgaggaaaccctgcaaaagcaggaaattggccatttaaaaagtacgcatgaggtccctactccagggagtgtttgctgagccccaggggagaaaggaagaggatgggccagccaggagtgcccagtggatttacagcagatttaataagtctactttaattatttaaatgaatcaaaatgcataggagtggaagaaagaaacaagtaaaaagaaataaaaattcttttcggaaa

SEQ ID NO: 1208 - DNA, 744 bp, Homo sapiens
  source 1..744: mol_type = unassigned DNA
ccagaggatgttctaccggccctccagttaccagccccctctgcagaatgccaagtggagatggggtttcaccatgttggccaggatggtctccaactcccgacctccagtgatccgcccgccttggcctcccaaagtgctgggattacaggcgtgagccaccgtccgcccggccgccatctttcaaatgatctcagaaccacgaccatgcctgcatcgcctgtcggatcatctatcggtcagacgagcaccaccctcccatcctgcccccaaaggcagacctgaccatcggcctgcacggggagtgggtgagccagcgctgtgaggtgcgccccgaagtcctcttcctcacccgccacttcatcttccatgacaacaacaacacctgggagggccactactaccactactcagacccggtgtgcaagcaccccaccttctccatctacgcccggggccgctacagccgcggcgtcctctcgtccagggtcatgggaggcaccgagttcgtgttcaaagtgaatcacatgaaggtcacccccatggatgcggccacagcctcactgctcaacgtcttcaacgggaatgagtgcggggccgagggctcctggcaggtgggcatccagcaggatgtgacccacaccaatggctgcgtggccctgggcatcaaactacctcacacggagtacgagatcttcaaaatggaacaggatgcccgggggcgctatctgctgttcaacggtc

SEQ ID NO: 1209 - DNA, 3245 bp, Homo sapiens
  source 1..3245: mol_type = unassigned DNA
ctgaacaggaagcagttcgctcgcgcctaggttggcgcgggctgggaggtgttccagccctttaagatgttgcgcgtggtgagctggaacatcaatgggattcggagacccctgcaaggggtggcaaatcaggaacccagcaactgtgccgccgtggccgtggggcgcattttggacgagctggatgcggatatcgtctgtctccaggaaaccaaagtgaccagggatgcactgacagagcccctggctatcgttgagggttataactcctatttcagcttcagccgcaaccgtagcggctattctggtgtagccaccttctgtaaggacaatgctaccccagtggctgctgaagaaggcctgagtggcctgtttgccacccagaatggggatgttggttgctatggaaacatggatgagtttacccaagaggaactccgggctctggatagtgagggcagggccctcctcacacagcataagatccgcacatgggaaggtaaggagaagaccttgaccctaatcaacgtgtactgcccccatgcggaccctgggaggcctgagcggctagtctttaagatgcgcttctatcgtttgctgcaaatccgagcagaagccctcctggcggcaggcagccatgtgatcattctgggtgacctgaatacagcccaccgccccattgaccactgggatgcagtcaacctggaatgctttgaagaggacccagggcgcaagtggatggacagcttgctcagtaacttggggtgccagtctgcctctcatgtagggcccttcatcgatagctaccgctgcttccaaccaaagcaggagggggccttcacctgctggtcagcagtcactggcgcccgccatctcaactatggctcccggcttgactatgtgctgggggacaggaccctggtcatagacacctttcaggcctctttcctgctgcctgaggtgatgggctctgaccactgccctgtgggtgcagtcttgagtgtgtcctctgtgcctgcaaaacagtgcccacctctgtgcacccgcttcctccctgagtttgcaggcacccagctcaagatccttcgcttcctagttcctctcgaacaaagtcctgtgttggagcagtcgacgctgcagcacaacaatcaaacccgggtacagacatgccaaaacaaagcccaagtgcgctcaaccaggcctcagcccagtcaggttggctctagcagaggccagaaaaacctgaagagctactttcagccctcccctagctgtccccaagcctctcctgacatagagctgcctagcctaccactgatgagcgccctcatgaccccgaagactccagaagagaaggcagtggccaaagtggtgaaggggcaggccaagacttcagaagccaaagatgagaaggagttacggacctcattctggaagtctgtgctggcggggcccttgcgcacacccctctgtgggggccacagggagccatgtgtgatgcgtactgtgaagaagccaggacccaacttgggccgccgcttctacatgtgtgccaggccccggggtcctcccactgacccctcctcccggtgcaacttcttcctctggagcaggcccagctgaaccaatggaggcctggggacatctggcatggtcacccctgcacatgatctgaggccagctccccttccctgagctgcctcctgcttctccctcaaagtctcctacccttctcttcctcttttaagccctctcttcctcgctttccttcctacctagctccttgttggtgagcttcttgtgccttaatcctgtgacccagccccttacaccactttccaccttcctgtccgaagtacacggacactagctgccccaggaagttgtgtgattttaaatcacttctgtctttgctggaaagtgtatttgtgcataaataaagtctgtgtatttgtttcagggttgcactttggacattgtggaggtactccataaagttgagtcagagaagctatctcaatacttggtttgccggctggctgtagcccaatgatgtaattcccagagaaaggggaggagggaggggggaggagggaatagtgaggcgtgagcagcagtgctcaccataaagggttctctgctcagttgtaggaatttcctgtacggctaaggtgaaatcagcaaggaaggtgggctgtgtagccttaaaccagagctttccagctagtgcgtcccacagctgccacagtgggttacagggttgaaagaaacggtcctcagccctcagagttgccaggcagggcctgggaccacacaagtttcagggacgattgcctccttagcaagtagtatcattagtacccctaagtgtgccatggaaatgtttcctgtatactgtgacctggaaagtgggagcattgctttgaacacagtgcttgctctagccaagcctcttctcacctttgaaaatgggactggtagaccaggcacagtggtgcacgcctgtaatcccagcactttgggaggctgagatgggtggatcacctgaggtcaggagttcgcaaccagcctaacatggtgagaccccgtctctactaaatacaaaaaaattaactgggcgtggtggcgcgtgcctgtaatccaagctacttaggaggctgagacaggagaatagcttgtacctgggaggcggaggttgcagtgggctgagatcatgcattgcactccagcctgggcaacaagagtgaaattcagtctccaaaaaaaaaaaaagaaaagaaaaagaatgggactggtaaatcctgttctgtgggatgccgtgggagggagagaggataatggattgaggaagacatccatatccccttatggaaaatacctctttggttttggggaaccactcctttctagggaatttggttagggctgactcatttcctggcttcaggggctaccctgggcccagatttccagggcccggattaccagtgaagcgtcaatccctggatttttattgaaaccattggagaagagccatctcaaataaatctgccaagtatcctagctctttgcaactcactgtgtagtttttgggcatttccttcctctttctcattctgtttccctgttggtaaaatggaatggtgaccaacaagtgacctatggttacctcatagatctgccacttgtctgagggagtcagaatgcacttgtctgttccctgtccaataaaaggcttcacatgc

SEQ ID NO: 1210 - DNA, 728 bp, Homo sapiens
  source 1..728: mol_type = unassigned DNA
gcgggctgggaggtgttccagccctttaagatgttgcgcgtggtgagctggaacatcaatgggattcggagacccctgcaaggggtggcaaatcaggaacccagcaactgtgccgccgtggccgtggggcgcattttggacgagctggatgcggatatcgtctgtctccaggaaaccaaagtgaccagggatgcactgacagagcccctggctatcgttgagggttataactcctatttcagcttcagccgcaaccgtagcggctattctgcacatgggaaggtaaggagaagaccttgaccctaatcaacgtgtactgcccccatgcggaccctgggaggcctgagcggctagtctttaagatgcgcttctatcgtttgctgcaaatccgagcagaagccctcctggcggcaggcagccatgtgatcattctgggtgacctgaatacagcccaccgccccattgaccactgggatgcagtcaacctggaatgctttgaagaggacccagggcgcaagtggatggacagcttgctcagtaacttggggtgccagtctgcctctcatgtagggcccttcatcgatagctaccgctgcttccaaccaaagcaggagggggccttcacctgctggtcagcagtcactggcgcccgccatctcaactatggctcccggcttgactatgtgctgggggacaggaccctggtcatagacacctttcaggcctct

SEQ ID NO: 1211 - DNA, 758 bp, Homo sapiens
  source 1..758: mol_type = unassigned DNA
agtcctgctaattccctgaatcaggccactgccatctcatgcctgcgttgcactgaggacctccagtctggaagctcattttccatatctttacaaagcagatctatcactctgaactgttgtctcgacccgagttttgatagagctttcttctggttggtgtctctactgatttcgtcccttgtttggttcatggcaagagtcattattgacaacaaagatggaccaacacagaaatatctgctgatctttggagcgtttgtctctgtctatatccaagaaatgttccgatttgcatattataaactcttaaaaaaagccagtgaaggtttgaagagtataaacccaggtgagacagcaccctctatgcgactgctggcctatgtttctggcttgggctttggaatcatgagtggagtattttcctttgtgaataccctatctgactccttggggccaggcacagtgggcattcatggagattctcctcaattcttcctttattcagctttcatgacgctggtcattatcttgctgcatgtattctggggcattgtattttttgatggctgtgagaagaaaaagtggggcatcctccttatcgttctcctgacccacctgctggtgtcagcccagaccttcataagttcttattatggaataaacctggcgtcagcatttataatcctggtgctcatgggcacctgggcattcttagctgcgggaggcagctgccgaagcctgaaactctgcctgct

SEQ ID NO: 1212 - DNA, 456 bp, Homo sapiens
  source 1..456: mol_type = unassigned DNA
tgaatcaggccactgccatctcatgcctgcgttgcactgaggacctccagtctggaagctcattttccatatctttacaaagcagatctatcactctgaactgttgtctcgacccgagttttgataggtattgtgctgggatctgaccattcaaaatacaatcactggaatctgaagaagtattctgtgggagtgaatggaaatatatatgacttttaaatgggcaaagatattagtgaacttctaggtgctgaggaaacaacaaagagcaaagcaaagtccctgtcccccaggagttcgcgttttaacggggaagaaaaataagcaagtgaaatggacgactgtgagaagacggagcagggagatgttactattgcttgtagggtggtcacagaatgcctgcaaaaacaacccttttgaagaattgggaaaaaaataaaaaccatttggctgaaa

SEQ ID NO: 1213 - DNA, 4189 bp, Homo sapiens
  source 1..4189: mol_type = unassigned DNA
accgaaccccgcccgcgccgggagcatctcgcgtccccaacgggcccccgggtcggtttccgcggtggccatgactgcggccgtgttcttcggctgcgccttcattgccttcgggcctgcgctcgccctttatgtcttcaccatcgccaccgagccgttgcgtatcatcttcctcatcgccggagctttcttctggttggtgtctctactgatttcgtcccttgtttggttcatggcaagagtcattattgacaacaaagatggaccaacacagaaatatctgctgatctttggagcgtttgtctctgtctatatccaagaaatgttccgatttgcatattataaactcttaaaaaaagccagtgaaggtttgaagagtataaacccaggtgagacagcaccctctatgcgactgctggcctatgtttctggcttgggctttggaatcatgagtggagtattttcctttgtgaataccctatctgactccttggggccaggcacagtgggcattcatggagattctcctcaattcttcctttattcagctttcatgacgctggtcattatcttgctgcatgtattctggggcattgtattttttgatggctgtgagaagaaaaagtggggcatcctccttatcgttctcctgacccacctgctggtgtcagcccagaccttcataagttcttattatggaataaacctggcgtcagcatttataatcctggtgctcatgggcacctgggcattcttagctgcgggaggcagctgccgaagcctgaaactctgcctgctctgccaagacaagaactttcttctttacaaccagcgctccagataacctcagggaaccagcacttcccaaaccgcagactacatctttagaggaagcacaactgtgcctttttctgaaaatccctttttctggtggaattgagaaagaaataaaactatgcagatatgcgttccattcacttggctttcacacaactgctctccgaaaggggtgctcagtggtgtgcgtcctggctgcacgagaatcacctgggacagtgtaaagccgactgattctgggctccaccttccagagctaattggcctgggcacgtggtgagttttaaaagcttcccaggtgattctgatgtgcagccatgttgagacccactggtttggtatccaaataggagcttcctgagaacaccttaagtggatgagaatctggtctttagctgtctcctaactcaactcgtgctgagcaagtaagtatctgaatgtcaaatcctggttatcttttatcttcctaagttctgaagtcacaaaaggctaaagggctatcacccctgctcactgtttgcgtgtacttcaccatcttaggagaacacggtaggttgggcttctaaatgcaataataaattacgctgactgtggtaacttagccaaagtaagatactgattaagccgtatttttctgaagtgcttccattccaggttttgctttctgaggcattacattgtttttgagtatagattacattttattaactaaaaatgattgttttgtgacttccttgggaaggtattttaaaatcaggaatttttatgcaatgtctataagcctgtttaaagctttccatgggctctgccccaaggccgttggctgcagcgttcaccatctgagtgccagttgctggactagttgaggtgaagtgcattgttttctctctgagcagctgtgcggggagctgagtgatgtgccctgggacaggcttcactggagctggtggaagtataaccagaagcacaaggaaatgagccaaaagggtgtcattgacacttttcatttgctcctgtgatactaacaacactttcacccaaatggcttaatgtaatattggaaatagatcttaaactgccaaatctcacactattgcataatccatatgctctttagatctagtcagtgtctctgggttttggtagcagatacagcgttccctttacaggaatacccaaggtgttctttcagcttccagacaggtcctttgatttcctttataaagggaaaattctggcaaatcgtgcctttactattagaaattgttcccagttgatgtcttttggggagctggtggcatgaaatgcaaatgacctatacattaaagtgatgtctcagtgaataccatacatgcagtagaacattcagaagagaggagcagcaatcctgaggggctgggggagtgacagtggcaggacggatgggcgggtttgacagattgtggtgggaagaagaatgatcatgtttaaagctaacatagccagtgttttgggctagccacacatcattccagagaccaaaaccttactcatgaactagacctttatcgatatcagtgaacccccatgtttaaaatattagaatgtttagagataaaatagagataatagagataaaagaagaggagggcttctatcaatgctgtaaacagtctgataagcgactgtggttattcccctaaagtttacttcagcactaacactagtgcttccgctggagtttgcagttttccagctttatacaggattttcctttgactggaagagtcaaggatatagagactcaacagtgacatttattgtacaacatcaaggggaataggatactcatcaaactgggattattcttatcaaaacatggtcttctttgaataagaaaaatacatagttggttattatggacttaaaactgtgttaaatggatattctgataaaatatttgctgctctgtagagtgtggaaagtctgagaatattagctttactcatcttgagctttgaggatgttctctgtacgccgatggtttcatattaactaaaaaagctgggtattgtaaaatctcatttataaaaactcagatgagaagaaaattttctttgatggtgagactgttgtcttagttcaggaaattatttaataatcctttgttacctgtgaatgaaggaactttgtaattctgatttatcgtaaaacatgagcctttccagagtcagcttagacactgttgtcgcaaatagccatgctttgccttatgccaaggaggcccagagggagggcctagtcttcctctgttgctgtacatatattgaaatgcttttttttttttattttgcatttgttatctataatgagctttctgagccctgatattatgtgagacaaacaggagttattgatgttatacactcccttccattcaggattttctgcttggagggaaatatgttgaccttagagaattgtgaatattgttgcaattcttgaatatattaccatgtgaataatagagactgtgttgctctctagtataagctatatttatttttgattcatttgaattactagttataactggagaaattttgttacctctatcctggcttgcctgactggctgtataatagcagcagcctcttttagagcatcttaatgaaaacatggatgaaaggaattaatgatgatatctgcagactgcgtagaaaatggcttttgttcccagcgttaacattttcttctcaatcacatttcaatgtttgtggagagtggcagattcacaccagaaacactaggtgttcatatccatagcatggatgcagaataagcagttgggagagaagcttcttcctacctggtactcctcccattcacctcagcccagccccagacaggcgttagcattcagtgtgggccctcaggcagccctgaagcctggctgggtcatcagatgggggcagcctgtgacgggcaccagcggcctgattccagggaagagttcctggagggtgttggctgtttttgttagctcagtttttttctgggctccaccattcctaactccaggtagacaagatagatgtcacacacaacaattttaaagtattttgcttagtgcattttgtttatgattgcagtgtttgtttcttatttaataggctttttacttcattctattaaattttagtgtttagaagaggcgggtactgtcactgtgtaaaatatgtaatattttatatgttataccatgtcatatatacttgcaatatcagaccttgcattcaatatacaatgcaattgactctttgcagacctgcatttttcagtgaacaataaaaagattgtctggcactcctca

SEQ ID NO: 1214 - DNA, 685 bp, Homo sapiens
  source 1..685: mol_type = unassigned DNA
tttccgcggtggccatgactgcggccgtgttcttcggctgcgccttcattgccttcgggcctgcgctcgccctttatgtcttcaccatcgccaccgagccgttgcgtatcatcttcctcatcgccggagctttcttctggttggtgtctctactgatttcgtcccttgtttggttcatggcaagagtcattattgacaacaaagatggaccaacacagaaatatctgctgatctttggagcgtttgtctctgtctatatccaagaaatgttccgatttgcatattataaactcttaaaaaaagccagtgaaggtttgaagagtataaacccaggtgagacagcaccctctatgcgactgctggcctatgctttcatgacgctggtcattatcttgctgcatgtattctggggcattgtattttttgatggctgtgagaagaaaaagtggggcatcctccttatcgttctcctgacccacctgctggtgtcagcccagaccttcataagttcttattatggaataaacctggcgtcagcatttataatcctggtgctcatgggcacctgggcattcttagctgcgggaggcagctgccgaagcctgaaactctgcctgctctgccaagacaagaactttcttctttacaaccagcgctccagataacctcagggaaccagcacttc

SEQ ID NO: 1215 - DNA, 872 bp, Homo sapiens
  source 1..872: mol_type = unassigned DNA
tttccgcggtggccatgactgcggccgtgttcttcggctgcgccttcattgccttcgggcctgcgctcgccctttatgtcttcaccatcgccaccgagccgttgcgtatcatcttcctcatcgccggccgaagggtggaaacctgtaaaaacaccgaagcacctgactgtgcgtctccttctgggagcttgagctttcttctggttggtgtctctactgatttcgtcccttgtttggttcatggcaagagtcattattgacaacaaagatggaccaacacagaaatatctgctgatctttggagcgtttgtctctgtctatatccaagaaatgttccgatttgcatattataaactcttaaaaaaagccagtgaaggtttgaagagtataaacccaggtgagacagcaccctctatgcgactgctggcctatgtttctggcttgggctttggaatcatgagtggagtattttcctttgtgaataccctatctgactccttggggccaggcacagtgggcattcatggagattctcctcaattcttcctttattcagctttcatgacgctggtcattatcttgctgcatgtattctggggcattgtattttttgatggctgtgagaagaaaaagtggggcatcctccttatcgttctcctgacccacctgctggtgtcagcccagaccttcataagttcttattatggaataaacctggcgtcagcatttataatcctggtgctcatgggcacctgggcattcttagctgcgggaggcagctgccgaagcctgaaactctgcctgctctgccaagacaagaactttcttctttacaaccagcgctccagataacctcagggaaccagcacttc

SEQ ID NO: 1216 - DNA, 672 bp, Homo sapiens
  source 1..672: mol_type = unassigned DNA
gtggccatgactgcggccgtgttcttcggctgcgccttcattgccttcgggcctgcgctcgccctttatgtcttcaccatcgccaccgagccgttgcgtatcatcttcctcatcgccggagctttcttctggttggtgtctctactgatttcgtcccttgtttggttcatggcaagagtcattattgacaacaaagatggaccaacacagaaatatctgctgatctttggagcgtttgtctctgtctatatccaagaaatgttccgatttgcatattataaactcttaaaaaaagccagtgaaggtttgaagagtataaacccaggtgagacagcaccctctatgcgactgctggcctatgtttctggcttgggctttggaatcatgagtggagtattttcctttgtgaataccctatctgactccttggggccaggcacagtgggcattcatggagattctcctcaattcttcctttattcagaccttcataagttcttattatggaataaacctggcgtcagcatttataatcctggtgctcatgggcacctgggcattcttagctgcgggaggcagctgccgaagcctgaaactctgcctgctctgccaagacaagaactttcttctttacaaccagcgctccagataacctcagggaaccagcacttc

SEQ ID NO: 1217 - DNA, 1455 bp, Homo sapiens
  source 1..1455: mol_type = unassigned DNA
ctttatgtcttcaccatcgccaccgagccgttgcgtatcatcttcctcatcgccgggtgaggcggtcgcgtcgggaaacccggacgccggggctcccctcccccgctggggttacccgcgaccctcggcgcccccaccgcgcggctcgaccttgttgcgtttcagacgggaggagggttgagagggggagagcggagatccggctccccaaaggcgcctcgccctcttaggaagaagcgcacactggggagctttcttctggttggtgtctctactgatttcgtcccttgtttggttcatggcaagagtcattattgacaacaaagatggaccaacacagaaatatctgctgatctttggagcgtttgtctctgtctatatccaagaaatgttccgatttgcatattataaactcttaaaaaaagccagtgaaggtttgaagagtataaacccaggtgagacagcaccctctatgcgactgctggcctatgtttctggcttgggctttggaatcatgagtggagtattttcctttgtgaataccctatctgactccttggggccaggcacagtgggcattcatggagattctcctcaattcttcctttattcagctttcatgacgctggtcattatcttgctgcatgtattctggggcattgtattttttgatggctgtgagaagaaaaagtggggcatcctccttatcgttctcctgacccacctgctggtgtcagcccagaccttcataagttcttattatggaataaacctggcgtcagcatttataatcctggtgctcatgggcacctgggcattcttagctgcgggaggcagctgccgaagcctgaaactctgcctgctctgccaagacaagaactttcttctttacaaccagcgctccagataacctcagggaaccagcacttcccaaaccgcagactacatctttagaggaagcacaactgtgcctttttctgaaaatccctttttctggtggaattgagaaagaaataaaactatgcagatatgcgttccattcacttggctttcacacaactgctctccgaaaggggtgctcagtggtgtgcgtcctggctgcacgagaatcacctgggacagtgtaaagccgactgattctgggctccaccttccagagctaattggcctgggcacgtggtgagttttaaaagcttcccaggtgattctgatgtgcagccatgttgagacccactggtttggtatccaaataggagcttcctgagaacaccttaagtggatgagaatctggtctttagctgtctcctaactcaactcgtgctgagcaagtaagtatctgaatgtcaaatcctggttatcttttatcttcctaagttctgaagtcacaaaaggctaaagggctatcacccctgctcactgtttgcgtgtacttcaccatcttaggagaacacggta

SEQ ID NO: 1218 - DNA, 515 bp, Homo sapiens
  source 1..515: mol_type = unassigned DNA
cccttttctcccctttttcattactctgctgcattctgccattcatttcctttcctcttcccgcttccctctctgattcatcatttagccaagcacatgcctctccagagccagctgtccactgcttcaggaagaacataagcaccctttcccctccaacacactttgtattaactagtccttggaaatttgacttgaaatcttggcaggaaaagagttaacagtgtttttcttcctgtttagtttctggcttgggctttggaatcatgagtggagtattttcctttgtgaataccctatctgactccttggggccaggcacagtgggcattcatggagattctcctcaattcttcctttattcagctttcatgacgctggtcattatcttgctgcatgtattctggggcattgtattttttgatggctgtgagaagaaaaagtggggcatcctccttatcgttctcctgacccacctgctggtgtcagcccaggtgagtgttgccgccatgctc

SEQ ID NO: 1219 - DNA, 376 bp, Homo sapiens
  source 1..376: mol_type = unassigned DNA
ctgccattcatttcctttcctcttcccgcttccctctctgattcatcatttagccaagcacatgcctctccagagccagctgtccactgcttcaggaagaacataagcaccctttcccctccaacacactttgtattaactagtccttggaaatttgacttgaaatcttggcagctgccgaagcctgaaactctgcctgctctgccaagacaagaactttcttctttacaaccagcgctccagataacctcagggaaccagcacttcccaaaccgcagactacatctttagaggaagcacaactgtgcctttttctgaaaatccctttttctggtggaattgagaaagaaataaaactatgcagatatgcgttcca

SEQ ID NO: 1220 - DNA, 731 bp, Homo sapiens
  source 1..731: mol_type = unassigned DNA
ctgtaataagtctcatggtggctggaatgttcttttctaccctttgactttgagctcagtcatgtggcttgaattggccaattagtggttatgatgtaagttagaggcttaaaaagtatttgcatgattggaccttccttcttggactctggtgccatgagaagaagataccttgggaagttaatggccacttagcctggacccttgaatgaatatacccagagccacacagagcccaccccaggagcttgcagcagagttttccagctgatcccagcctttatcagcaatgcacagtcagcctttagacctctttcatgacgctggtcattatcttgctgcatgtattctggggcattgtattttttgatggctgtgagaagaaaaagtggggcatcctccttatcgttctcctgacccacctgctggtgtcagcccagaccttcataagttcttattatggaataaacctggcgtcagcatttataatcctggtgctcatgggcacctgggcattcttagctgcgggaggcagctgccgaagcctgaaactctgcctgctctgccaagacaagaactttcttctttacaaccagcgctccagataacctcagggaaccagcacttcccaaaccgcagactacatctttagaggaagcacaactgtgcctttttctgaaaatccctttttctggtggaattgagaaagaaataaaactatgcagatatgc

SEQ ID NO: 1221 - DNA, 1726 bp, Homo sapiens
  source 1..1726: mol_type = unassigned DNA
ggggtaaggcaagagagggtggaggaaattctgcaggagacaggcttcctccagggtctggagaacccagaggcagctcctcctgagtgctgggaaggactctgggcatcttcagcccttcttactctctgaggctcaagccagaaattcaggctgcttgcagagtgggtgacagagccacggagctggtgtccctgggaccctctgcccgtcttctctccactccccagcatggaggaaggtggtgattttgacaactactatggggcagacaaccagtctgagtgtgagtacacagactggaaatcctcgggggccctcatccctgccatctacatgttggtcttcctcctgggcaccacgggcaacggtctggtgctctggaccgtgtttcggagcagccgggagaagaggcgctcagctgatatcttcattgctagcctggcggtggctgacctgaccttcgtggtgacgctgcccctgtgggctacctacacgtaccgggactatgactggccctttgggaccttcttctgcaagctcagcagctacctcatcttcgtcaacatgtacgccagcgtcttctgcctcaccggcctcagcttcgaccgctacctggccatcgtgaggccagtggccaatgctcggctgaggctgcgggtcagcggggccgtggccacggcagttctttgggtgctggccgccctcctggccatgcctgtcatggtgttacgcaccaccggggacttggagaacaccactaaggtgcagtgctacatggactactccatggtggccactgtgagctcagagtgggcctgggaggtgggccttggggtctcgtccaccaccgtgggctttgtggtgcccttcaccatcatgctgacctgttacttcttcatcgcccaaaccatcgctggccacttccgcaaggaacgcatcgagggcctgcggaagcggcgccggctgctcagcatcatcgtggtgctggtggtgacctttgccctgtgctggatgccctaccacctggtgaagacgctgtacatgctgggcagcctgctgcactggccctgtgactttgacctcttcctcatgaacatcttcccctactgcacctgcatcagctacgtcaacagctgcctcaaccccttcctctatgcctttttcgacccccgcttccgccaggcctgcacctccatgctctgctgtggccagagcaggtgcgcaggcacctcccacagcagcagtggggagaagtcagccagctactcttcggggcacagccaggggcccggccccaacatgggcaagggtggagaacagatgcacgagaaatccatcccctacagccaggagacccttgtggttgactagggctgggagcagagagaagcctggcgccctcggccctccccggcctttgcccttgctttctgaaaatcagagtcacctcctctgcccagagctgtcctcaaagcatccagtgaacactggaagaggcttctagaagggaagaaattgtccctctgaggccgccgtgggtgacctgcagagacttcctgcctggaactcatctgtgaactgggacagaagcagaggaggctgcctgctgtgatacccccttacctcccccagtgccttcttcagaatatctgcactgtcttctgatcctgttagtcactgtggttcatcaaataaaactgtttgtgcaactgttgtgtccaaa

SEQ ID NO: 1222 - DNA, 3609 bp, Homo sapiens
  source 1..3609: mol_type = unassigned DNA
aggagacaggcttcctccagggtctggagaacccagaggcagctcctcctgagtgctgggaaggactctgggcatcttcagcccttcttactctctgaggctcaagccagaaattcaggctgcttgcagagtgggtgacagagccacggagctggtgtccctgggaccctctgcccgtcttctctccactccccagcatggaggaaggtggtgattttgacaactactatggggcagacaaccagtctgagtgtgagtacacagactggaaatcctcgggggccctcatccctgccatctacatgttggtcttcctcctgggcaccacgggcaacggtctggtgctctggaccgtgtttcggagcagccgggagaagaggcgctcagctgatatcttcattgctagcctggcggtggctgacctgaccttcgtggtgacgctgcccctgtgggctacctacacgtaccgggactatgactggccctttgggaccttcttctgcaagctcagcagctacctcatcttcgtcaacatgtacgccagcgtcttctgcctcaccggcctcagcttcgaccgctacctggccatcgtgaggccagtggccaatgctcggctgaggctgcgggtcagcggggccgtggccacggcagttctttgggtgctggccgccctcctggccatgcctgtcatggtgttacgcaccaccggggacttggagaacaccactaaggtgcagtgctacatggactactccatggtggccactgtgagctcagagtgggcctgggaggtgggccttggggtctcgtccaccaccgtgggctttgtggtgcccttcaccatcatgctgacctgttacttcttcatcgcccaaaccatcgctggccacttccgcaaggaacgcatcgagggcctgcggaagcggcgccggctgctcagcatcatcgtggtgctggtggtgacctttgccctgtgctggatgccctaccacctggtgaagacgctgtacatgctgggcagcctgctgcactggccctgtgactttgacctcttcctcatgaacatcttcccctactgcacctgcatcagctacgtcaacagctgcctcaaccccttcctctatgcctttttcgacccccgcttccgccaggcctgcacctccatgctctgctgtggccagagcaggtgcgcaggcacctcccacagcagcagtggggagaagtcagccagctactcttcggggcacagccaggggcccggccccaacatgggcaagggtggagaacagatgcacgagaaatccatcccctacagccaggagacccttgtggttgactagggctgggagcagagagaagcctggcgccctcggccctccccggcctttgcccttgctttctgaaaatcaggtagtgtggctactccttgtcctatgcacatcctttaactgtcccctgattctgccccgccctgtcctcctctactgctttattctttctcagaggtttgtggtttaggggaaagagactgggctctacagacctgaccctgcacaagccatttaatctcactcagcctcagtttctccattggtatgaaatgggggaaagtcatattgatcctaaaatgttgaagcctgagtctggacgcagtaaaagcttgtttccctctgctgctttcttagatctgcaatcgtctttcctcccttctttccttgtagtttttcccccaccactctctgcagctgccgctccttatccctgccttctggcaccaatcccctcctacagctcgtccccctccctccatccatccttctcccctgtctactttcttgttctgaagggctactaagggttaaggatcccaaagcttgcagagactgaccctgtttaagctttctatcctgttttctgagtgtgaggcagggaatgggctggggccgggggtgggctgtgtgtcagcagataattagtgctccagcccttagatctgggagctccagagcttgccctaaaattggatcacttccctgtcattttgggcattggggctagtgtgattcctgcagttcccccatggcaccatgacactgactagatatgctttctccaaattgtccgcagaccctttcatccttcctctattttctatgagaattggaaggcagcagggctgatgaatggatgtactccttggtttcattatgtgagtggggagttgggaagggcaactagagagagaggatggaggggtgtctgcatttagtccagacactgcttggctcgctccccgagtcctcctgtttctgacttcctgcataactgtgagctgaagggtttcctcatctccccatcttaccccatcatactgatttctttcttgggcactggtgctacttggtgccaagaatcatgttgtttgggatggagatgcctgcctcttgtctgtgtgtgttgtacttatatgtctatatggatgagcctggcatgaacagcagtgtgcctgggtcatttggacaaacctcctcccaccccccaatccactgcaactctgctgttcacacattacccttggcagggggtggtggggggcagggacacactgaggcaatgaaaaatgtagaataaaaatgagtccaccccctactggatttgggggctccaacggctggtccgtgctttaggagcgaagttaatgtttgcaccaggcttcctgtagggagatccctccccaaagcagctggcgccaaggcttgggggcgtcctactgagctgggttcctgctccttcttgggctccatgaaggaagtaagaggctagttgagagcctcccttggcccctttccggtgcctccccgcctggcttcaaatttatgagcattgccctcatcgtcctttcttgttccagggtcagtggccctcttcctaaggaggcctcctgcttgccatgggccaaaaggcacggggtgggttttttctctccctaccctcaggattggacctcttggcttctgctggattggggatctgggaatagggactggagcaagtgtgcagatagcatgatgtctacactgccagagagaccgtgaggatgaaattaatagtggggcctttgtgagctagaggctgggagtgtctattccgggttttgttcttggaggactatgaaagtgaaggacaagacatgagcgatggagataagaaaagcccagcttgatgtgaatggacatcttgaccctccctggaatgacgccagctctgggggcagagggaggaggagaggggaaggggctcctcacagcctagtctccccatcttaagatagcatctttcacagagtcacctcctctgcccagagctgtcctcaaagcatccagtgaacactggaagaggcttctagaagggaagaaattgtccctctgaggccgccgtgggtgacctgcagagacttcctgcctggaactcatctgtgaactgggacagaagcagaggaggctgcctgctgtgatacccccttacctcccccagtgccttcttcagaatatctgcactgtcttctgatcctgttagtcactgtggttcatcaaataaaactgtttgtgc

SEQ ID NO: 1223 - DNA, 1789 bp, Homo sapiens
  source 1..1789: mol_type = unassigned DNA
ggaggtgggaggagggagtgacgagtcaaggaggagacagggacgcaggagggtgcaaggaagtgtcttaactgagacgggggtaaggcaagagagggtggaggaaattctgcaggagacaggcttcctccagggtctggagaacccagaggcagctcctcctgagtgctgggaaggactctgggcatcttcagcccttcttactctctgaggctcaagccagaaattcaggctgcttgcagagtgggtgacagagccacggagctggtgtccctgggaccctctgcccgtcttctctccactccccagcatggaggaaggtggtgattttgacaactactatggggcagacaaccagtctgagtgtgagtacacagactggaaatcctcgggggccctcatccctgccatctacatgttggtcttcctcctgggcaccacgggcaacggtctggtgctctggaccgtgtttcggagcagccgggagaagaggcgctcagctgatatcttcattgctagcctggcggtggctgacctgaccttcgtggtgacgctgcccctgtgggctacctacacgtaccgggactatgactggccctttgggaccttcttctgcaagctcagcagctacctcatcttcgtcaacatgtacgccagcgtcttctgcctcaccggcctcagcttcgaccgctacctggccatcgtgaggccagtggccaatgctcggctgaggctgcgggtcagcggggccgtggccacggcagttctttgggtgctggccgccctcctggccatgcctgtcatggtgttacgcaccaccggggacttggagaacaccactaaggtgcagtgctacatggactactccatggtggccactgtgagctcagagtgggcctgggaggtgggccttggggtctcgtccaccaccgtgggctttgtggtgcccttcaccatcatgctgacctgttacttcttcatcgcccaaaccatcgctggccacttccgcaaggaacgcatcgagggcctgcggaagcggcgccggctgctcagcatcatcgtggtgctggtggtgacctttgccctgtgctggatgccctaccacctggtgaagacgctgtacatgctgggcagcctgctgcactggccctgtgactttgacctcttcctcatgaacatcttcccctactgcacctgcatcagctacgtcaacagctgcctcaaccccttcctctatgcctttttcgacccccgcttccgccaggcctgcacctccatgctctgctgtggccagagcaggtgcgcaggcacctcccacagcagcagtggggagaagtcagccagctactcttcggggcacagccaggggcccggccccaacatgggcaagggtggagaacagatgcacgagaaatccatcccctacagccaggagacccttgtggttgactagggctgggagcagagagaagcctggcgccctcggccctccccggcctttgcccttgctttctgaaaatcagagtcacctcctctgcccagagctgtcctcaaagcatccagtgaacactggaagaggcttctagaagggaagaaattgtccctctgaggccgccgtgggtgacctgcagagacttcctgcctggaactcatctgtgaactgggacagaagcagaggaggctgcctgctgtgatacccccttacctcccccagtgccttcttcagaatatctgcactgtcttctgatcctgttagtcactgtggttcatcaaataaaactgtttgtgc

SEQ ID NO: 1224 - DNA, 2266 bp, Homo sapiens
  source 1..2266: mol_type = unassigned DNA
aatcctgaggtgctgcatccacagtgggcatggtgctggtgcctgcttggatgatccttaaagaaaggtcctgggggctttggttcatggatccttgagctaggagttaaaggtccaggcccctgggacccttgggaagcagagcaagaagagtgaactcctgggtctgaaggagaatgggctgggggcttggtctctggtcctgagagagaaggtgcccagacttctggatctgaaagaggaagggactaggtctcaactgctgccttcttgactggggacattttggaggcctgtattcctgagccctcaacagaggaatgtactaggggatgggggtctctgatgcttgcatccttggaaaaggacaaaactgccccggggtcggcccaggtggctggactatgcgggcgcctaacccttcaccgggacctgcgcaccggccgctgggaaccagacccacagcgctctcgacgctgtctccgggacccgcagcgcgtgctggagtactgcagacagatgtacccggagctgcagattgcacgtgtggagcaggctacgcaggccatccccatggagcgctggtgcgggggttcccggagcggcagctgcgcccacccccaccaccaggttgtgcccttccgctgcctgcctggtgaatttgtgagtgaggccctgctggtgcctgaaggctgccggttcttgcaccaggagcgcatggaccaatgtgagagttcaacccggaggcatcaggaggcacaggaggcctgcagctcccagggcctcatcctgcacggctcgggcatgctcttaccctgtggctcggatcggttccgtggtgtggagtatgtgtgctgtccccctccagggacccccgacccatctgggacagcagttggtgacccctccacccggtcctggcccccggggagcagagtagagggggctgaggacgaggaagaggaggaatccttcccacagccagtagatgattacttcgtggagcctccgcaggctgaagaggaagaggaaacggtcccacccccaagctcccatacacttgcagtggtcggcaaagtcactcccaccccgaggcccacagacggtgtggatatttactttggcatgcctggggaaatcagtgagcacgaggggttcctgagggccaagatggacctggaggagcgtaggatgcgccagattaatgaggtgatgcgtgaatgggccatggcagacaaccagtccaagaacctgcctaaagccgacagacaggccctgaatgagcacttccagtccattctgcagactctggaggagcaggtgtctggtgagcgacagcgcctggtggaaacccacgccacccgcgtcatcgcccttatcaacgaccagcgccgggctgccttggagggcttcctggcagccctgcaggcagatccgcctcaggcggagcgtgtcctgttggccctgcggcgctacctgcgtgcggagcagaaggaacagaggcacacgctgcgccactaccagcatgtggccgccgtggatcccgagaaggcacagcagatgcgcttccaggtgcatacccaccttcaagtgattgaggagagggtgaatcagagcctgggcctgcttgaccagaacccccacctggctcaggagctgcggccccaaatccaggaactcctccactctgaacacctgggtcccagtgaattggaagcccctgcccctgggggcagcagcgaggacaagggtgggctgcagcctccagattccaaggatgacacccccatgacccttccaaaagggtccacagaacaagatgctgcatcccctgagaaagagaagatgaacccgctggaacagtatgagcgaaaggtgaatgcgtctgttccaaggggtttccctttccactcatcggagattcagagggatgagctggcaccagctgggacaggggtgtcccgtgaggctgtgtcgggtctgctgatcatgggagcgggcggaggctccctcatcgtcctctccatgctgctcctgcgcaggaagaagccctacggggctatcagccatggcgtggtggaggtggaccccatgctgaccctggaggagcagcagctccgcgaactgcagcggcacggctatgagaaccccacttaccgcttcctggaggaacgaccctgacccggcccccttcaccccttcagccgagcccagacctcccctcttcctggagccccagaaccccaactcccagcctagggcagca

SEQ ID NO: 1225 - DNA, 2495 bp, Homo sapiens
  source 1..2495: mol_type = unassigned DNA
actctgcgcgaagccgccacgctattgtcctgaccaggaaggcggggccggcgcggggcggggctggcggcgccggcgcagcccgggggcggcgggaggaggaggtggcggcggtggcgctgggagctcctgtcaccgctggggccgggccgggcgggagtgcaggggacgtgagggcgcaagggccgggacatggggcccgccagccccgctgctcgcggtctaagtcgccgcccgggccagccgccgctgccgctgctgctgccactattgctgctgcttctgcgcgcgcagcccgccatcgggagcctggccggtgggagccccggcgcggccgaggccccggggtcggcccaggtggctggactatgcgggcgcctaacccttcaccgggacctgcgcaccggccgctgggaaccagacccacagcgctctcgacgctgtctccgggacccgcagcgcgtgctggagtactgcagacagatgtacccggagctgcagattgcacgtgtggagcaggctacgcaggccatccccatggagcgctggtgcgggggttcccggagcggcagctgcgcccacccccaccaccaggttgtgcccttccgctgcctgcctggtgaatttgtgagtgaggccctgctggtgcctgaaggctgccggttcttgcaccaggagcgcatggaccaatgtgagagttcaacccggaggcatcaggaggcacaggaggcctgcagctcccagggcctcatcctgcacggctcgggcatgctcttaccctgtggctcggatcggttccgtggtgtggagtatgtgtgctgtccccctccagggacccccgacccatctgggacagcagttggtgacccctccacccggtcctggcccccggggagcagagtagagggggctgaggacgaggaagaggaggaatccttcccacagccagtagatgattacttcgtggagcctccgcaggctgaagaggaagaggaaacggtcccacccccaagctcccatacacttgcagtggtcggcaaagtcactcccaccccgaggcccacagacggtgtggatatttactttggcatgcctggggaaatcagtgagcacgaggggttcctgagggccaagatggacctggaggagcgtaggatgcgccagattaatgaggtgatgcgtgaatgggccatggcagacaaccagtccaagaacctgcctaaagccgacagacaggccctgaatgagcacttccagtccattctgcagactctggaggagcaggtgtctggtgagcgacagcgcctggtggaaacccacgccacccgcgtcatcgcccttatcaacgaccagcgccgggctgccttggagggcttcctggcagccctgcaggcagatccgcctcaggcggagcgtgtcctgttggccctgcggcgctacctgcgtgcggagcagaaggaacagaggcacacgctgcgccactaccagcatgtggccgccgtggatcccgagaaggcacagcagatgcgcttccaggtgcatacccaccttcaagtgattgaggagagggtgaatcagagcctgggcctgcttgaccagaacccccacctggctcaggagctgcggccccaaatccaggaactcctccactctgaacacctgggtcccagtgaattggaagcccctgcccctgggggcagcagcgaggacaagggtgggctgcagcctccagattccaaggatgcagacacccccatgacccttccaaaagggtccacagaacaagatgctgcatcccctgagaaagagaagatgaacccgctggaacagtatgagcgaaaggtgaatgcgtctgttccaaggggtttccctttccactcatcggagattcagagggatgagctggcaccagctgggacaggggtgtcccgtgaggctgtgtcgggtctgctgatcatgggagcgggcggaggctccctcatcgtcctctccatgctgctcctgcgcaggaagaagccctacggggctatcagccatggcgtggtggaggtggaccccatgctgaccctggaggagcagcagctccgcgaactgcagcggcacggctatgagaaccccacttaccgcttcctggaggaacgaccctgacccggcccccttcaccccttcagccgagcccagacctcccctcttcctggagccccagaaccccaactcccagcctagggcagcagggagtcttgaagtgatcatttcacacccttttgtgagacggctggaaattcttatttcccctttccaattccaaaattccatccctaagaattcccagatagtcccagcagcctccccacgtggcacctcctcaccttaatttattttttaagtttatttatggctctttaaggtgaccgccaccttggtcctagtgtctattccctggaattcaccctctcatgtttccctactaacatcccaataaagtcctcttccct

SEQ ID NO: 1226 - DNA, 2295 bp, Homo sapiens
  source 1..2295: mol_type = unassigned DNA
gctgggagctcctgtcaccgctggggccgggccgggcgggagtgcaggggacgtgagggcgcaagggccgggacatggggcccgccagccccgctgctcgcggtctaagtcgccgcccgggccagccgccgctgccgctgctgctgccactattgctgctgcttctgcgcgcgcagcccgccatcgggagcctggccggtgggagccccggcgcggccgagacccacagcgctctcgacgctgtctccgggacccgcagcgcgtgctggagtactgcagacagatgtacccggagctgcagattgcacgtgtggagcaggctacgcaggccatccccatggagcgctggtgcgggggttcccggagcggcagctgcgcccacccccaccaccaggttgtgcccttccgctgcctgcctggtgaatttgtgagtgaggccctgctggtgcctgaaggctgccggttcttgcaccaggagcgcatggaccaatgtgagagttcaacccggaggcatcaggaggcacaggaggcctgcagctcccagggcctcatcctgcacggctcgggcatgctcttaccctgtggctcggatcggttccgtggtgtggagtatgtgtgctgtccccctccagggacccccgacccatctgggacagcagttggtgacccctccacccggtcctggcccccggggagcagagtagagggggctgaggacgaggaagaggaggaatccttcccacagccagtagatgattacttcgtggagcctccgcaggctgaagaggaagaggaaacggtcccacccccaagctcccatacacttgcagtggtcggcaaagtcactcccaccccgaggcccacagacggtgtggatatttactttggcatgcctggggaaatcagtgagcacgaggggttcctgagggccaagatggacctggaggagcgtaggatgcgccagattaatgaggtgatgcgtgaatgggccatggcagacaaccagtccaagaacctgcctaaagccgacagacaggccctgaatgagcacttccagtccattctgcagactctggaggagcaggtgtctggtgagcgacagcgcctggtggaaacccacgccacccgcgtcatcgcccttatcaacgaccagcgccgggctgccttggagggcttcctggcagccctgcaggcagatccgcctcaggcggagcgtgtcctgttggccctgcggcgctacctgcgtgcggagcagaaggaacagaggcacacgctgcgccactaccagcatgtggccgccgtggatcccgagaaggcacagcagatgcgcttccaggtgcatacccaccttcaagtgattgaggagagggtgaatcagagcctgggcctgcttgaccagaacccccacctggctcaggagctgcggccccaaatccaggaactcctccactctgaacacctgggtcccagtgaattggaagcccctgcccctgggggcagcagcgaggacaagggtgggctgcagcctccagattccaaggatgcagacacccccatgacccttccaaaagggtccacagaacaagatgctgcatcccctgagaaagagaagatgaacccgctggaacagtatgagcgaaaggtgaatgcgtctgttccaaggggtttccctttccactcatcggagattcagagggatgagctggcaccagctgggacaggggtgtcccgtgaggctgtgtcgggtctgctgatcatgggagcgggcggaggctccctcatcgtcctctccatgctgctcctgcgcaggaagaagccctacggggctatcagccatggcgtggtggaggtggaccccatgctgaccctggaggagcagcagctccgcgaactgcagcggcacggctatgagaaccccacttaccgcttcctggaggaacgaccctgacccggcccccttcaccccttcagccgagcccagacctcccctcttcctggagccccagaaccccaactcccagcctagggcagcagggagtcttgaagtgatcatttcacacccttttgtgagacggctggaaattcttatttcccctttccaattccaaaattccatccctaagaattcccagatagtcccagcagcctccccacgtggcacctcctcaccttaatttattttttaagtttatttatggctctttaaggtgaccgccaccttggtcctagtgtctattccctggaattcaccctctcatgtttccctactaacatcccaataaagtcctcttccct

SEQ ID NO: 1227 - DNA, 2052 bp, Homo sapiens
  source 1..2052: mol_type = unassigned DNA
atagcaacgggagcgctggggcgcccccgccctacgggagctgtttcccagggaacggtgcctccatggaggcggtgtgcggtgcttgggggagggggctggtgctgggggtctcggtcctagggagcaaagaaccaggggaccctcatgccaacgccccccgagccctcactgtcctttccacttccatccaggccccggggtcggcccaggtggctggactatgcgggcgcctaacccttcaccgggacctgcgcaccggccgctgggaaccagacccacagcgctctcgacgctgtctccgggacccgcagcgcgtgctggagtactgcagacagatgtacccggagctgcagattgcacgtgtggagcaggctacgcaggccatccccatggagcgctggtgcgggggttcccggagcggcagctgcgcccacccccaccaccaggttgtgcccttccgctgcctgcctggtgaatttgtgagtgaggccctgctggtgcctgaaggctgccggttcttgcaccaggagcgcatggaccaatgtgagagttcaacccggaggcatcaggaggcacaggaggcctgcagctcccagggcctcatcctgcacggctcgggcatgctcttaccctgtggctcggatcggttccgtggtgtggagtatgtgtgctgtccccctccagggacccccgacccatctgggacagcagttggtgacccctccacccggtcctggcccccggggagcagagtagagggggctgaggacgaggaagaggaggaatccttcccacagccagtagatgattacttcgtggagcctccgcaggctgaagaggaagaggaaacggtcccacccccaagctcccatacacttgcagtggtcggcaaagtcactcccaccccgaggcccacagacggtgtggatatttactttggcatgcctggggaaatcagtgagcacgaggggttcctgagggccaagatggacctggaggagcgtaggatgcgccagattaatgaggtgatgcgtgaatgggccatggcagacaaccagtccaagaacctgcctaaagccgacagacaggccctgaatgagcacttccagtccattctgcagactctggaggagcaggtgtctggtgagcgacagcgcctggtggaaacccacgccacccgcgtcatcgcccttatcaacgaccagcgccgggctgccttggagggcttcctggcagccctgcaggcagatccgcctcaggcggagcgtgtcctgttggccctgcggcgctacctgcgtgcggagcagaaggaacagaggcacacgctgcgccactaccagcatgtggccgccgtggatcccgagaaggcacagcagatgcgcttccaggtgcatacccaccttcaagtgattgaggagagggtgaatcagagcctgggcctgcttgaccagaacccccacctggctcaggagctgcggccccaaatccaggaactcctccactctgaacacctgggtcccagtgaattggaagcccctgcccctgggggcagcagcgaggacaagggtgggctgcagcctccagattccaaggatgacacccccatgacccttccaaaagggtccacagaacaagatgctgcatcccctgagaaagagaagatgaacccgctggaacagtatgagcgaaaggtgaatgcgtctgttccaaggggtttccctttccactcatcggagattcagagggatgagctggcaccagctgggacaggggtgtcccgtgaggctgtgtcgggtctgctgatcatgggagcgggcggaggctccctcatcgtcctctccatgctgctcctgcgcaggaagaagccctacggggctatcagccatggcgtggtggaggtggaccccatgctgaccctggaggagcagcagctccgcgaactgcagcggcacggctatgagaaccccacttaccgcttcctggaggaacgaccctgacccggcccccttcaccccttcagccgagcccagacctcccctcttcctggag

SEQ ID NO: 1228 - DNA, 586 bp, Homo sapiens
  source 1..586: mol_type = unassigned DNA
aaatttataacgggaagggagagttttggagaggcggaatagaggaaaaggcggggcctaaaggaggatgtacccggagctgcagattgcacgtgtggagcaggctacgcaggccatccccatggagcgctggtgcgggggttcccggagcggcagctgcgcccacccccaccaccaggttgtgcccttccgctgcctgcctggtgaatttgtgagtgaggccctgctggtgcctgaaggctgccggttcttgcaccaggagcgcatggaccaatgtgagagttcaacccggaggcatcaggaggcacaggaggcctgcagctcccagggcctcatcctgcacggctcgggcatgctcttaccctgtggctcggatcggttccgtggtgtggagtatgtgtgctgtccccctccagggacccccgacccatctgggacagcagttggtgacccctccacccggtcctggcccccggggagcagagtagagggggctgaggacgaggaagaggaggaatccttcccacagccagtagatgattacttcgtggagcctccgcaggctgaagaggaagaggaaacggtc

SEQ ID NO: 1229 - DNA, 1324 bp, Homo sapiens
  source 1..1324: mol_type = unassigned DNA
ctagggaagcgatgtcctcatgaatactagagccttgaaaacggacctggccgggcgcggtggctcacgcctgtaatcgcagcacttggggaggccgaggcaggcggatcacctgaggtcagaagttcgagaccagcctggccaacacggcgaaactccgtctctactaaaaatacaaaaattagcctggcatggtggtgcgtgcctgtaatcccagctactcaggaggctgagacaggagaatcgcttgaacctgggaggaggaggttgcagtgagccgagattgtaccattccactccagcctgggcgacaagagcaaatctccgtctcaaagaaagaaagaaagagggagaaagaaagagaaaagggacctgactactggagaggggtggctggcaggggcggggcagtgggctgattgcccccatctgatccccccagatgtacccggagctgcagattgcacgtgtggagcaggctacgcaggccatccccatggagcgctggtgcgggggttcccggagcggcagctgcgcccacccccaccaccaggttgtgcccttccgctgcctgcctggtgaatttgtgagtgaggccctgctggtgcctgaaggctgccggttcttgcaccaggagcgcatggaccaatgtgagagttcaacccggaggcatcaggaggcacaggaggcctgcagctcccagggcctcatcctgcacggctcgggcatgctcttaccctgtggctcggatcggttccgtggtgtggagtatgtgtgctgtccccctccagggacccccgacccatctgggacagcagttggtgacccctccacccggtcctggcccccggggagcagagtagagggggctgaggacgaggaagaggaggaatccttcccacagccagtagatgattacttcgtggagcctccgcaggctgaagaggaagaggaaacggtcccacccccaagctcccatacacttgcagtggtcggcaaagtcactcccaccccgaggcccacagacggtgtggatatttactttggcatgcctggggaaatcagtgagcacgaggggttcctgagggccaagatggacctggaggagcgtaggatgcgccagattaatgaggtgatgcgtgaatgggccatggcagacaaccagtccaagaacctgcctaaagccgacagacaggccctgaatgagcacttccagtccattctgcagactctggaggagcaggtgtctggtgagcgacagcgcctggtggaaacccacgccacccgcgtcatcgcccttatcaacgaccagcgccgggctgcc

SEQ ID NO: 1230 - DNA, 664 bp, Homo sapiens
  source 1..664: mol_type = unassigned DNA
gtgaatgggccatggcagacaaccagtccaagaacctgcctaaagccgacagacaggccctgaatgaggcggagcgtgtcctgttggccctgcggcgctacctgcgtgcggagcagaaggaacagaggcacacgctgcgccactaccagcatgtggccgccgtggatcccgagaaggcacagcagatgcgcttccaggtgcatacccaccttcaagtgattgaggagagggtgaatcagagcctgggcctgcttgaccagaacccccacctggctcaggagctgcggccccaaatccaggaactcctccactctgaacacctgggtcccagtgaattggaagcccctgcccctgggggcagcagcgaggacaagggtgggctgcagcctccagattccaaggatgacacccccatgacccttccaaaagggtccacagaacaagatgctgcatcccctgagaaagagaagatgaacccgctggaacagtatgagcgaaaggtgaatgcgtctgttccaaggggtttccctttccactcatcggagattcagagggatgagctggcaccagctgggacaggggtgtcccgtgaggctgtgtcgggtctgctgatcatgggagcgggcggaggctccctcatcgtcctctccatgctgctcctgcg

SEQ ID NO: 1231 - DNA, 547 bp, Homo sapiens
  source 1..547: mol_type = unassigned DNA
cacttccagtccattctgcagactctggaggagcaggtgtctggtgagcgacagcgcctggtggaaacccacgccacccgcgtcatcgcccttatcaacgaccagcgccgggctgccttggagggcttcctggcagccctgcaggcagatccgcctcaggcggagcgtgtcctgttggccctgcggcgctacctgcgtgcggagcagaaggaacagaggcacacgctgcgccactaccagcatgtggccgccgtggatcccgagaaggcacagcagatgcgcttccaggtgcatacccaccttcaagtgattgaggagagggtgaatcagagcctgggcctgcttgaccagaacccccacctggctcaggagctgcggccccaaatccaggaactcctccactctgaacacctgggtcccagtgaattggaagcccctgcccctgggggcagcagcgaggacaagggtgggctgcagcctccagattccaaggatgacacccccatgacccttccaaaagcctgggtgacagagtgagactctgtct

SEQ ID NO: 1232 - DNA, 1179 bp, Homo sapiens
  source 1..1179: mol_type = unassigned DNA
tccagtccattctgcagactctggaggagcaggtgtctggtgagcgacagcgcctggtggaaacccacgccacccgcgtcatcgcccttatcaacgaccagcgccgggctgccttggagggcttcctggcagccctgcaggcagatccgcctcaggcggagcgtgtcctgttggccctgcggcgctacctgcgtgcggagcagaaggaacagaggcacacgctgcgccactaccagcatgtggccgccgtggatcccgagaaggcacagcagatgcgcttccaggtgcatacccaccttcaagtgattgaggagagggtgaatcagagcctgggcctgcttgaccagaacccccacctggctcaggagctgcggccccaaatccaggaactcctccactctgaacacctgggtcccagtgaattggaagcccctgcccctgggggcagcagcgaggacaagggtgggctgcagcctccagattccaaggatgggtccacagaacaagatgctgcatcccctgagaaagagaagatgaacccgctggaacagtatgagcgaaaggtgaatgcgtctgttccaaggggtttccctttccactcatcggagattcagagggatgagctggcaccagctgggacaggggtgtcccgtgaggctgtgtcgggtctgctgatcatgggagcgggcggaggctccctcatcgtcctctccatgctgctcctgcgcaggaagaagccctacggggctatcagccatggcgtggtggaggtggaccccatgctgaccctggaggagcagcagctccgcgaactgcagcggcacggctatgagaaccccacttaccgcttcctggaggaacgaccctgacccggcccccttcaccccttcagccgagcccagacctcccctcttcctggagccccagaaccccaactcccagcctagggcagcagggagtcttgaagtgatcatttcacacccttttgtgagacggctggaaattcttatttcccctttccaattccaaaattccatccctaagaattcccagatagtcccagcagcctccccacgtggcacctcctcaccttaatttattttttaagtttatttatggctctttaaggtgaccgccaccttggtcctagtgtctattccctggaattcaccctctcat

SEQ ID NO: 1233 - DNA, 310 bp, Homo sapiens
  source 1..310: mol_type = unassigned DNA
gacagagtgagactctgtctaaagaaaaaaaaaaagaatgagatcagacttgggggtagggtccacagaacaagatgctgcatcccctgagaaagagaagatgaacccgctggaacagtatgagcgaaaggtgaatgcgtctgttccaaggggtttccctttccactcatcggagattcagagggatgagctggcaccagctgggacaggggtgtcccgtgaggctgtgtcgggtctgctgatcatgggagcgggcggaggctccctcatcgtcctctccatgctgctcctgcgcaggaagaagccctac

SEQ ID NO: 1234 - DNA, 463 bp, Homo sapiens
  source 1..463: mol_type = unassigned DNA
atggcgtggtggaggtggaccccatgctgaccctggaggagcagcagctccgcgaactgcagcggcacggctatgagaaccccacttaccgcttcctggaggaacgaccctgacccggcccccttcaccccttcagccgagcccagacctcccctcttcctggagccccagaaccccaactcccagcctagggcagcagggagtcttgaagtgatcatttcacacccttttgtgagacggctggaaattcttatttcccctttccaattccaaaattccatccctaagaattcccagatagtcccagcagcctccccacgtggcacctcctcaccttaatttattttttaagtttatttatggctctttaaggtgaccgccaccttggtcctagtgtctattccctggaattcaccctctcatgtttccctactaacatcccaataaagtcctcttccctacc

SEQ ID NO: 1235 - DNA, 1130 bp, Homo sapiens
  source 1..1130: mol_type = unassigned DNA
tctctctcgcacacatacccacacacacacacacacacacacacgcgcgcgcgaaaacaatatctcatttcttcttcagggagcagctgtgaaggaaatcgggggaggaggatggacacaacatcccatctttgtgtttcgatacagactaagcttttaggccaaccctcctgactggatgggggcggcgggcgtggcatgcatgaaaagtaaacatcagagacctgaagaagcttataaaatagcttgggagaggccagtcaccaagacaggcatctcaaatcggctgattctgcatctggaaactgccttcatcttgaaagaaaagctccaggtcccttctccagccacccagccccaagatggtgatgctgctgctgctgctttccgcactggctggcctcttcggtgcggcagagggacaagcatttcatcttgggaagtgccccaatcctccggtgcaggagaattttgacgtgaataagtatctcggaagatggtacgaaattgagaagatcccaacaacctttgagaatggacgctgcatccaggccaactactcactaatggaaaacggaaagatcaaagtgttaaaccaggagttgagagctgatggaactgtgaatcaaatcgaaggtgaagccaccccagttaacctcacagagcctgccaagctggaagttaagttttcctggtttatgccatcggcaccgtactggatcctggccaccgactatgagaactatgccctcgtgtattcctgtacctgcatcatccaactttttcacgtggattttgcttggatcttggcaagaaaccctaatctccctccagaaacagtggactctctaaaaaatatcctgacttctaataacattgatgtcaagaaaatgacggtcacagaccaggtgaactgccccaagctctcgtaaccaggttctacagggaggctgcacccactccatgttacttctgcttcgctttcccctaccccccccccataaagacaaaccaatcaaccacgacaaaggaagttgacctgaacatgtaaccatgccctaccctgttaccttgctagctgcaaaataaacttgttgctgacctgctgtgctcgcagtagattccaagtt

SEQ ID NO: 1236 - DNA, 950 bp, Homo sapiens
  source 1..950: mol_type = unassigned DNA
agaggccagtcaccaagacaggcatctcaaatcggctgattctgcatctggaaactgccttcatcttgaaagaaaagctccaggtcccttctccagccacccagccccaagatggtgatgctgctgctgctgctttccgcactggctggcctcttcggtgcggcagagggacaagcatttcatcttgggaagtgccccaatcctccggtgcaggagaattttgacgtgaataagacggagtctcactttgtcacccagggtggagtgcagcatcaccatcttggctcactgcaacctccgcctcccgggttcaagcaattctcctgcctcagcctcccaagtagctgggactacagtatctcggaagatggtacgaaattgagaagatcccaacaacctttgagaatggacgctgcatccaggccaactactcactaatggaaaacggaaagatcaaagtgttaaaccaggagttgagagctgatggaactgtgaatcaaatcgaaggtgaagccaccccagttaacctcacagagcctgccaagctggaagttaagttttcctggtttatgccatcggcaccgtactggatcctggccaccgactatgagaactatgccctcgtgtattcctgtacctgcatcatccaactttttcacgtggattttgcttggatcttggcaagaaaccctaatctccctccagaaacagtggactctctaaaaaatatcctgacttctaataacattgatgtcaagaaaatgacggtcacagaccaggtgaactgccccaagctctcgtaaccaggttctacagggaggctgcacccactccatgttacttctgcttcgctttcccctaccccccccccataaagacaaaccaatcaaccacgacaaaggaagttgacctgaacatgtaaccatgccctaccctgttaccttgctagc

SEQ ID NO: 1237 - DNA, 782 bp, Homo sapiens
  source 1..782: mol_type = unassigned DNA
aagacaggcatctcaaatcggctgattctgcatctggaaactgccttcatcttgaaagaaaagatggagtttttgctctgttgcccaagctagagtgcaatggtgtgatcttggcttactgcaacctctgcctcccatgttcaagcaattatcctgcatcagcctcccgagtagctgtgattacagctccaggtcccttctccagccacccagccccaagatggtgatgctgctgctgctgctttccgcactggctggcctcttcggtgcggcagagggacaagcatttcatcttgggaagtgccccaatcctccggtgcaggagaattttgacgtgaataagtatctcggaagatggtacgaaattgagaagatcccaacaacctttgagaatggacgctgcatccaggccaactactcactaatggaaaacggaaagatcaaagtgttaaaccaggagttgagagctgatggaactgtgaatcaaatcgaaggtgaagccaccccagttaacctcacagagcctgccaagctggaagttaagttttcctggtttatgccatcggcaccgtactggatcctggccaccgactatgagaactatgccctcgtgtattcctgtacctgcatcatccaactttttcacgtggattttgcttggatcttggcaagaaaccctaatctccctccagaaacagtggactctctaaaaaatatcctgacttctaataacattgatgtcaagaaaatgacggtcacagaccaggtgaactgccccaagc

SEQ ID NO: 1238 - DNA, 681 bp, Homo sapiens
  source 1..681: mol_type = unassigned DNA
aagacaggcatctcaaatcggctgattctgcatctggaaactgccttcatcttgaaagaaaagtttaccaggaagtaacccgggcaaattcacctcgttggtatgaagagagtgtcagcagaggtcgcctccagaggaggtgctgtggagactgagcgcatagcacccttaaaatcctgggaccagggcttctccacggctccaggtcccttctccagccacccagccccaagatggtgatgctgctgctgctgctttccgcactggctggcctcttcggtgcggcagagggacaagcatttcatcttgggaagtgccccaatcctccggtgcaggagaattttgacgtgaataagtatctcggaagatggtacgaaattgagaagatcccaacaacctttgagaatggacgctgcatccaggccaactactcactaatggaaaacggaaagatcaaagtgttaaaccaggagttgagagctgatggaactgtgaatcaaatcgaaggtgaagccaccccagttaacctcacagagcctgccaagctggaagttaagttttcctggtttatgccatcggcaccgtactggatcctggccaccgactatgagaactatgccctcgtgtattcctgtacctgcatcatccaactttttcacgtggattttgcttggatcttgg

SEQ ID NO: 1239 - DNA, 1210 bp, Homo sapiens
  source 1..1210: mol_type = unassigned DNA
gactggatgggggcggcgggcgtggcatgcatgaaaagtaaacatcagagacctgaagaagcttataaaatagcttgggagaggccagtcaccaagacaggcatctcaaatcggctgattctgcatctggaaactgccttcatcttgaaagaaaagctccaggtcccttctccagccacccagccccaagatggtgatgctgctgctgctgctttccgcactggctggcctcttcggtgcggcagagggacaagcatttcatcttgggaagtgccccaatcctccggtgcaggagaattttgacgtgaataagtatctcggaagatggtacgaaattgagaagatcccaacaacctttgagaatggacgctgcatccaggccaactactcactaatggaaaacggaaagatcaaagtgttaaaccaggagttgagagctgatggaactgtgaatcaaatcgaaggtgaagccaccccagttaacctcacagagcctgccaagctggaagttaagttttcctggtgtaagtatccacttttcccaggaggattcagggacaggaaatatgcaaactgaaggctagcgccccggcttggagaattcctgagacacctgagtgtcatctataatcactcagcacataattatctgtcaaacacttactacatgtcacgcactagggttgccatgatgagccggacagagctggccttggtacttatggagctcacatcccagtgtggatactgacacgtgaccccgcaatttactataactagctagcgtttcaacaggtgaaacacaagtaggtgcacaccgggtgtgggctgcagaagacacaacccagtcttgtttcccaaaggaaactggggcccgaaacattagcagatattagcagaacaacctgcacggcgcagaaactaggaagcaagagatgacaagagtgacggcaagtttgaatcctgcttctgccactttccagtcacattgttggggatcctgtgagatacctaatgacaggcatttgcctctgggttctgagctaactgaggaagggacacaggcaatagagaaagcaccaaatattagttttatttccgacgaagatacactagagagttcaacccagaactgtgaggctttctaacacgaagagtgcttgaaagcccctttcccacctgcagggtagacactgaagtcatcagctac

SEQ ID NO: 1240 - DNA, 3239 bp, Homo sapiens
  source 1..3239: mol_type = unassigned DNA
tttccctgccgggcgcgccacacttcctgttgatccggctcggccgggggctgggccggcgggcaggcggcggcggccactggccaggcgtggacgcgcgcggggccgccgcgggcacggagtggccgccgcgtcgcctgagcccagagccggggagtgctctcggccgccgcgtctcctgccctctgtccttccaacccagccctcggctgagccgcgccgcaccatgcccgccgtggacaagctcctgctagaggaggcgttgcaggacagcccccagactcgctctttactgagcgtgtttgaagaagatgctggcaccctcacagactataccaaccagctgctccaggcaatgcagcgcgtctatggagcccagaatgagatgtgcctggccacacaacagctttctaagcaactgctggcatatgaaaaacagaactttgctcttggcaaaggtgatgaagaagtaatttcaacactccactatttttccaaagtggtggatgagcttaatcttctccatacagagctggctaaacagttggcagacacaatggttctacctatcatacaattccgagaaaaggatctcacagaagtaagcactttaaaggatctatttggactcgctagcaatgagcatgacctctcaatggcaaaatacagcaggctgcctaagaaaaaggagaatgagaaggtgaagaccgaagtcggaaaagaggtggccgcggcccggcggaagcagcacctctcctcccttcagtactactgtgccctcaacgcgctgcagtacagaaagcaaatggccatgatggagcccatgataggctttgcccatggacagattaacttttttaagaagggagcagagatgttttccaaacgtatggacagctttttatcctccgttgcagacatggttcaaagcattcaggtagaactggaagccgaggcggaaaagatgcgggtgtcccagcaagaattactttctgttgatgaatctgtttacactccagactctgatgtggccgcaccacagatcaacaggaacctcatccagaaggctggttaccttaatcttagaaacaaaacagggctggtcaccaccacctgggagaggctttatttcttcacccaaggcgggaatctcatgtgtcagcccaggggagccgtggctggaggtttgatccaggacctggacaactgctcagtgatggccgtggattgcgaagaccggcgctactgcttccagatcaccacgcccaatggaaaatcgggaataatcctccaggctgagagcagaaaggaaaatgaagagtggatatgtgcaataaacaacatctccagacagatctacctgaccgacaaccctgaggcagtcgcgatcaagttgaatcagaccgctctgcaagcagtgactcccattacaagttttggaaaaaaacaagaaagctcatgccccagccagaacctgaaaaattcagagatggaaaatgaaaatgacaagattgttcccaaagcaacagccagtctacctgaagcagaggagctgatcgcgcctggaacgccgattcaattcgatattgtgcttcctgctacagaattccttgatcagaacagagggagcaggcgtaccaacccttttggtgaaactgaggatgaatcatttccagaagcagaagattctcttttgcagcagatgtttatagttcggtttttgggatcaatggcagttaaaacagacagcactactgaagtgatttatgaagcgatgagacaagtattggctgctcgggctattcataacatcttccgcatgacagaatcccatctgatggtcaccagtcaatctttgaggttgatagatccacagactcaagtatcaagggccaattttgaacttaccagtgtcacacaatttgctgctcatcaagaaaacaagagactggttggttttgtcatccgtgttcctgaatccactggagaagaatctctgagtacatacatttttgaaagcaactcagaaggcgaaaagatatgttatgctattaatttgggaaaagaaattattgaggttcagaaggatccagaagcactggctcaattaatgctgtccataccactaaccaatgacggaaaatatgtactgttaaacgatcaaccagatgacgatgatggaaatccaaacgaacatagaggcgcagaatccgaagcataactcacttgcgcctgtgggggaagagcaaacaggaaggagagctacctcctaagggttttaacgtctctgacatacaggcacactgacctgatttccgaaggctgacaatcgtttgtggaatgtaatcttgatgccttgatactgagacttgggagggaaactaagaaatggttgacagcgttcccacccatctacaatgttattttaggtgctttgtggtaagtcttttttcttagattgcgctaaaatttcttagattgttcagcgctcagaacaaaagtttgaaaaatgcattgttcatatgaatgtcatctcttttcagtttccagtatcctttttaaaaaatggcaaaagcctagatttacaatttgatgaacactaaatatttcttattaatataatctatttttgtattttacttaatgagctttaagtgcctgtcgttctgaaaattgtgtatttataattcagcttatctcataattggacctaatagcatttctttgtgcagttaggtgatgagcactgctttgaggcccaagcactagtagagatgcgcgatacaggtctagtttcggtaactgttccagacatcaagcaataaaaaaatgaataccacaaaagatgtttgattttacagtggagccttactgaaccagcattcagaagtttaaggtcctcctaggtatgagtatttttagtagtggatcactgtggacagggtgcagctctaccagttcctgtttcttctgagccagaccctcttcagggaagggaccaattaattttaaaactcacttgaagcacagctggtcatggggcttggtataaagttcctatttccaccctgatacttccaattcctggaaccccagcccactcccccatccctcctccctatcaaactagtataatgattttgaatcggtacagtgtgtttaactgtaactaagttcaacagactattattatctttgtaataaattaacctagcaataaaaaatattctgtttctttc

SEQ ID NO: 1241 - DNA, 3196 bp, Homo sapiens
  source 1..3196: mol_type = unassigned DNA
cggctcggccgggggctgggccggcgggcaggcggcggcggccactggccaggcgtggacgcgcgcggggccgccgcgggcacggagtggccgccgcgtcgcctgagcccagagccggggagtgctctcggccgccgcgtctcctgccctctgtccttccaacccagccctcggctgagccgcgccgcaccatgcccgccgtggacaagctcctgctagaggaggcgttgcaggacagcccccagactcgctctttactgagcgtgtttgaagaagatgctggcaccctcacagactataccaaccagctgctccaggcaatgcagcgcgtctatggagcccagaatgagatgtgcctggccacacaacagctttctaagcaactgctggcatatgaaaaacagaactttgctcttggcaaaggtgatgaagaagtaatttcaacactccactatttttccaaagtggtggatgagcttaatcttctccatacagagctggctaaacagttggcagacacaatggttctacctatcatacaattccgagaaaaggatctcacagaagtaagcactttaaaggatctatttggactcgctagcaatgagcatgacctctcaatggcaaaatacagcaggctgcctaagaaaaaggagaatgagaaggtgaagaccgaagtcggaaaagaggtggccgcggcccggcggaagcagcacctctcctcccttcagtactactgtgccctcaacgcgctgcagtacagaaagcaaatggccatgatggagcccatgataggctttgcccatggacagattaacttttttaagaagggagcagagatgttttccaaacgtatggacagctttttatcctccgttgcagacatggttcaaaggtagaactggaagccgaggcggaaaagatgcgggtgtcccagcaagaattactttctgttgatgaatctgtttacactccagactctgatgtggccgcaccacagatcaacaggaacctcatccagaaggctggttaccttaatcttagaaacaaaacagggctggtcaccaccacctgggagaggctttatttcttcacccaaggcgggaatctcatgtgtcagcccaggggagccgtggctggaggtttgatccaggacctggacaactgctcagtgatggccgtggattgcgaagaccggcgctactgcttccagatcaccacgcccaatggaaaatcgggaataatcctccaggctgagagcagaaaggaaaatgaagagtggatatgtgcaataaacaacatctccagacagatctacctgaccgacaaccctgaggcagtcgcgatcaagttgaatcagaccgctctgcaagcagtgactcccattacaagttttggaaaaaaacaagaaagctcatgccccagccagaacctgaaaaattcagagatggaaaatgaaaatgacaagattgttcccaaagcaacagccagtctacctgaagcagaggagctgatcgcgcctggaacgccgattcaattcgatattgtgcttcctgctacagaattccttgatcagaacagagggagcaggcgtaccaacccttttggtgaaactgaggatgaatcatttccagaagcagaagattctcttttgcagcagatgtttatagttcggtttttgggatcaatggcagttaaaacagacagcactactgaagtgatttatgaagcgatgagacaagtattggctgctcgggctattcataacatcttccgcatgacagaatcccatctgatggtcaccagtcaatctttgaggttgatagatccacagactcaagtatcaagggccaattttgaacttaccagtgtcacacaatttgctgctcatcaagaaaacaagagactggttggttttgtcatccgtgttcctgaatccactggagaagaatctctgagtacatacatttttgaaagcaactcagaaggcgaaaagatatgttatgctattaatttgggaaaagaaattattgaggttcagaaggatccagaagcactggctcaattaatgctgtccataccactaaccaatgacggaaaatatgtactgttaaacgatcaaccagatgacgatgatggaaatccaaacgaacatagaggcgcagaatccgaagcataactcacttgcgcctgtgggggaagagcaaacaggaaggagagctacctcctaagggttttaacgtctctgacatacaggcacactgacctgatttccgaaggctgacaatcgtttgtggaatgtaatcttgatgccttgatactgagacttgggagggaaactaagaaatggttgacagcgttcccacccatctacaatgttattttaggtgctttgtggtaagtcttttttcttagattgcgctaaaatttcttagattgttcagcgctcagaacaaaagtttgaaaaatgcattgttcatatgaatgtcatctcttttcagtttccagtatcctttttaaaaaatggcaaaagcctagatttacaatttgatgaacactaaatatttcttattaatataatctatttttgtattttacttaatgagctttaagtgcctgtcgttctgaaaattgtgtatttataattcagcttatctcataattggacctaatagcatttctttgtgcagttaggtgatgagcactgctttgaggcccaagcactagtagagatgcgcgatacaggtctagtttcggtaactgttccagacatcaagcaataaaaaaatgaataccacaaaagatgtttgattttacagtggagccttactgaaccagcattcagaagtttaaggtcctcctaggtatgagtatttttagtagtggatcactgtggacagggtgcagctctaccagttcctgtttcttctgagccagaccctcttcagggaagggaccaattaattttaaaactcacttgaagcacagctggtcatggggcttggtataaagttcctatttccaccctgatacttccaattcctggaaccccagcccactcccccatccctcctccctatcaaactagtataatgattttgaatcggtacagtgtgtttaactgtaactaagttcaacagactattattatctttgtaataaattaacctagcaataaaaaatattctgtttcttt

SEQ ID NO: 1242 - DNA, 2680 bp, Homo sapiens
  source 1..2680: mol_type = unassigned DNA
tctattcatggactcctttttagtttgcagtgctgcacgatgcattgtaaaactagtctgtgtgcatacacatgcgttatttctgcttacctctcatatgtgggaagctgaacattttagggattaagaaatctgcctccattgttgtttagaagcctctgctccttgcctggcactactggctgttgggaatgtgaagataaataagagtgactacccttgactggttcacagtttgttccagagacagataatgaggcaacagttccagtacagtgtgaatcctgctgcgataggaacacaaatgcagctttgagctcctgcagcttgtacttcttcaggggcttattctcttgtcctactcgctctttactgagcgtgtttgaagaagatgctggcaccctcacagactataccaaccagctgctccaggcaatgcagcgcgtctatggagcccagaatgagatgtgcctggccacacaacagctttctaagcaactgctggcatatgaaaaacagaactttgctcttggcaaaggtgatgaagaagtaatttcaacactccactatttttccaaagtggtggatgagcttaatcttctccatacagagctggctaaacagttggcagacacaatggttctacctatcatacaattccgagaaaaggatctcacagaagtaagcactttaaaggatctatttggactcgctagcaatgagcatgacctctcaatggcaaaatacagcaggctgcctaagaaaaaggagaatgagaaggtgaagaccgaagtcggaaaagaggtggccgcggcccggcggaagcagcacctctcctcccttcagtactactgtgccctcaacgcgctgcagtacagaaagcaaatggccatgatggagcccatgataggctttgcccatggacagattaacttttttaagaagggagcagagatgttttccaaacgtatggacagctttttatcctccgttgcagacatggttcaaagcattcaggtagaactggaagccgaggcggaaaagatgcgggtgtcccagcaagaattactttctgttgatgaatctgtttacactccagactctgatgtggccgcaccacagatcaacaggaacctcatccagaaggctggttaccttaatcttagaaacaaaacagggctggtcaccaccacctgggagaggctttatttcttcacccaaggcgggaatctcatgtgtcagcccaggggagccgtggctggaggtttgatccaggacctggacaactgctcagtgatggccgtggattgcgaagaccggcgctactgcttccagatcaccacgcccaatggaaaatcgggaataatcctccaggctgagagcagaaaggaaaatgaagagtggatatgtgcaataaacaacatctccagacagatctacctgaccgacaaccctgaggcagtcgcgatcaagttgaatcagaccgctctgcaagcagtgactcccattacaagttttggaaaaaaacaagaaagctcatgccccagccagaacctgaaaaattcagagatggaaaatgaaaatgacaagattgttcccaaagcaacagccagtctacctgaagcagaggagctgatcgcgcctggaacgccgattcaattcgatattgtgcttcctgctacagaattccttgatcagaacagagggagcaggcgtaccaacccttttggtgaaactgaggatgaatcatttccagaagcagaagattctcttttgcagcagatgtttatagttcggtttttgggatcaatggcagttaaaacagacagcactactgaagtgatttatgaagcgatgagacaagtattggctgctcgggctattcataacatcttccgcatgacagaatcccatctgatggtcaccagtcaatctttgaggttgatagatccacagactcaagtatcaagggccaattttgaacttaccagtgtcacacaatttgctgctcatcaagaaaacaagagactggttggttttgtcatccgtgttcctgaatccactggagaagaatctctgagtacatacatttttgaaagcaactcagaaggcgaaaagatatgttatgctattaatttgggaaaagaaattattgaggttcagaaggatccagaagcactggctcaattaatgctgtccataccactaaccaatgacggaaaatatgtactgttaaacgatcaaccagatgacgatgatggaaatccaaacgaacatagaggcgcagaatccgaagcataactcacttgcgcctgtgggggaagagcaaacaggaaggagagctacctcctaagggttttaacgtctctgacatacaggcacactgacctgatttccgaaggctgacaatcgtttgtggaatgtaatcttgatgccttgatactgagacttgggagggaaactaagaaatggttgacagcgttcccacccatctacaatgttattttaggtgctttgtggtaagtcttttttcttagattgcgctaaaatttcttagattgttcagcgctcagaacaaaagtttgaaaaatgcattgttcatatgaatgtcatctcttttcagtttccagtatcctttttaaaaaatggcaaaagcctagatttacaatttgatgaacac

SEQ ID NO: 1243 - DNA, 851 bp, Homo sapiens
  source 1..851: mol_type = unassigned DNA
gagctttagctacacaggttccttaaaggcagaaagcaggacacgtggtcacacacagctatctcgcctcaccctctaacaggctttatctctatttcggggaatttgtatttattctggacttctacaaactcttctaggaatattaaatttatccaacatttgtgacataatgtatcttttaaaatttcaggttgatagatccacagactcaagtatcaagggccaattttgaacttaccagtgtcacacaatttgctgctcatcaagaaaacaagagactggttggttttgtcatccgtgttcctgaatccactggagaagaatctctgagtacatacatttttgaaagcaactcagaaggcgaaaagatatgttatgctattaatttgggaaaagaaattattgaggttcagaaggatccagaagcactggctcaattaatgctgtccataccactaaccaatgacggaaaatatgtactgttaaacgatcaaccagatgacgatgatggaaatccaaacgaacatagaggcgcagaatccgaagcataactcacttgcgcctgtgggggaagagcaaacaggaaggagagctacctcctaagggttttaacgtctctgacatacaggcacactgacctgatttccgaaggctgacaatcgtttgtggaatgtaatcttgatgccttgatactgagacttgggagggaaactaagaaatggttgacagcgttcccacccatctacaatgttattttaggtgctttgtggtaagtcttttttcttagattgcgctaaaatttcttagattgttcagcgctcagaacaaaagtttgaaaaatgcattgt

SEQ ID NO: 1244 - DNA, 684 bp, Homo sapiens
  source 1..684: mol_type = unassigned DNA
aaatacatttaagagagagaagaaaaattcctattaagaacttttaacactggaattacctgagtttcacttacctggaatattttttgtgtggcataaattggcaacagaggtcaggacagttggacgcaaatgccccgggccctatgtgatgagtctcctgcagccaggtcctgtgttcccaagtgggaacagtgagaacagtgacctcactgtactcccaaatcacatttgttctaaaattttatccttctctacttttgccaatcactacttttcttgtcttttgcagatatgttatgctattaatttgggaaaagaaattattgaggttcagaaggatccagaagcactggctcaattaatgctgtccataccactaaccaatgacggaaaatatgtactgttaaacgatcaaccagatgacgatgatggaaatccaaacgaacatagaggcgcagaatccgaagcataactcacttgcgcctgtgggggaagagcaaacaggaaggagagctacctcctaagggttttaacgtctctgacatacaggcacactgacctgatttccgaaggctgacaatcgtttgtggaatgtaatcttgatgccttgatactgagacttgggagggaaactaagaaatggttgacagcgttcccacccatctacaatgttattttagg

SEQ ID NO: 1245 - DNA, 2190 bp, Homo sapiens
  source 1..2190: mol_type = unassigned DNA
agtgctctcggccgccgcgtctcctgccctctgtccttccaacccagccctcggctgagccgcgccgcaccatgcccgccgtggacaagctcctgctagaggaggcgttgcaggacagcccccagactcgctctttactgagcgtgtttgaagaagatgctggcaccctcacagactataccaaccagctgctccaggcaatgcagcgcgtctatggagcccagaatgagatgtgcctggccacacaacagctttctaagcaactgctggcatatgaaaaacagaactttgctcttggcaaaggtgatgaagaagtaatttcaacactccactatttttccaaagtggtggatgagcttaatcttctccatacagagctggctaaacagttggcagacacaatggttctacctatcatacaattccgagaaaaggatctcacagaagtaagcactttaaaggatctatttggactcgctagcaatgatgtctgtttatttttagagcatgacctctcaatggcaaaatacagcaggctgcctaagaaaaaggagaatgagaaggtgaagaccgaagtcggaaaagaggtggccgcggcccggcggaagcagcacctctcctcccttcagtactactgtgccctcaacgcgctgcagtacagaaagcaaatggccatgatggagcccatgataggctttgcccatggacagattaacttttttaagaagggagcagagatgttttccaaacgtatggacagctttttatcctccgttgcagacatggttcaaagcattcaggtagaactggaagccgaggcggaaaagatgcgggtgtcccagcaagaattactttctgttgatgaatctgtttacactccagactctgatgtggccgcaccacagatcaacaggaacctcatccagaaggctggttaccttaatcttagaaacaaaacagggctggtcaccaccacctgggagaggctttatttcttcacccaaggcgggaatctcatgtgtcagcccaggggagccgtggctggaggtttgatccaggacctggacaactgctcagtgatggccgtggattgcgaagaccggcgctactgcttccagatcaccacgcccaatggaaaatcgggaataatcctccaggctgagagcagaaaggaaaatgaagagtggatatgtgcaataaacaacatctccagacagatctacctgaccgacaaccctgaggcagtcgcgatcaagttgaatcagaccgctctgcaagcagtgactcccattacaagttttggaaaaaaacaagaaagctcatgccccagccagaacctgaaaaattcagagatggaaaatgaaaatgacaagattgttcccaaagcaacagccagtctacctgaagcagaggagctgatcgcgcctggaacgccgattcaattcgatattgtgcttcctgctacagaattccttgatcagaacagagggagcaggcgtaccaacccttttggtgaaactgaggatgaatcatttccagaagcagaagattctcttttgcagcagatgtttatagttcggtttttgggatcaatggcagttaaaacagacagcactactgaagtgatttatgaagcgatgagacaagtattggctgctcgggctattcataacatcttccgcatgacagaatcccatctgatggtcaccagtcaatctttgaggttgatagatccacagactcaagtatcaagggccaattttgaacttaccagtgtcacacaatttgctgctcatcaagaaaacaagagactggttggttttgtcatccgtgttcctgaatccactggagaagaatctctgagtacatacatttttgaaagcaactcagaaggcgaaaagatatgttatgctattaatttgggaaaagaaattattgaggttcagaaggatccagaagcactggctcaattaatgctgtccataccactaaccaatgacggaaaatatgtactgttaaacgatcaaccagatgacgatgatggaaatccaaacgaacatagaggcgcagaatccgaagcataactcacttgcgcctgtgggggaagagcaaacaggaaggagagctacctcctaagggttttaacgtctctgacatacaggcacactgacctgatttccgaaggctgac

SEQ ID NO: 1246 - DNA, 564 bp, Homo sapiens
  source 1..564: mol_type = unassigned DNA
gatattgtgcttcctgctacagaattccttgatcagaacagagggagcaggcgtaccaacccttttggtgaaactgaggatgaatcatttccagaagcagaagttaaaacagacagcactactgaagtgatttatgaagcgatgagacaagtattggctgctcgggctattcataacatcttccgcatgacagaatcccatctgatggtcaccagtcaatctttgaggttgatagatccacagactcaagtatcaagggccaattttgaacttaccagtgtcacacaatttgctgctcatcaagaaaacaagagactggttggttttgtcatccgtgttcctgaatccactggagaagaatctctgagtacatacatttttgaaagcaactcagaaggcgaaaagatatgttatgctattaatttgggaaaagaaattattgaggttcagaaggatccagaagcactggctcaattaatgctgtccataccactaaccaatgacggaaaatatgtactgttaaacgatcaaccagatgacgatgatggaaatccaaacgaacat

SEQ ID NO: 1247 - DNA, 428 bp, Homo sapiens
  source 1..428: mol_type = unassigned DNA
agattctcttttgcagcagatgtttatagttcggtttttgggatcaatggcagttaaaacagacagcactactgaagtgatttatgaagcgatgagacaagtattggctgctcgggctattcataacatcttccgcatgacagaatcccatctgatggtcaccagtcaatctttgaggttgatagatccacagactcaagtatcaagggccaattttgaacttaccagtgtcacacaatttgctgctcatcaagaaaacaagagactggttggttttgtcatccgtgttcctgaatccactggagaagaatctctgagtacatacatttttgaaagcaactcagaaggcgaaaaggtctctttttcatgtgaagatcccataatatcccagtccaaacaagtccattttaaaagagttttctggcatt

SEQ ID NO: 1248 - DNA, 1797 bp, Homo sapiens
  source 1..1797: mol_type = unassigned DNA
gaacacaaatgcagctttgagctcctgcagcttgtacttcttcaggggcttattctcttgtcctactcgctctttactgagcgtgtttgaagaagatgctggcaccctcacagactataccaaccagctgctccaggcaatgcagcgcgtctatggagcccagaatgagatgtgcctggccacacaacagctttctaagcaactgctggcatatgaaaaacagaactttgctcttggcaaaggtgatgaagaagtaatttcaacactccactatttttccaaagtggtggatgagcttaatcttctccatacagagctggctaaacagttggcagacacaatggttctacctatcatacaattccgagaaaaggatctcacagaagtaagcactttaaaggatctatttggactcgctagcaatgagcatgacctctcaatggcaaaatacagcaggctgcctaagaaaaaggagaatgagaaggtgaagaccgaagtcggaaaagaggtggccgcggcccggcggaagcagcacctctcctcccttcagtactactgtgccctcaacgcgctgcagtacagaaagcaaatggccatgatggagcccatgataggctttgcccatggacagattaacttttttaagaagggagcagagatgttttccaaacgtatggacagctttttatcctccgttgcagacatggttcaaagcattcaggtagaactggaagccgaggcggaaaagatgcgggtgtcccagcaagaattactttctgttgatgaatctgtttacactccagactctgatgtggccgcaccacagatcaacaggaacctcatccagaaggctggttaccttaatcttagaaacaaaacagggctggtcaccaccacctgggagaggctttatttcttcacccaaggcgggaatctcatgtgtcagcccaggggagccgtggctggaggtttgatccaggacctggacaactgctcagtgatggccgtggattgcgaagaccggcgctactgcttccagatcaccacgcccaatggaaaatcgggaataatcctccaggctgagagcagaaaggaaaatgaagagtggatatgtgcaataaacaacatctccagacagatctacctgaccgacaaccctgaggcagtcgcgatcaagttgaatcagaccgctctgcaagcagtgactcccattacaagttttggaaaaaaacaagaaagctcatgccccagccagaacctgaaaaattcagagatggaaaatgaaaatgacaagattgttcccaaagcaacagccagtctacctgaagcagaggagctgatcgcgcctggaacgccgattcaattcgatattgtgcttcctgctacagaattccttgatcagaacagagggagcaggcgtaccaacccttttggtgaaactgaggatgaatcatttccagaagcagaagattctcttttgcagcagatgtttatagttcggtttttgggatcaatggcagttaaaacagacagcactactgaagtgatttatgaagcgatgagacaagtattggctgctcgggctattcataacatcttccgcatgacagaatcccatctgatggtcaccagtcaatctttgaggttgatagatccacagactcaagtatcaagggccaatgtaagtaccgcatacaggttcatgttagtgattactccttaattcacctttgtatctaccttaaacacagcctaggcactttattaataaagatctgccactaataggactaatag

SEQ ID NO: 1249 - DNA, 372 bp, Homo sapiens
  source 1..372: mol_type = unassigned DNA
aaagctcatgccccagccagaacctgaaaaattcagagatggaaaatgaaaatgacaagattgttcccaaagcaacagccagtctacctgaagcagaggagctgatcgcgcctggaacgccgattcaattcgatattgtgcttcctgctacagaattccttgatcagaacagagggagcagttcaagtgttaagtgcccttctagctgcagctgtcgtgtttgttcaactctggctattcccctaggcgtaccaacccttttggtgaaactgaggatgaatcatttccagaagcagaagattctcttttgcagcagatgtttatagttcggtttttgggatcaatggcagttaaaacagacagcactactga

SEQ ID NO: 1250 - DNA, 555 bp, Homo sapiens
  source 1..555: mol_type = unassigned DNA
ctcaatggcaaaatacagcaggctgcctaagaaaaaggagaatgagaaggtgaagaccgaagtcggaaaagaggtggccgcggcccggcggaagcagcacctctcctcccttcagtactactgtgccctcaacgcgctgcagtacagaaagcaaatggccatgatggagcccatgataggctttgcccatggacagattaacttttttaagaagggagcagagatgttttccaaacgtatggacagctttttatcctccgttgcagacatggttcaaagcattcaggtagaactggaagccgaggcggaaaagatgcgggtgtcccagcaagaattactttctgttgatgaatctgtttacactccagactctgatgtggccgcaccacagatcaacaggaacctcatccagaaggctggttaccttaatcttagaaacccaggggagccgtggctggaggtttgatccaggacctggacaactgctcagtgatggccgtggattgcgaagaccggcgctactgcttccagatcaccacgcccaatggaaaatcg

SEQ ID NO: 1251 - DNA, 547 bp, Homo sapiens
  source 1..547: mol_type = unassigned DNA
aatggttctacctatcatacaattccgagaaaaggatctcacagaagtaagcactttaaaggatctatttggactcgctagcaatgcaggctgcctaagaaaaaggagaatgagaaggtgaagaccgaagtcggaaaagaggtggccgcggcccggcggaagcagcacctctcctcccttcagtactactgtgccctcaacgcgctgcagtacagaaagcaaatggccatgatggagcccatgataggctttgcccatggacagattaacttttttaagaagggagcagagatgttttccaaacgtatggacagctttttatcctccgttgcagacatggttcaaagcattcaggtagaactggaagccgaggcggaaaagatgcgggtgtcccagcaagaattactttctgttgatgaatctgtttacactccagactctgatgtggccgcaccacagatcaacaggaacctcatccagaaggctggttaccttaatcttagaaagtgagaacgccaccgtctgcctctttttctgaaatccgttt

SEQ ID NO: 1252 - DNA, 529 bp, Homo sapiens
  source 1..529: mol_type = unassigned DNA
gaaaaaggagaatgagaaggtgaagaccgaagtcggaaaagaggtggccgcggcccggcggaagcagcacctctcctcccttcagtactactgtgccctcaacgcgctgcagtacagaaagcaaatggccatgatggagcccatgataggctttgcccatggacagattaacttttttaagaagggagcagagatgttttccaaacgtatggacagctttttatcctccgttgcagacatggttcaaaggtaatgctgcactccggccgggtcttgtgtgccccttgcctttcatgctgatctgacatctctgggaggtcacggggagggttctaactgtggagggtcgcacagagcctctgtccaccccagaaatgctcgctaacagtgcccttgccttagctgccaatattcataaatatctggggcacattggcagagttttctccagatctcttgttgtgaatattggagtttcacatgtcacaagcctgggaacccagcttagctttgctgtggttttagaaga

SEQ ID NO: 1253 - DNA, 637 bp, Homo sapiens
  source 1..637: mol_type = unassigned DNA
ctggcatatgaaaaacagaactttgctcttggcaaaggtgatgaagaagtaatttcaacactccactatttttccaaagtggtggatgagcttaatcttctccatacagagctggctaaacagttggcagacacaatggttctacctatcatacaattccgagaaaaggatctcacagaagtaagcactttaaaggatctatttggactcgctagcaatgagcatgacctctcaatggcaaaatacagcaggctgcctaagaaaaaggagaatgagaaggtgaagaccgaagtcggaaaagaggtggccgcggcccggcggaagcagcacctctcctcccttcagtactactgtgccctcaacgcgctgcagtacagaaagcaaatggccatgatggagcccatgataggctttgcccatggacaggtaggggagtccctccctgagggctgaaacctaagctagctgtggcgttctgctgagagggcacgcaggagacactgaagcatcgtcgtagaaagaaacataaatgcacaatctccctggctactttgtgggattcagcacttggacagcttccagttgagctgggtcatcttcagctggacatgcattggcctcaagttaggccatatgt

SEQ ID NO: 1254 - DNA, 514 bp, Homo sapiens
  source 1..514: mol_type = unassigned DNA
agagccggggagtgctctcggccgccgcgtctcctgccctctgtccttccaacccagccctcggctgagccgcgccgcaccatgcccgccgtggacaagctcctgctagaggaggcgttgcaggacagcccccagaatgagatgtgcctggccacacaacagctttctaagcaactgctggcatatgaaaaacagaactttgctcttggcaaaggtgatgaagaagtaatttcaacactccactatttttccaaagtggtggatgagcttaatcttctccatacagagctggctaaacagttggcagacacaatggttctacctatcatacaattccgagaaaaggatctcacagaagtaagcactttaaaggatctatttggactcgctagcaatgagcatgacctctcaatggcaaaatacagcaggctgcctaagaaaaaggagaatgagaaggtgaagaccgaagtcggaaaagaggtggccgcggcccggcggaagcagcacctctcct

SEQ ID NO: 1255 - DNA, 493 bp, Homo sapiens
  source 1..493: mol_type = unassigned DNA
gttgcagtgagccgagatcgcaccattgcactccagcctgggcaacaagagcgaaactccatctcaaaaaaagaaagaaagaaagaaaaagaaacaaggaaatcgtagtaccataagaggaaagaatgacacactcctacactcctgcaagacatccaagattacaaaaaaccagactgctggttcctgctgggatgatcacactacagctgtgctagatgaccacaccccagactcgctctttactgagcgtgtttgaagaagatgctggcaccctcacagactataccaaccagctgctccaggcaatgcagcgcgtctatggagcccagaatgagatgtgcctggccacacaacagctttctaagcaactgctggcatatgaaaaacagaactttgctcttggcaaaggtgatgaagaagtaatttcaacactccactatttttccaaagtggtggatgagcttaatcttctccatacagagctggctaa

SEQ ID NO: 1256 - DNA, 5274 bp, Homo sapiens
  source 1..5274: mol_type = unassigned DNA
cacatggtgcagaatctttccacccctaacactccaaaaacccaatcagacaagtggccgtaatctgactcccagcacacagggagctgcggggcaggcaatgagagctgcactctggctggggaaggcatgagtgacagacccacagcaaggcggtggggtaagtgtggacctttgtgtaccagagagaacatcatggtggctttcaaaggggtctggactcaagctttctggaaagcagtcacagcggaatttctggccatgcttatttttgttctcctcagcctgggatccaccatcaactggggtggaacagaaaagcctttaccggtcgacatggttctcatctccctttgctttggactcagcattgcaaccatggtgcagtgctttggccatatcagcggtggccacatcaaccctgcagtgactgtggccatggtgtgcaccaggaagatcagcatcgccaagtctgtcttctacatcgcagcccagtgcctgggggccatcattggagcaggaatcctctatctggtcacacctcccagtgtggtgggaggcctgggagtcaccatggttcatggaaatcttaccgctggtcatggtctcctggttgagttgataatcacatttcaattggtgtttactatctttgccagctgtgattccaaacggactgatgtcactggctcaatagctttagcaattggattttctgttgcaattggacatttatttgcaatcaattatactggtgccagcatgaatcccgcccgatcctttggacctgcagttatcatgggaaattgggaaaaccattggatatattgggttgggcccatcataggagctgtcctcgctggtggcctttatgagtatgtcttctgtccagatgttgaattcaaacgtcgttttaaagaagccttcagcaaagctgcccagcaaacaaaaggaagctacatggaggtggaggacaacaggagtcaggtagagacggatgacctgattctaaaacctggagtggtgcatgtgattgacgttgaccggggagaggagaagaaggggaaagaccaatctggagaggtattgtcttcagtatgactagaagatcgcactgaaagcagacaagactccttagaactgtcctcagatttccttccacccattaaggaaacagatttgttataaattagaaatgtgcaggtttgttgtttcatgtcatattactcagtctaaacaataaatatttcataatttacaaaggaggaacggaagaaacctattgtgaattccaaatctaaaaaaagaaatatttttaaaatgttcttaagcaaatatatacctattttatctagttacctttcattaacaaccaattttaaccgtgtgtcaagatttggttaagtcttgcctgacagaactcaaagacacgtctatcagcttattccttctctactggaatattggtatagtcaattcttatttgaatatttattctattaaactgagtttaacaatggcaaaatacagtatgtcacagtcatgcacattcaagagagaaaatataacaagttcttttatgagcaatcccttatgcatagactaccttggcaaaagagcattagcaagtgtcactgctcatcagttacttccttccatttatatcacaaatacccaagtttcaattctaacttcatttcatggtatttcttcctcctcaatgcccaaggtaatgtgggactaaagcccagaaatttgaaaagaatattcagaaatccttcccaaatcataagggcacctattgagattcaagacaagcagactcgtaaaatcttgtagaggcagaggcaaagttatcatcatacaaaaatcacaaacaaaaaggagatctgtattcgggtatcaaacggttgatctgttttcagtgcacaccctcaaatgcaccacaccagttttacgatctaagcttttaacccctttaccactttgcttatttttaaaaaatttattggcaaaactggggattttgtttgtaactttggttatctatatttaaacattagctgagacatatttttgataacaagaacttagctagttgagtcctggctttttgttgattattaagctgtgttcactctagaaggtgtaaaggccctgtcccaatctctgctctctcacttctcgtgacatttgttgataatctttactgcaagtgtaatgatatttgagtgaattaaaatgcatgacagacaaggtacaacatggttgcagaataaaagggtgaggacatcagatcactctgtattcaaagcttactagacgaacaatctttcatttctggatatattgtagctaacccaacacatttttaaactatttttgttactgactcacttacttgtcaaaataattggtttttctgtcctgctttgccttttgtcactagaatgttctccagaaaccccagtttctgtcatcttaactgtctagtctagccgttaacttagacaaagaagtgcaaatgtcaatttcactaaacaaaagctattagaagtaaagcagaaacctatcactgcaaggagtgacttgtaaataactgatgatcaagggctgtcttctctcaagcatggttccaactctgtgtcactttttagcgttaatggcagttgtgtgtctgtggcagtgagataatggaccactattaaacctgattctcttcggtgctaggaaagagtgatgtgtgagattcccagagagtcgtcacaccagtgttatgcctgggagtgccactggcataccgcaggtgcctaaatcccaggcccctttctcagggggcgtggccacaccacacactgcgccagtgacacatagttacttcctggctgggacggcacctatagaaactagggtacaaatctcccaaagatggtttgcaccgtcatttcaaatgtttgcacaatataccacttagaggcttaaaatcagggtggttcagttcaaaaggtaatatcaaccgtcagcaaacatgtcagtttaaaaataagttcggttaacaaggaagtgttaagcagattttttgaatacacttacaatatactggcttataatcatttttattctgccatatggtttatttcatatacactcacttttacactcacttccaattatagcattcaataagttacggttaaagaaaagtgaatggtgtttttgtaatttgttttctagtagctagcagagagcctggcacatagtatgtattcaaaacaagtgtgttaattaataaaaatatataaatctcatttgagatttaagaatataaataattttcttttaatctttattttgctcaatatttaataggaagtatgatttcaaggactactaaaggaaggcaatatacatgtgaaaaccataaaatacattttttgcattctactatttttaggggcatgaaatgaatgaaagctttagcacttttttgcccctacatatgagacaacatattttgtatttcactcaaggctctgccagtaaaaagtaatgaaattgtacctttctaatgacatctatgcagcaggggtctatcgccttgtggatggcaccaaattatccaagtgtattaggagactggggcttttttctttaatcccttcttattaatgaagtgcatagtgctgctcccaggagaccactgctgacagatacacagagaagagatcagagaggaaaaactgggaagacataaatgaattatacccagccatgaaacaatgccaactgtctcttccctaaggaagagtacaagtaccctaaaattgaaaggtggtccctacactgaaaacgcacatagtttgtcaaaagtgtacaaaagggaaagagtcttattttaagctttcaggctttcttaaaaacttggggaccagaatttcaatgtatgtttccattgttgaagataacattttcttcaaagagccttaaccttttgtactggaaggaaatattttctggacttaagtagttgcctaaatttaagattcctacactttatttctgccattgatgcttttcctaaacccttatactatctttttattatctgagccttttcctaatgcagctcataggtgctagctagagctgctgctcagtattgaagactttacaaggagattagaaatctttggaaaacatatgtgatgaaattgagctatatgatttatcagagatctgattccaaagagcacagaatactgttctcagaccatgaaaccagacaacacatgtattggtttaaactcgataatgacaggaaaattccaaactagagcagtaaattcaaatggtaagatgaatcctagaaggcctctgattgcagcatgttgacaccaacctcacgttacgaacaattcacagagaatttgcctttgtggcaactgaagatggaagtctggggggcacagacaaccttatcaaacaatataaaagccaatataaattctcataagcactatagaatttgcaaattcagaacattttatacctaaaagtaattctgtctttcctaaagtgtttttaacatgaaaattagtaggaagatgtggttactatttggaaagtgtaatgtaacaaaactctcttttgttaccacaaattttgtgagtttagtactctacagattgccccataagagcagtagcttttgaaactcataattctctgaaataaatgaaagacatttaattcaaggatcaaaaattgtggccatctttgcaaatgactacctatagcctgtgaaaatacatttcaaaaaatgttatgtgcaatgaacactaaatttaagagcagttacagtgtgactcactcatgtttaaaaaaaatcgaagagctaaaaaatacgtctaatttatgtaacccattggaatgtatttctaggttctcttcaggattaattaaataaacatgcaatttatgaaaacatataaacaattatttatcacttttatgacccaaatcacaataaaattgtcatttaggataaactggggagaatagactgaacatatggttatattcacagttatttattaacttaaatgttattccaacattagagctaatgttaaaaagatttaaactgtaacgtctaatatttggaataatatattaaagtattagcactgtggttgattttcttgaattatgttgcatcttgtactactaagcttgtgaaaataaacatttggatgttttaaaaggtaaacatta

SEQ ID NO: 1257 - DNA, 1586 bp, Homo sapiens
  source 1..1586: mol_type = unassigned DNA
cctttctagggacagtttggataattttccgtgaaactggatgatctttgaatattaaatgaaaggagactagaataacagtctcttgactattcatgaaggagctttagcagaagcattctttcttggtgtgcaaatcacgcctggcagcccctgcccacagtacccgaagatggcaggccttgttcccttcacctaaattcataaacctgggtgtagtggcttctgatgctgatttgtttctcttttcagtaagtgtggacctttgtgtaccagagagaacatcatggtggctttcaaaggggtctggactcaagctttctggaaagcagtcacagcggaatttctggccatgcttatttttgttctcctcagcctgggatccaccatcaactggggtggaacagaaaagcctttaccggtcgacatggttctcatctccctttgctttggactcagcattgcaaccatggtgcagtgctttggccatatcagcggtggccacatcaaccctgcagtgactgtggccatggtgtgcaccaggaagatcagcatcgccaagtctgtcttctacatcgcagcccagtgcctgggggccatcattggagcaggaatcctctatctggtcacacctcccagtgtggtgggaggcctgggagtcaccatggttcatggaaatcttaccgctggtcatggtctcctggttgagttgataatcacatttcaattggtgtttactatctttgccagctgtgattccaaacggactgatgtcactggctcaatagctttagcaattggattttctgttgcaattggacatttatttgcaatcaattatactggtgccagcatgaatcccgcccgatcctttggacctgcagttatcatgggaaattgggaaaaccattggatatattgggttgggcccatcataggagctgtcctcgctggtggcctttatgagtatgtcttctgtccagatgttgaattcaaacgtcgttttaaagaagccttcagcaaagctgcccagcaaacaaaaggaagctacatggaggtggaggacaacaggagtcaggtagagacggatgacctgattctaaaacctggagtggtgcatgtgattgacgttgaccggggagaggagaagaaggggaaagaccaatctggagaggtattgtcttcagtatgactagaagatcgcactgaaagcagacaagactccttagaactgtcctcagatttccttccacccattaaggaaacagatttgttataaattagaaatgtgcaggtttgttgtttcatgtcatattactcagtctaaacaataaatatttcataatttacaaaggaggaacggaagaaacctattgtgaattccaaatctaaaaaaagaaatatttttaaaatgttcttaagcaaatatatacctattttatctagttacctttcattaacaaccaattttaaccgtgtgtcaagatttggttaagtcttgcctgacagaactcaaagacacgtctatcagcttattccttctctactggaatattggtatagtcaattcttatttgaatatttat

SEQ ID NO: 1258 - DNA, 1169 bp, Homo sapiens
  source 1..1169: mol_type = unassigned DNA
gttcccatcgcccttgctagtcaccagaagctcctctcccctcaatgagttcactttctcaaaagacagccttcagcaccctggtttcctagaaggcttccccctaatccagagtctggggggagggggagattttcagaatgccatttcaaagcaatcaaatgcaaagctagaaaagacgaccccccccccccacgcacaccttgttttaatgctttatgttcgaaattaagtgtggacctttgtgtaccagagagaacatcatggtggctttcaaaggggtctggactcaagctttctggaaagcagtcacagcggaatttctggccatgcttatttttgttctcctcagcctgggatccaccatcaactggggtggaacagaaaagcctttaccggtcgacatggttctcatctccctttgctttggactcagcattgcaaccatggtgcagtgctttggccatatcagcggtggccacatcaaccctgcagtgactgtggccatggtgtgcaccaggaagatcagcatcgccaagtctgtcttctacatcgcagcccagtgcctgggggccatcattggagcaggaatcctctatctggtcacacctcccagtgtggtgggaggcctgggagtcaccatggttcatggaaatcttaccgctggtcatggtctcctggttgagttgataatcacatttcaattggtgtttactatctttgccagctgtgattccaaacggactgatgtcactggctcaatagctttagcaattggattttctgttgcaattggacatttatttgcaatcaattatactggtgccagcatgaatcccgcccgatcctttggacctgcagttatcatgggaaattgggaaaaccattggatatattgggttgggcccatcataggagctgtcctcgctggtggcctttatgagtatgtcttctgtccagatgttgaattcaaacgtcgttttaaagaagccttcagcaaagctgcccagcaaacaaaaggaagctacatggaggtggaggacaacaggagtcaggtagagacggatgacctgattctaaaacctggagtggtgcatgtgattgacgttgaccggggagaggagaagaaggggaaagaccaatctggagaggtattgtcttcagtatga

SEQ ID NO: 1259 - DNA, 606 bp, Homo sapiens
  source 1..606: mol_type = unassigned DNA
atctttagctattttcaaactaggactccaagcttcttgcaaactctttgctaaataatgccttggtggcatgaggcacatccctaaaatagctaatttactcctagggaatttttgatgattcttaatagtgtgaaaactgattctggcagtatttaggttcatggaaatcttaccgctggtcatggtctcctggttgagttgataatcacatttcaattggtgtttactatctttgccagctgtgattccaaacggactgatgtcactggctcaatagctttagcaattggattttctgttgcaattggacatttatttgcaatcaattatactggtgccagcatgaatcccgcccgatcctttggacctgcagttatcatgggaaattgggaaaaccattggatatattgggttgggcccatcataggagctgtcctcgctggtggcctttatgagtatgtcttctgtccagatgttgaattcaaacgtcgttttaaagaagccttcagcaaagctgcccagcaaacaaaaggaagctacatggaggtggaggacaacaggagtcaggtagagacggatgacctgattctaaaacctggagtg

SEQ ID NO: 1260 - DNA, 552 bp, Homo sapiens
  source 1..552: mol_type = unassigned DNA
ctttgctttggactcagcattgcaaccatggtgcagtgctttggccatatcagcggtggccacatcaaccctgcagtgactgtggccatggtgtgcaccaggaagatcagcatcgccaagtctgtcttctacatcgcagcccagtgcctgggggccatcattggagcaggaatcctctatctggtcacacctcccagtgtggtgggaggcctgggagtcaccatggttcatggaaatcttaccgctggtcatggtctcctggttgagttgataatcacatttcaattggtgtttactatctttgccagctgtgattccaaacggactgatgtcactggctcaatagctttagcaattggattttctgttgcaattggacatttatttgcaatcaattatactggtgccagcatgaatcccgcccgatcctttggacctgcagttatcatgggaaattgggaaaaccattgggtaaccctcatattgatagttcccatcttcctacagttgaggacaattacctgtggggctcttttatttttcattattttg

SEQ ID NO: 1261 - DNA, 575 bp, Homo sapiens
  source 1..575: mol_type = unassigned DNA
actctggctggggaaggcatgagtgacagacccacagcaaggcggtggggcctgggatccaccatcaactggggtggaacagaaaagcctttaccggtcgacatggttctcatctccctttgctttggactcagcattgcaaccatggtgcagtgctttggccatatcagcggtggccacatcaaccctgcagtgactgtggccatggtgtgcaccaggaagatcagcatcgccaagtctgtcttctacatcgcagcccagtgcctgggggccatcattggagcaggaatcctctatctggtcacacctcccagtgtggtgggaggcctgggagtcaccatggttcatggaaatcttaccgctggtcatggtctcctggttgagttgataatcacatttcaattggtgtttactatctttgccagctgtgattccaaacggactgatgtcactggctcaatagctttagcaattggattttctgttgcaattggacatttatttgcaatcaattatactggtgccagcatgaatcccgcccgatcctttggacctgcagttatcatgggaaattg

SEQ ID NO: 1262 - DNA, 567 bp, Homo sapiens
  source 1..567: mol_type = unassigned DNA
agacaagtggccgtaatctgactcccagcacacagggagctgcggggcaggcaatgagagctgcactctggctggggaaggcatgagtgacagacccacagcaaggcggtggggtgtggacctttgtgtaccagagagaacatcatggtggctttcaaaggggtctggactcaagctttctggaaagcagtcacagcggaatttctggccatgcttatttttgttctcctcagcctgggatccaccatcaactggggtggaacagaaaagcctttaccggtcgacatggttctcatctccctttgctttggactcagcattgcaaccatggtgcagtgctttggccatatcagcggtggccacatcaaccctgcagtgactgtggccatggtgtgcaccaggaagatcagcatcgccaagtctgtcttctacatcgcagcccagtgcctgggggccatcattggagcaggaatcctctatctggtcacacctcccagtgtggtgggaggcctgggagtcaccatggttcatggaaatcttaccgctggtcatggtctcctggttgag

SEQ ID NO: 1263 - DNA, 891 bp, Homo sapiens
  source 1..891: mol_type = unassigned DNA
atgagtgacagacccacagcaaggcggtggggtaagtgtggacctttgtgtaccagagagaacatcatggtggctttcaaaggggtctggactcaagctttctggaaagcagtcacagcggaatttctggccatgcttatttttgttctcctcagcctgggatccaccatcaactggggtggaacagaaaagcctttaccggtcgacatggttctcatctccctttgctttggactcagcattgcaaccatggtgcagtgctttggccatatcagcggtggccacatcaaccctgcagtgactgtggccatggtgtgcaccaggaagatcagcatcgccaagtctgtcttctacatcgcagcccagtgcctgggggccatcattggagcaggaatcctctatctggtcacacctcccagtgtggtgggaggcctgggagtcaccatggttcatggaaatcttaccgctggtcatggtctcctggttgagttgataatcacatttcaattggtgtttactatctttgccagctgtgattccaaacggactgatgtcactggctcaatagctttagcaattggattttctgttgcaattggacatttatttgcaatatattgggttgggcccatcataggagctgtcctcgctggtggcctttatgagtatgtcttctgtccagatgttgaattcaaacgtcgttttaaagaagccttcagcaaagctgcccagcaaacaaaaggaagctacatggaggtggaggacaacaggagtcaggtagagacggatgacctgattctaaaacctggagtggtgcatgtgattgacgttgaccggggagaggagaagaaggggaaagaccaatctggagaggtattgtcttcagtatga

SEQ ID NO: 1264 - DNA, 2879 bp, Homo sapiens
  source 1..2879: mol_type = unassigned DNA
aggcagacttgagtctcctttctgtccatgggctcgggccactgtcttaggtccacccgtggctccaaaatggtctcctggtccgtgatagcaaagatccaggaaatactgcagaggaagatggtgcgagagttcctggccgagttcatgagcacatatgtcatgatggtattcggccttggttccgtggcccatatggttctaaataaaaaatatgggagctaccttggtgtcaacttgggttttggcttcggagtcaccatgggagtgcacgtggcaggccgcatctctggagcccacatgaacgcagctgtgacctttgctaactgtgcgctgggccgcgtgccctggaggaagtttccggtctatgtgctggggcagttcctgggctccttcctggcggctgccaccatctacagtctcttctacacggccattctccacttttcgggtggacagctgatggtgaccggtcccgtcgctacagctggcatttttgccacctaccttcctgatcacatgacattgtggcggggcttcctgaatgaggcgtggctgaccgggatgctccagctgtgtctcttcgccatcacggaccaggagaacaacccagcactgccaggaacagaggcgctggtgataggcatcctcgtggtcatcatcggggtgtcccttggcatgaacacaggatatgccatcaacccgtcccgggacctgcccccccgcatcttcaccttcattgctggttggggcaaacaggtcttcagcaatggggagaactggtggtgggtgccagtggtggcaccacttctgggtgcctatctaggtggcatcatctacctggtcttcattggctccaccatcccacgggagcccctgaaattggaggattctgtggcgtatgaagaccacgggataaccgtattgcccaagatgggatctcatgaacccacgatctctcccctcacccccgtctctgtgagccctgccaacagatcttcagtccaccctgccccacccttacatgaatccatggccctagagcacttctaagcagagattatttgtgatcccatccattccccaataaagcaaggcttgtccgacagcagtacccccacttcctgggggcctcctgtggttgggcttccctcctgggttcttacaggagctccagggctatgtcttagcccaaggtgtagaggtgaggcacctcaagtctttcatgccctgggaactggggtgccccagggggagaatggggaagagatgacctgcgccctcagtaggaacagggtgagatgaaagaacgacagaatgagggattttcaggcacgggggaaggaagggtggttttggggaacagaccgtagctgactggttgggggccggctttggaaatactttgaggggatcctgagattggactctagactctcccctggttcttcccttccctgagttctggccggttcttggaccagacaaggcaaggcccaagaatgtagatcagaattttttagcctttttttcattagttccttccctagtattcttctagattttttttttcttaatcacatgaaattttaataccacagatgtactatatatctgtttatgttctgtatatgttctgtgctttatacataaaaaagagtaagatttttttttcacctccccttttaagaatcagttttaattcccttgagaatgcttgttatagattgaaggctgttaaggggttgggctcctctttcttcttcctggtgccagagtgctcccacatgaaggaataggaaaggaagatgcaaagagggaaatccttcgaccacatgaagacacaggaagaggcctcatagggctccaagggctccagggaagcaggtgcagaggttgggtggggtgaggggccaggatccactgaccctggggccaggcaggaatcactctgttgcctggggctcagaaggcagcatcacccatggttcctgtccttgctcatgcattttgcctttcaataattattgtgcatctactgtgtgcaggccctgcctggacactggggatgcgcagtggatgcgctgggctctgcctttgagggttgcagtttaatgggggacaggtaattatatggaagaaggtgagtgcagagtgggaggcttggaggctgtggggctcggggtaggggagctcacatccagcctctgggccaaggccaggaggcttcccagaggaggagacagagcagggtatggtggtggggggtgtcctttttgggggtgggagctgcactttacagtttgaggggatgggcagaggaggctgggcttcgttctggaggtggggacacggtgaggtgaggtttagaaagcacacctgagccgcagtgtgtaggatgctggaaatggtggagatgggcctgcgaaagtgatgacccaggagcagcagccgggcacctaacaatgggtcagcaccgtgggcgtggagacgagagcggggattgatcaataccggagaagtacaatgtacaggacttgggttccatttggatggagtgggtgagggagagggaggagtcagaaatggcttccggtttccagcttgggcctggggattggagatgtccccactgagagtagggcacaagtgaggaaatggtttggagaggaagataagttacatcatggacatgctgagtctgagttgcctatgggacttggaatggggggtggcaaaatgtgtgtgatcttgagcaagatattcaacccttctgggccttggtcttcttatttgtaaaatggcgataagaatattacttcccatttgtgttgctgtgaatattaaatgcgctaccacatgtaaaatgttgagaatca

SEQ ID NO: 1265 - DNA, 1668 bp, Homo sapiens
  source 1..1668: mol_type = unassigned DNA
tggactggggacacagggatagctgagccccagctgggggtggaagctgagccagggacagtcacggaggaacaagatcaagatgcgctgtaactgagaagcccccaaggcggaggctgagaatcagagacatttcagcagacatctacaaatctgaaagacaaaacatggttcaagcatccgggcacaggcggtccacccgtggctccaaaatggtctcctggtccgtgatagcaaagatccaggaaatactgcagaggaagatggtgcgagagttcctggccgagttcatgagcacatatgtcatgatggagcccacatgaacgcagctgtgacctttgctaactgtgcgctgggccgcgtgccctggaggaagtttccggtctatgtgctggggcagttcctgggctccttcctggcggctgccaccatctacagtctcttctacacggccattctccacttttcgggtggacagctgatggtgaccggtcccgtcgctacagctggcatttttgccacctaccttcctgatcacatgacattgtggcggggcttcctgaatgaggcgtggctgaccgggatgctccagctgtgtctcttcgccatcacggaccaggagaacaacccagcactgccaggaacagaggcgctggtgataggcatcctcgtggtcatcatcggggtgtcccttggcatgaacacaggatatgccatcaacccgtcccgggacctgcccccccgcatcttcaccttcattgctggttggggcaaacaggtcttcaggtactgcccctgcccaggcccattcctttgagtttttctgtgggtcccctgtgtgttgaggggtggggggtgatgtgaggggcagcacaggagggtcctgctgagcccccaggtagcctggggagcaggagtgagtcccaacatttccccaggccagtacagatacagatcctgcacctgcactgagtgtcaacgctgtccctgaattgggctgaggctgaccagggccctgggttgggggtgtttcctggggtagcctggggatgactcctctgctcaacctgtcttggcccgaggtggatgagggtgctgtcctgggcatcagccccctcagcaggcctctgcctcttgcctgcagcaatggggagaactggtggtgggtgccagtggtggcaccacttctgggtgcctatctaggtggcatcatctacctggtcttcattggctccaccatcccacgggagcccctgaaattggaggattctgtggcgtatgaagaccacgggataaccgtattgcccaagatgggatctcatgaacccacgatctctcccctcacccccgtctctgtgagccctgccaacagatcttcagtccaccctgccccacccttacatgaatccatggccctagagcacttctaagcagagattatttgtgatcccatccattccccaataaagcaaggcttgtccgacagcagtacccccacttcctgggggcctcctgtggttgggcttccctcctgggttcttacaggagctccagggctatgtcttagcccaaggtgtagaggtgaggcacctcaagtctttcatgccctgggaactggggtgccccagggggagaatggggaagagatgacctgcgccctcagtagga

SEQ ID NO: 1266 - DNA, 1068 bp, Homo sapiens
  source 1..1068: mol_type = unassigned DNA
ggggacacagggatagctgagccccagctgggggtggaagctgagccagggacagtcacggaggaacaagatcaagatgcgctgtaactgagaagcccccaaggcggaggctgagaatcagagacatttcagcagacatctacaaatctgaaagacaaaacatggttcaagcatccgggcacaggcggtattcggccttggttccgtggcccatatggttctaaataaaaaatatgggagctaccttggtgtcaacttgggttttggcttcggagtcaccatgggagtgcacgtggcaggccgcatctctggagcccacatgaacgcagctgtgacctttgctaactgtgcgctgggccgcgtgccctggaggaagtttccggtctatgtgctggggcagttcctgggctccttcctggcggctgccaccatctacagtctcttctacacggccattctccacttttcgggtggacagctgatggtgaccggtcccgtcgctacagctggcatttttgccacctaccttcctgatcacatgacattgtggcggggcttcctgaatgaggcgtggctgaccgggatgctccagctgtgtctcttcgccatcacggaccaggagaacaacccagcactgccaggaacagaggcgctggtgataggcatcctcgtggtcatcatcggggtgtcccttggcatgaacacaggatatgccatcaacccgtcccgggacctgcccccccgcatcttcaccttcattgctggttggggcaaacaggtcttcaggtggcatcatctacctggtcttcattggctccaccatcccacgggagcccctgaaattggaggattctgtggcgtatgaagaccacgggataaccgtattgcccaagatgggatctcatgaacccacgatctctcccctcacccccgtctctgtgagccctgccaacagatcttcagtccaccctgccccacccttacatgaatccatggccctagagcacttctaagcagagattatttgtgatcccatccattccccaataaagcaaggcttgtccgaca

SEQ ID NO: 1267 - DNA, 1256 bp, Homo sapiens
  source 1..1256: mol_type = unassigned DNA
ggctctggactggggacacagggatagctgagccccagctgggggtggaagctgagccagggacagtcacggaggaacaagatcaagatgcgctgtaactgagaagcccccaaggcggaggctgagaatcagagacatttcagcagacatctacaaatctgaaagacaaaacatggttcaagcatccgggcacaggcggtccacccgtggctccaaaatggtctcctggtccgtgatagcaaagatccaggaaatactgcagaggaagatggtgcgagagttcctggccgagttcatgagcacatatgtcatgatggtattcggccttggttccgtggcccatatggttctaaataaaaaatatgggagctaccttggtgtcaacttgggttttggcttcggagtcaccatgggagtgcacgtggcaggccgcatctctggagcccacatgaacgcagctgtgacctttgctaactgtgcgctgggccgcgtgccctggaggaagtttccggtctatgtgctggggcagttcctgggctccttcctggcggctgccaccatctacagtctcttctacacggccattctccacttttcgggtggacagctgatggtgaccggtcccgtcgctacagctggcatttttgccacctaccttcctgatcacatgacattgtggcggggcttcctgaatgaggcgtggctgaccgggatgctccagctgtgtctcttcgccatcacggaccaggagaacaacccagcactgccaggaacagaggcgctggtgataggcatcctcgtggtcatcatcggggtgtcccttggcatgaacacaggatatgccatcaacccgtcccgggacctgcccccccgcatcttcaccttcattgctggttggggcaaacaggtcttcagcaatggggagaactggtggtgggtgccagtggtggcaccacttctgggtgcctatctaggtggcatcatctacctggtcttcattggctccaccatcccacgggagcccctgaaattggaggattctgtggcgtatgaagaccacgggataaccgtattgcccaagatgggatctcatgaacccacgatctctcccctcacccccgtctctgtgagccctgccaacagatcttcagtccaccctgccccacccttacatgaatccatggccctagagcacttctaagcagagattatttgtgatcccatccattccccaataaagcaaggcttgtccgaca

SEQ ID NO: 1268 - DNA, 474 bp, Homo sapiens
  source 1..474: mol_type = unassigned DNA
agcgctcgaggccgccctgggagagctgagaggcaggctctggactggggacacagggatagctgagccccagctgggggtggaagctgagccagggacagtcacggaggaacaagatcaagatgcgctgtaactgagaagcccccaaggcggaggctgagaatcagagacatttcagcagacatctacaaatctgaaagacaaaacatggttcaagcatccgggcacaggcggcgtggctgaccgggatgctccagctgtgtctcttcgccatcacggaccaggagaacaacccagcactgccaggaacagaggcgctggtgataggcatcctcgtggtcatcatcggggtgtcccttggcatgaacacaggatatgccatcaacccgtcccgggacctgcccccccgcatcttcaccttcattgctggttggggcaaacaggtcttcaggtggcatcatctacctggtcttc

SEQ ID NO: 1269 - DNA, 675 bp, Homo sapiens
  source 1..675: mol_type = unassigned DNA
gagtctcctttctgtccatgggctcgggccactgtcttaggtccacccgtggctccaaaatggtctcctggtccgtgatagcaaagatccaggaaatactgcagaggaagatggtgcgagagttcctggccgagttcatgagcacatatgtcatgatggagcccacatgaacgcagctgtgacctttgctaactgtgcgctgggccgcgtgccctggaggaagtttccggtctatgtgctggggcagttcctgggctccttcctggcggctgccaccatctacagtctcttctacacggccattctccacttttcgggtggacagctgatggtgaccggtcccgtcgctacagctggcatttttgccacctaccttcctgatcacatgacattgtggcggggcttcctgaatgaggcgtggctgaccgggatgctccagctgtgtctcttcgccatcacggaccaggagaacaacccagcactgccaggaacagaggcgctggtgataggcatcctcgtggtcatcatcggggtgtcccttggcatgaacacaggatatgccatcaacccgtcccgggacctgcccccccgcatcttcaccttcattgctggttggggcaaacaggtcttcagcaatggggagaactggtggtgggtgccagtggtggcaccact

SEQ ID NO: 1270 - DNA, 1062 bp, Homo sapiens
  source 1..1062: mol_type = unassigned DNA
gagtctcctttctgtccatgggctcgggccactgtcttaggtccacccgtggctccaaaatggtctcctggtccgtgatagcaaagatccaggaaatactgcagaggaagatggtgcgagagttcctggccgagttcatgagcacatatgtcatgatggtattcggccttggttccgtggcccatatggttctaaataaaaaatatgggagctaccttggtgtcaacttgggttttggcttcggagtcaccatgggagtgcacgtggcaggccgcatctctggagcccacatgaacgcagctgtgacctttgctaactgtgcgctgggccgcgtgccctggaggaagtttccggtctatgtgctggggcagttcctgggctccttcctggcggctgccaccatctacagtctcttctacacggccattctccacttttcgggtggacagctgatggtgaccggtcccgtcgctacagctggcatttttgccacctaccttcctgatcacatgacattgtggcggggcttcctgaatgaggcgtggctgaccgggatgctccagctgtgtctcttcgccatcacggaccaggagaacaacccagcactgccaggaacagaggcgctggtgataggcatcctcgtggtcatcatcggggtgtcccttggcatgaacacaggatatgccatcaacccgtcccgggacctgcccccccgcatcttcaccttcattgctggttggggcaaacaggtcttcaggtactgcccctgcccaggcccattcctttgagtttttctgtgggtcccctgtgtgttgaggggtggggggtgatgtgaggggcagcacaggagggtcctgctgagcccccaggtagcctggggagcaggagtgagtcccaacatttccccaggccagtacagatacagatcctgcacctgcactgagtgtcaacgctgtccctgaattgggctgaggctgaccagggccctgggttgggggtgtttcctggggtagcctggggatgactcctctgctcaacctgtcttggcccgaggtggatgag

SEQ ID NO: 1271 - DNA, 1270 bp, Homo sapiens
  source 1..1270: mol_type = unassigned DNA
cttactgacctctcccctggaggagcaggagcagcgctcgaggccgccctgggagagctgagaggcaggctctggactggggacacagggatagctgagccccagctgggggtggaagctgagccagggacagtcacggaggaacaagatcaagatgcgctgtaactgagaagcccccaaggcggaggctgagaatcagagacatttcagcagacatctacaaatctgaaagacaaaacatggttcaagcatccgggcacaggcggtccacccgtggctccaaaatggtctcctggtccgtgatagcaaagatccaggaaatactgcagaggaagatggtgcgagagttcctggccgagttcatgagcacatatgtcatgatggtattcggccttggttccgtggcccatatggttctaaataaaaaatatgggagctaccttggtgtcaacttgggttttggcttcggagtcaccatgggagtgcacgtggcaggccgcatctctggagcccacatgaacgcagctgtgacctttgctaactgtgcgctgggccgcgtgccctggaggaagtttccggtctatgtgctggggcagttcctgggctccttcctggcggctgccaccatctacagtctcttctacacggccattctccacttttcgggtggacagctgatggtgaccggtcccgtcgctacagctggcatttttgccacctaccttcctgatcacatgacattgtggcggggcttcctgaatgaggcgtggctgaccgggatgctccagctgtgtctcttcgccatcacggaccaggagaacaacccagcactgccaggaacagaggcgctggtgataggcatcctcgtggtcatcatcggggtgtcccttggcatgaacacaggatatgccatcaacccgtcccgggacctgcccccccgcatcttcaccttcattgctggttggggcaaacaggtcttcaggtactgcccctgcccaggcccattcctttgagtttttctgtgggtcccctgtgtgttgaggggtggggggtgatgtgaggggcagcacaggagggtcctgctgagcccccaggtagcctggggagcaggagtgagtcccaacatttccccaggccagtacagatacagatcctgcacctgcactgagtgtcaacgctgtccctgaattgggctgaggctgaccagggccctgggttgggggtgtttcctggggtagcctggggatgactcctctgctcaacctgtctt

SEQ ID NO: 1272 - DNA, 1479 bp, Homo sapiens
  source 1..1479: mol_type = unassigned DNA
atagctgagccccagctgggggtggaagctgagccagggacagtcacggaggaacaagatcaagatgcgctgtaactgagaagcccccaaggcggaggctgagaatcagagacatttcagcagacatctacaaatctgaaagacaaaacatggttcaagcatccgggcacaggcgaggcttgttggcaccgtggattgcactttcagctccccacccgcccatctgcaaagtggcctcattggtgtgccatttttactggtccagtcccaactagaaggggcatggcctggccatctaccccagttcctctccatgtccccgtggctctcaagtgtctccaattccagctgtcccagctgccctgcgcaagaggaggcgtgtgtgggcgaggctgctgggttacctattaactcagctgggagttgaagagccgatgggcagcaggcagacttgagtctcctttctgtccatgggctcgggccactgtcttaggtccacccgtggctccaaaatggtctcctggtccgtgatagcaaagatccaggaaatactgcagaggaagatggtgcgagagttcctggccgagttcatgagcacatatgtcatgatggtattcggccttggttccgtggcccatatggttctaaataaaaaatatgggagctaccttggtgtcaacttgggttttggcttcggagtcaccatgggagtgcacgtggcaggccgcatctctggagcccacatgaacgcagctgtgacctttgctaactgtgcgctgggccgcgtgccctggaggaagtttccggtctatgtgctggggcagttcctgggctccttcctggcggctgccaccatctacagtctcttctacacggccattctccacttttcgggtggacagctgatggtgaccggtcccgtcgctacagctggcatttttgccacctaccttcctgatcacatgacattgtggcggggcttcctgaatgaggcgtggctgaccgggatgctccagctgtgtctcttcgccatcacggaccaggagaacaacccagcactgccaggaacagaggcgctggtgataggcatcctcgtggtcatcatcggggtgtcccttggcatgaacacaggatatgccatcaacccgtcccgggacctgcccccccgcatcttcaccttcattgctggttggggcaaacaggtcttcaggtactgcccctgcccaggcccattcctttgagtttttctgtgggtcccctgtgtgttgaggggtggggggtgatgtgaggggcagcacaggagggtcctgctgagcccccaggtagcctggggagcaggagtgagtcccaacatttccccaggccagtacagatacagatcctgcacctgcactgagtgtcaacgctgtccctgaattgggctgaggctgaccagggccctgggttgggggtgtttcctggggtagcctggggatgact

SEQ ID NO: 1273 - DNA, 1026 bp, Homo sapiens
  source 1..1026: mol_type = unassigned DNA
agaactcggtctccacggcactgctggccggacgagggatgttattttgggcagtgcatctggacttggttcaagtggcaccagccaaacccctgccttactgacctctcccctggaggagcaggagcagcgctcgaggccgccctgggagagctgagaggcaggctctggactggggacacagggatagctgagccccagctgggggtggaagctgagccagggacagtcacggaggaacaagatcaagatgcgctgtaactgagaagcccccaaggcggaggctgagaatcagagacatttcagcagacatctacaaatctgaaagacaaaacatggttcaagcatccgggcacaggcggtccacccgtggctccaaaatggtctcctggtccgtgatagcaaagatccaggaaatactgcagaggaagatggtgcgagagttcctggccgagttcatgagcacatatgtcatgatggagcccacatgaacgcagctgtgacctttgctaactgtgcgctgggccgcgtgccctggaggaagtttccggtctatgtgctggggcagttcctgggctccttcctggcggctgccaccatctacagtctcttctacagcgtggctgaccgggatgctccagctgtgtctcttcgccatcacggaccaggagaacaacccagcactgccaggaacagaggcgctggtgataggcatcctcgtggtcatcatcggggtgtcccttggcatgaacacaggatatgccatcaacccgtcccgggacctgcccccccgcatcttcaccttcattgctggttggggcaaacaggtcttcaggtactgcccctgcccaggcccattcctttgagtttttctgtgggtcccctgtgtgttgaggggtggggggtgatgtgaggggcagcacaggagggtcctgctgagcccccaggtagcctggggagcaggagtgagtcccaacatttccccaggccagtacagatacagatcctgcacctgcactgagtgtc

SEQ ID NO: 1274 - DNA, 998 bp, Homo sapiens
  source 1..998: mol_type = unassigned DNA
aaagcgccgatgagctgttctggagcacggggcccagcacagggtgagaggtgagatgcctgtggggaaatccaggagatagttaaacacatgcaaggggctggagctcaggagaggcttggtctggaaggaaaaagttgaagttcatcacaacacaggtggtagttgtcaatactgtccagagacagtgtacagaaagagaaaaggatgggttgaggacagagccctgaggaatgaagaagggcatgcaaaggagcctgagaaggaacggtcagagaggtgggaggagaaccagagcagactgcatgacagaggggggcagtggttccaccaggaagaagccgtcagcggcgtgggcagcggcagatgggccacgcgaggagcccacatgaacgcagctgtgacctttgctaactgtgcgctgggccgcgtgccctggaggaagtttccggtctatgtgctggggcagttcctgggctccttcctggcggctgccaccatctacagtctcttctacacggccattctccacttttcgggtggacagctgatggtgaccggtcccgtcgctacagctggcatttttgccacctaccttcctgatcacatgacattgtggcggggcttcctgaatgaggcgtggctgaccgggatgctccagctgtgtctcttcgccatcacggaccaggagaacaacccagcactgccaggaacagaggcgctggtgataggcatcctcgtggtcatcatcggggtgtcccttggcatgaacacaggatatgccatcaacccgtcccgggacctgcccccccgcatcttcaccttcattgctggttggggcaaacaggtcttcaggtactgcccctgcccaggcccattcctttgagtttttctgtgggtcccctgtgtgttgaggggtggggggtgatgtgaggggcagcacaggagggtcctgctgagcccccaggtagcctggggagcaggagtgagtcccaaca

SEQ ID NO: 1275 - DNA, 677 bp, Homo sapiens
  source 1..677: mol_type = unassigned DNA
gttgcccttggagctggcctcctggctgtgggggagagttggatgggctgggccacattcactgatcagggagaggaggggctggagccatccgggccctggaaaaccagccatacacgagcccacatgaacgcagctgtgacctttgctaactgtgcgctgggccgcgtgccctggaggaagtttccggtctatgtgctggggcagttcctgggctccttcctggcggctgccaccatctacagtctcttctacacggccattctccacttttcgggtggacagctgatggtgaccggtcccgtcgctacagctggcatttttgccacctaccttcctgatcacatgacattgtggcggggcttcctgaatgaggcgtggctgaccgggatgctccagctgtgtctcttcgccatcacggaccaggagaacaacccagcactgccaggaacagaggcgctggtgataggcatcctcgtggtcatcatcggggtgtcccttggcatgaacacaggatatgccatcaacccgtcccgggacctgcccccccgcatcttcaccttcattgctggttggggcaaacaggtcttcaggtactgcccctgcccaggcccattcctttgagtttttctgtgggtcccctgtgtgttgaggggtggggggtgatgtgaggggca

SEQ ID NO: 1276 - DNA, 973 bp, Homo sapiens
  source 1..973: mol_type = unassigned DNA
gagccagggacagtcacggaggaacaagatcaagatgcgctgtaactgagaagcccccaaggcggaggctgagaatcagagacatttcagcagacatctacaaatctgaaagacaaaacatggttcaagcatccgggcacaggcggtccacccgtggctccaaaatggtctcctggtccgtgatagcaaagatccaggaaatactgcagaggaagatggtgcgagagttcctggccgagttcatgagcacatatgtcatgatgagagaaggtgatgactggtttggggttggagaagaaagcacatgtttgagagggctgtggaagacagaatcagggagactctgccagcagaagatgtgggcaaagcgccgatgagctgttctggagcacggggcccagcacagggtgagaggagcccacatgaacgcagctgtgacctttgctaactgtgcgctgggccgcgtgccctggaggaagtttccggtctatgtgctggggcagttcctgggctccttcctggcggctgccaccatctacagtctcttctacacggccattctccacttttcgggtggacagctgatggtgaccggtcccgtcgctacagctggcatttttgccacctaccttcctgatcacatgacattgtggcggggcttcctgaatgaggcgtggctgaccgggatgctccagctgtgtctcttcgccatcacggaccaggagaacaacccagcactgccaggaacagaggcgctggtgataggcatcctcgtggtcatcatcggggtgtcccttggcatgaacacaggatatgccatcaacccgtcccgggacctgcccccccgcatcttcaccttcattgctggttggggcaaacaggtcttcaggtactgcccctgcccaggcccattcctttgagtttttctgtgggtcccctgtgtgttgaggggtggggggtgatgtgaggggca

SEQ ID NO: 1277 - DNA, 875 bp, Homo sapiens
  source 1..875: mol_type = unassigned DNA
gagttgaagagccgatgggcagcaggcagacttgagtctcctttctgtccatgggctcgggccactgtcttaggtccacccgtggctccaaaatggtctcctggtccgtgatagcaaagatccaggaaatactgcagaggaagatggtgcgagagttcctggccgagttcatgagcacatatgtcatgatgagagaaggtgatgactggtttggggttggagaagaaagcacatgtttgagagggctgtggaagacagaatcagggagactctgccagcagaagatgtgggcaaagcgccgatgagctgttctggagcacggggcccagcacagggtgagaggagcccacatgaacgcagctgtgacctttgctaactgtgcgctgggccgcgtgccctggaggaagtttccggtctatgtgctggggcagttcctgggctccttcctggcggctgccaccatctacagtctcttctacacggccattctccacttttcgggtggacagctgatggtgaccggtcccgtcgctacagctggcatttttgccacctaccttcctgatcacatgacattgtggcggggcttcctgaatgaggcgtggctgaccgggatgctccagctgtgtctcttcgccatcacggaccaggagaacaacccagcactgccaggaacagaggcgctggtgataggcatcctcgtggtcatcatcggggtgtcccttggcatgaacacaggatatgccatcaacccgtcccgggacctgcccccccgcatcttcaccttcattgctggttggggcaaacaggtcttcaggtactgcccctgcccaggcccattcctttgagtttttctgtgggtcccctgtgtgttg

SEQ ID NO: 1278 - DNA, 575 bp, Homo sapiens
  source 1..575: mol_type = unassigned DNA
aactcggtctccacggcactgctggccggacgagggatgttattttgggcagtgcatctggacttggttcaagtggcaccagccaaacccctgccttactgacctctcccctggaggagcaggagcagcgctcgaggccgccctgggagagctgagaggcaggctctggactggggacacagggatagctgagccccagctgggggtggaagctgagccagggacagtcacggaggaacaagatcaagatgcgctgtaactgagaagcccccaaggcggaggctgagaatcagagacatttcagcagacatctacaaatctgaaagacaaaacatggttcaagcatccgggcacaggcggtccacccgtggctccaaaatggtctcctggtccgtgatagcaaagatccaggaaatactgcagaggaagatggtgcgagagttcctggccgagttcatgagcacatatgtcatgatggcgtggctgaccgggatgctccagctgtgtctcttcgccatcacggaccaggagaacaacccagcactgccaggaacagaggcgctggtgataggcat

SEQ ID NO: 1279 - DNA, 524 bp, Homo sapiens
  source 1..524: mol_type = unassigned DNA
agtctcctttctgtccatgggctcgggccactgtcttaggtccacccgtggctccaaaatggtctcctggtccgtgatagcaaagatccaggaaatactgcagaggaagatggtgcgagagttcctggccgagttcatgagcacatatgtcatgatggagcccacatgaacgcagctgtgacctttgctaactgtgcgctgggccgcgtgccctggaggaagtttccggtctatgtgctggggcagttcctgggctccttcctggcggctgccaccatctacagtctcttctacagtgagtatcctgcccgggtgtccgcctctggcctcagccgcctcctatgaaatatgggcagattggacctcagtgtcctgatttgtaaaaaatagctgggagaaaaaagccttggagatcccccaccctctaacctataacctcatttctgggaccccggtggggcttagttgggagcaggttcgcatgacagtctgtgtctccgcagcggccattctccacttttcgg

SEQ ID NO: 1280 - DNA, 551 bp, Homo sapiens
  source 1..551: mol_type = unassigned DNA
agagggaactgggctagagaatcaggaggacagacagggtgaggggacttcgggctaccttcatgctgtcagttagagataaagataggagtacaaaggggaatttttgggtgaggtacacgggtgaaatgagttttcagggcctcatcctgtgtgttcaccttctgtgtgtgtgtgtgtgcatgcgtgcatgtgtgtgtgtgtgcaggtcctggacagtcgcagcttaagttagcagcaagaggacttgaggttaaaggtatagcacgcaaatatgaggctggagccactgagtagaggctgagggcatctccacagtccaaagccgggctgcagacacggaagcatctacaaatctgaaagacaaaacatggttcaagcatccgggcacaggcggtccacccgtggctccaaaatggtctcctggtccgtgatagcaaagatccaggaaatactgcagaggaagatggtgcgagagttcctggccgagttcatgagcacatatgtcatgatggagcccacatgaacgcagctgtgacctttgctaactg

SEQ ID NO: 1281 - DNA, 585 bp, Homo sapiens
  source 1..585: mol_type = unassigned DNA
gatgttattttgggcagtgcatctggacttggttcaagtggcaccagccaaacccctgccttactgacctctcccctggaggagcaggagcagcgctcgaggccgccctgggagagctgagaggcaggctctggactggggacacagggatagctgagccccagctgggggtggaagctgagccagggacagtcacggaggaacaagatcaagatgcgctgtaactgagaagcccccaaggcggaggctgagaatcagagacatttcagcagagtcctggacagtcgcagcttaagttagcagcaagaggacttgaggttaaaggtatagcacgcaaatatgaggctggagccactgagtagaggctgagggcatctccacagtccaaagccgggctgcagacacggaagcatctacaaatctgaaagacaaaacatggttcaagcatccgggcacaggcggtccacccgtggctccaaaatggtctcctggtccgtgatagcaaagatccaggaaatactgcagaggaagatggtgcgagagttcctggccgagttcatgagcacatatgtcatgatgagagaa

SEQ ID NO: 1282 - DNA, 566 bp, Homo sapiens
  source 1..566: mol_type = unassigned DNA
gacgagggatgttattttgggcagtgcatctggacttggttcaagtggcaccagccaaacccctgccttactgacctctcccctggaggagcaggagcagcgctcgaggccgccctgggagagctgagaggcaggctctggactggggacacagggatagctgagccccagctgggggtggaagctgagccagggacagtcacggaggaacaagatcaagatgcgctgtaactgagaagcccccaaggcggaggctgagaatcagagacatttcagcagacatctacaaatctgaaagacaaaacatggttcaagcatccgggcacaggcggtaagtaccccaccctcttctcaccctccagccccctgtccttcacccagcccacttcagtgccctccctgttccatcctcagcctctcccttggggcagctgtccccactcgacctcctcctccccacccacccactcgcctctgaggtcccagaagaagagcatcttccacctgttgcctgggctgggtcctggggtgaggggaggctcagaaatacttggatgagggtcaag

SEQ ID NO: 1283 - DNA, 2803 bp, Homo sapiens
  source 1..2803: mol_type = unassigned DNA
ccaccagaagacgattaagccacagcctctaattggaacggcatttgtacagtcagagactcttaccagacatctccaggaatctgtgagccattgtcaaaacgtccattttcatctggctgtgaaagtgaggaccacaacaggtaggtattggtagaaacaggagtcctcagagaagccccaagatgcagcctgagggagcagaaaagggaaaaagcttcaagcagagactggtcttgaagagcagcttagcgaaagaaaccctctctgagttcttgggcacgttcatcttgattgtccttggatgtggctgtgttgcccaagctattctcagtcgaggacgttttggaggggtcatcactatcaatgttggattttcaatggcagttgcaatggccatttatgtggctggcggtgtctctggtggtcacatcaacccagctgtgtctttagcaatgtgtctctttggacggatgaaatggttcaaattgccattttatgtgggagcccagttcttgggagcctttgtgggggctgcaaccgtctttggcatttactatgatggacttatgtcctttgctggtggaaaactgctgatcgtgggagaaaatgcaacagcacacatttttgcaacatacccagctccgtatctatctctggcgaacgcatttgcagatcaagtggtggccaccatgatactcctcataatcgtctttgccatctttgactccagaaacttgggagcccccagaggcctagagcccattgccatcggcctcctgattattgtcattgcttcctccctgggactgaacagtggctgtgccatgaacccagctcgagacctgagtcccagacttttcactgccttggcaggctgggggtttgaagtcttcagagctggaaacaacttctggtggattcctgtagtgggccctttggttggtgctgtcattggaggcctcatctatgttcttgtcattgaaatccaccatccagagcctgactcagtctttaagacagaacaatctgaggacaaaccagagaaatatgaactcagtgtcatcatgtagtggcatgctcagctctggatttgcagtcagtttgggattctcttcagaaagatggcatctaagtgtctgtgttcttgtaagcctgaggtggaatccacccagttttgtctgctagccatatgggacatctaattggaaaagcatctgcataaaagtttggaaacaatgaccacttctctaccattgtcccccacccccaccccccagaataacgctgactgtcccctgaaacagccttctctcctgccctgtttatttcatcctcgatgggaattcttgctaggtaagcactaataactcggcatgaaatggtgtcaccaaaacccttttcttcagtatcgacaaagattacattctgagtaccaaccaaaccctaaattgaaagacaaaactatggtttcagtcaacatattcatgaattagggagctaatgggttaagcttccagttcccgctatgctactggatttgtataaatactgatattctccaaacctagtggtgtagggagcaagagaatgcagctggaaggcacaaggggaggacattgtggcattcagaaactgcaggagacaagatgaatttgagaagccaaatggaatttttaatggaaaccatttatcagattaatctcttgctctcctgcattttagaggacaccaattaatttcctggtctttagtatataataacctaaaataccattgtaacctcagtcatgaaaaatacatcactctgtctttttagctcaaatgtattttcctaattgcccacttgagaacagacatttgacaagttatatcaacgactgtgcttgtccattattttacacatgccctagaagccaaaactgaaagccactggatcctggtctagctgaatcttcagagtgggaggtctccaaaaagatattaccttattgggcttaacaattcacaaggcactttcacacccattatctaatttaatcctcataatgactatgtgaggcaaatgccacattgcccatttttcagataaagaaacaaaatcttagggaagataagttgagttgtccaagagcacactgaaagttgaatgttatctaatgcattcctctacctttcagaagatcagtagctggctgacaatctttgccaaatcttccttgctagccagaagtggaattggcagcttctagaatatgtacacctctggacaaaatgttcctcaatcttaagatacaaagaccctcattgtctgggtctattcccacacttactgagtacagatgaaggaaagtggtagcaatttaatcataactttcatttgctgaaaaacattatgagaaggcctcccttcctaagccacctctggtcttgctaagtcttgatcttgcttcctgccagcaccaaacattacattcaggggatttcctctggctcagtcttttccccttgaagttctctaatagatgttacttttgacaaaagatcgcctatgagttacaagcaccaggggatgctctacatcaagggatgcaccttcagtcaaactgtcaaaaagcccagaattcccaaaggcattaggtttcccaactgctttgtgctgatatcagaacagcagaaattaaatgtgaaatgtttctgatgacttatgttctacaatctatggacatacgggatttttttttcttgctttgaagctacctggatatttcctatttgaaataaaattgttcggtcattgttg

SEQ ID NO: 1284 - DNA, 588 bp, Homo sapiens
  source 1..588: mol_type = unassigned DNA
aagtaccttgagaataaaggtaatgattaatctgtcaggcacaaaagggattgttttggggatttcgggttctaagtcgcagattcaaacaaatagcagcgaacagggaatgacagttccaccagaagacgattaagccacagcctctaattggaacggcatttgtacagtcagagactcttaccagacatctccaggaatctgtgagccattgtcaaaacgtccattttcatctggctgtgaaagtgaggaccacaacaggtaggtattggtagaaacaggagtcctcagagaagccccaagatgcagcctgagggagcagaaaagggaaaaagcttcaagcagagactggtcttgaagagcagcttagcgaaagaaaccctctctgagttcttgggcacgttcatcttgattagcaggtttgcatttgcttctgctgggttccccaggtataccgccagccagaaatgattgctgtggagtggcaaactgaaaagagaagcctgggggatgcaggtgcctgttgaagagcactctcccaaaagaacggcactctgtgacctttctcccaactgtgaccgtaaatga

SEQ ID NO: 1285 - DNA, 3034 bp, Homo sapiens
  source 1..3034: mol_type = unassigned DNA
actgtgatttggcaacacaactggcacatctcttttctcatctcttgaaaaaaaccaacagagaaaaaagtaccttgagaataaaggtaatgattaatctgtcaggcacaaaagggattgttttggggatttcgggttctaagtcgcagattcaaacaaatagcagcgaacagggaatgacagttccaccagaagacgattaagccacagcctctaattggaacggcatttgtacagtcagagactcttaccagacatctccaggaatctgtgagccattgtcaaaacgtccattttcatctggctgtgaaagtgaggaccacaacaggtaggtattggtagaaacaggagtcctcagagaagccccaagatgcagcctgagggagcagaaaagggaaaaagcttcaagcagagactggtcttgaagagcagcttagcgaaagaaaccctctctgagttcttgggcacgttcatcttgattgtccttggatgtggctgtgttgcccaagctattctcagtcgaggacgttttggaggggtcatcactatcaatgttggattttcaatggcagttgcaatggccatttatgtggctggcggtgtctctggtggtcacatcaacccagctgtgtctttagcaatgtgtctctttggacggatgaaatggttcaaattgccattttatgtgggagcccagttcttgggagcctttgtgggggctgcaaccgtctttggcatttactatgatggacttatgtcctttgctggtggaaaactgctgatcgtgggagaaaatgcaacagcacacatttttgcaacatacccagctccgtatctatctctggcgaacgcatttgcagatcaagtggtggccaccatgatactcctcataatcgtctttgccatctttgactccagaaacttgggagcccccagaggcctagagcccattgccatcggcctcctgattattgtcattgcttcctccctgggactgaacagtggctgtgccatgaacccagctcgagacctgagtcccagacttttcactgccttggcaggctgggggtttgaagtcttcagagctggaaacaacttctggtggattcctgtagtgggccctttggttggtgctgtcattggaggcctcatctatgttcttgtcattgaaatccaccatccagagcctgactcagtctttaagacagaacaatctgaggacaaaccagagaaatatgaactcagtgtcatcatgtagtggcatgctcagctctggatttgcagtcagtttgggattctcttcagaaagatggcatctaagtgtctgtgttcttgtaagcctgaggtggaatccacccagttttgtctgctagccatatgggacatctaattggaaaagcatctgcataaaagtttggaaacaatgaccacttctctaccattgtcccccacccccaccccccagaataacgctgactgtcccctgaaacagccttctctcctgccctgtttatttcatcctcgatgggaattcttgctaggtaagcactaataactcggcatcttgacgatagtcccatttgggtggtttcagctgcactatctgtatgaaatggtgtcaccaaaacccttttcttcagtatcgacaaagattacattctgagtaccaaccaaaccctaaattgaaagacaaaactatggtttcagtcaacatattcatgaattagggagctaatgggttaagcttccagttcccgctatgctactggatttgtataaatactgatattctccaaacctagtggtgtagggagcaagagaatgcagctggaaggcacaaggggaggacattgtggcattcagaaactgcaggagacaagatgaatttgagaagccaaatggaatttttaatggaaaccatttatcagattaatctcttgctctcctgcattttagaggacaccaattaatttcctggtctttagtatataataacctaaaataccattgtaacctcagtcatgaaaaatacatcactctgtctttttagctcaaatgtattttcctaattgcccacttgagaacagacatttgacaagttatatcaacgactgtgcttgtccattattttacacatgccctagaagccaaaactgaaagccactggatcctggtctagctgaatcttcagagtgggaggtctccaaaaagatattaccttattgggcttaacaattcacaaggcactttcacacccattatctaatttaatcctcataatgactatgtgaggcaaatgccacattgcccatttttcagataaagaaacaaaatcttagggaagataagttgagttgtccaagagcacactgaaagttgaatgttatctaatgcattcctctacctttcagaagatcagtagctggctgacaatctttgccaaatcttccttgctagccagaagtggaattggcagcttctagaatatgtacacctctggacaaaatgttcctcaatcttaagatacaaagaccctcattgtctgggtctattcccacacttactgagtacagatgaaggaaagtggtagcaatttaatcataactttcatttgctgaaaaacattatgagaaggcctcccttcctaagccacctctggtcttgctaagtcttgatcttgcttcctgccagcaccaaacattacattcaggggatttcctctggctcagtcttttccccttgaagttctctaatagatgttacttttgacaaaagatcgcctatgagttacaagcaccaggggatgctctacatcaagggatgcaccttcagtcaaactgtcaaaaagcccagaattcccaaaggcattaggtttcccaactgctttgtgctgatatcagaacagcagaaattaaatgtgaaatgtttctgatgacttatgttctacaatctatggacatacgggatttttttttcttgctttgaagctacctggatatttcctatttgaaataaaattgttcggtcattgttg

SEQ ID NO: 1286 - DNA, 1334 bp, Homo sapiens
  source 1..1334: mol_type = unassigned DNA
aaaatcttttctggaccagggcccgtcactgtgatttggcaacacaactggcacatctcttttctcatctcttgaaaaaaaccaacagagaaaaaagtaccttgagaataaaggtccttggatgtggctgtgttgcccaagctattctcagtcgaggacgttttggaggggtcatcactatcaatgttggattttcaatggcagttgcaatggccatttatgtggctggcggtgtctctggtggtcacatcaacccagctgtgtctttagcaatgtgtctctttggacggatgaaatggttcaaattgccattttatgtgggagcccagttcttgggagcctttgtgggggctgcaaccgtctttggcatttactatgatggacttatgtcctttgctggtggaaaactgctgatcgtgggagaaaatgcaacagcacacatttttgcaacatacccagctccgtatctatctctggcgaacgcatttgcagatcaagtggtggccaccatgatactcctcataatcgtctttgccatctttgactccagaaacttgggagcccccagaggcctagagcccattgccatcggcctcctgattattgtcattgcttcctccctgggactgaacagtggctgtgccatgaacccagctcgagacctgagtcccagacttttcactgccttggcaggctgggggtttgaagtcttcagagctggaaacaacttctggtggattcctgtagtgggccctttggttggtgctgtcattggaggcctcatctatgttcttgtcattgaaatccaccatccagagcctgactcagtctttaagacagaacaatctgaggacaaaccagagaaatatgaactcagtgtcatcatgtagtggcatgctcagctctggatttgcagtcagtttgggattctcttcagaaagatggcatctaagtgtctgtgttcttgtaagcctgaggtggaatccacccagttttgtctgctagccatatgggacatctaattggaaaagcatctgcataaaagtttggaaacaatgaccacttctctaccattgtcccccacccccaccccccagaataacgctgactgtcccctgaaacagccttctctcctgccctgtttatttcatcctcgatgggaattcttgctaggtaagcactaataactcggcatcttgacgatagtcccatttgggtggtttcagctgcactatctgtatgaaatggtgtcaccaaaacccttttcttcagtatcgacaaagattacattctgagtaccaaccaaaccctaaattgaaagacaaaactatggt

SEQ ID NO: 1287 - DNA, 10652 bp, Homo sapiens
  source 1..10652: mol_type = unassigned DNA
atcccggggagccagcttgctgggagagcgggacggtccggagcaagcccagaggcagaggaggcgacagagggaaaaagggccgagctagccgctccagtgctgtacaggagccgaagggacgcaccacgccagccccagcccggctccagcgacagccaacgcctcttgcagcgcggcggcttcgaagccgccgcccggagctgccctttcctcttcggtgaagtttttaaaagctgctaaagactcggaggaagcaaggaaagtgcctggtaggactgacggctgcctttgtcctcctcctctccaccccgcctccccccaccctgccttccccccctcccccgtcttctctcccgcagctgcctcagtcggctactctcagccaacccccctcaccacccttctccccacccgcccccccgcccccgtcggcccagcgctgccagcccgagtttgcagagaggtaactccctttggctgcgagcgggcgagctagctgcacattgcaaagaaggctcttaggagccaggcgactggggagcggcttcagcactgcagccacgacccgcctggttaggctgcacgcggagagaaccctctgttttcccccactctctctccacctcctcctgccttccccaccccgagtgcggagccagagatcaaaagatgaaaaggcagtcaggtcttcagtagccaaaaaacaaaacaaacaaaaacaaaaaagccgaaataaaagaaaaagataataactcagttcttatttgcacctacttcagtggacactgaatttggaaggtggaggattttgtttttttcttttaagatctgggcatcttttgaatctacccttcaagtattaagagacagactgtgagcctagcagggcagatcttgtccaccgtgtgtcttcttctgcacgagactttgaggctgtcagagcgctttttgcgtggttgctcccgcaagtttccttctctggagcttcccgcaggtgggcagctagctgcagcgactaccgcatcatcacagcctgttgaactcttctgagcaagagaaggggaggcggggtaagggaagtaggtggaagattcagccaagctcaaggatggaagtgcagttagggctgggaagggtctaccctcggccgccgtccaagacctaccgaggagctttccagaatctgttccagagcgtgcgcgaagtgatccagaacccgggccccaggcacccagaggccgcgagcgcagcacctcccggcgccagtttgctgctgctgcagcagcagcagcagcagcagcagcagcagcagcagcagcagcagcagcagcagcagcagcagcagcaagagactagccccaggcagcagcagcagcagcagggtgaggatggttctccccaagcccatcgtagaggccccacaggctacctggtcctggatgaggaacagcaaccttcacagccgcagtcggccctggagtgccaccccgagagaggttgcgtcccagagcctggagccgccgtggccgccagcaaggggctgccgcagcagctgccagcacctccggacgaggatgactcagctgccccatccacgttgtccctgctgggccccactttccccggcttaagcagctgctccgctgaccttaaagacatcctgagcgaggccagcaccatgcaactccttcagcaacagcagcaggaagcagtatccgaaggcagcagcagcgggagagcgagggaggcctcgggggctcccacttcctccaaggacaattacttagggggcacttcgaccatttctgacaacgccaaggagttgtgtaaggcagtgtcggtgtccatgggcctgggtgtggaggcgttggagcatctgagtccaggggaacagcttcggggggattgcatgtacgccccacttttgggagttccacccgctgtgcgtcccactccttgtgccccattggccgaatgcaaaggttctctgctagacgacagcgcaggcaagagcactgaagatactgctgagtattcccctttcaagggaggttacaccaaagggctagaaggcgagagcctaggctgctctggcagcgctgcagcagggagctccgggacacttgaactgccgtctaccctgtctctctacaagtccggagcactggacgaggcagctgcgtaccagagtcgcgactactacaactttccactggctctggccggaccgccgccccctccgccgcctccccatccccacgctcgcatcaagctggagaacccgctggactacggcagcgcctgggcggctgcggcggcgcagtgccgctatggggacctggcgagcctgcatggcgcgggtgcagcgggacccggttctgggtcaccctcagccgccgcttcctcatcctggcacactctcttcacagccgaagaaggccagttgtatggaccgtgtggtggtggtgggggtggtggcggcggcggcggcggcggcggcggcggcggcggcggcggcggcggcggcgaggcgggagctgtagccccctacggctacactcggccccctcaggggctggcgggccaggaaagcgacttcaccgcacctgatgtgtggtaccctggcggcatggtgagcagagtgccctatcccagtcccacttgtgtcaaaagcgaaatgggcccctggatggatagctactccggaccttacggggacatgcgtttggagactgccagggaccatgttttgcccattgactattactttccaccccagaagacctgcctgatctgtggagatgaagcttctgggtgtcactatggagctctcacatgtggaagctgcaaggtcttcttcaaaagagccgctgaagggaaacagaagtacctgtgcgccagcagaaatgattgcactattgataaattccgaaggaaaaattgtccatcttgtcgtcttcggaaatgttatgaagcagggatgactctgggagcccggaagctgaagaaacttggtaatctgaaactacaggaggaaggagaggcttccagcaccaccagccccactgaggagacaacccagaagctgacagtgtcacacattgaaggctatgaatgtcagcccatctttctgaatgtcctggaagccattgagccaggtgtagtgtgtgctggacacgacaacaaccagcccgactcctttgcagccttgctctctagcctcaatgaactgggagagagacagcttgtacacgtggtcaagtgggccaaggccttgcctggcttccgcaacttacacgtggacgaccagatggctgtcattcagtactcctggatggggctcatggtgtttgccatgggctggcgatccttcaccaatgtcaactccaggatgctctacttcgcccctgatctggttttcaatgagtaccgcatgcacaagtcccggatgtacagccagtgtgtccgaatgaggcacctctctcaagagtttggatggctccaaatcaccccccaggaattcctgtgcatgaaagcactgctactcttcagcattattccagtggatgggctgaaaaatcaaaaattctttgatgaacttcgaatgaactacatcaaggaactcgatcgtatcattgcatgcaaaagaaaaaatcccacatcctgctcaagacgcttctaccagctcaccaagctcctggactccgtgcagcctattgcgagagagctgcatcagttcacttttgacctgctaatcaagtcacacatggtgagcgtggactttccggaaatgatggcagagatcatctctgtgcaagtgcccaagatcctttctgggaaagtcaagcccatctatttccacacccagtgaagcattggaaaccctatttccccaccccagctcatgccccctttcagatgtcttctgcctgttataactctgcactactcctctgcagtgccttggggaatttcctctattgatgtacagtctgtcatgaacatgttcctgaattctatttgctgggctttttttttctctttctctcctttctttttcttcttccctccctatctaaccctcccatggcaccttcagactttgcttcccattgtggctcctatctgtgttttgaatggtgttgtatgcctttaaatctgtgatgatcctcatatggcccagtgtcaagttgtgcttgtttacagcactactctgtgccagccacacaaacgtttacttatcttatgccacgggaagtttagagagctaagattatctggggaaatcaaaacaaaaacaagcaaacaaaaaaaaaaagcaaaaacaaaacaaaaaataagccaaaaaaccttgctagtgttttttcctcaaaaataaataaataaataaataaatacgtacatacatacacacatacatacaaacatatagaaatccccaaagaggccaatagtgacgagaaggtgaaaattgcaggcccatggggagttactgattttttcatctcctccctccacgggagactttattttctgccaatggctattgccattagagggcagagtgaccccagagctgagttgggcaggggggtggacagagaggagaggacaaggagggcaatggagcatcagtacctgcccacagccttggtccctgggggctagactgctcaactgtggagcaattcattatactgaaaatgtgcttgttgttgaaaatttgtctgcatgttaatgcctcacccccaaacccttttctctctcactctctgcctccaacttcagattgactttcaatagtttttctaagacctttgaactgaatgttctcttcagccaaaacttggcgacttccacagaaaagtctgaccactgagaagaaggagagcagagatttaaccctttgtaaggccccatttggatccaggtctgctttctcatgtgtgagtcagggaggagctggagccagaggagaagaaaatgatagcttggctgttctcctgcttaggacactgactgaatagttaaactctcactgccactaccttttccccacctttaaaagacctgaatgaagttttctgccaaactccgtgaagccacaagcaccttatgtcctcccttcagtgttttgtgggcctgaatttcatcacactgcatttcagccatggtcatcaagcctgtttgcttcttttgggcatgttcacagattctctgttaagagcccccaccaccaagaaggttagcaggccaacagctctgacatctatctgtagatgccagtagtcacaaagatttcttaccaactctcagatcgctggagcccttagacaaactggaaagaaggcatcaaagggatcaggcaagctgggcgtcttgcccttgtcccccagagatgataccctcccagcaagtggagaagttctcacttccttctttagagcagctaaaggggctacccagatcagggttgaagagaaaactcaattaccagggtgggaagaatgaaggcactagaaccagaaaccctgcaaatgctcttcttgtcacccagcatatccacctgcagaagtcatgagaagagagaaggaacaaagaggagactctgactactgaattaaaatcttcagcggcaaagcctaaagccagatggacaccatctggtgagtttactcatcatcctcctctgctgctgattctgggctctgacattgcccatactcactcagattccccacctttgttgctgcctcttagtcagagggaggccaaaccattgagactttctacagaaccatggcttctttcggaaaggtctggttggtgtggctccaatactttgccacccatgaactcagggtgtgccctgggacactggttttatatagtcttttggcacacctgtgttctgttgacttcgttcttcaagcccaagtgcaagggaaaatgtccacctactttctcatcttggcctctgcctccttacttagctcttaatctcatctgttgaactcaagaaatcaagggccagtcatcaagctgcccattttaattgattcactctgtttgttgagaggatagtttctgagtgacatgatatgatccacaagggtttccttccctgatttctgcattgatattaatagccaaacgaacttcaaaacagctttaaataacaagggagaggggaacctaagatgagtaatatgccaatccaagactgctggagaaaactaaagctgacaggttccctttttggggtgggatagacatgttctggttttctttattattacacaatctggctcatgtacaggatcacttttagctgttttaaacagaaaaaaatatccaccactcttttcagttacactaggttacattttaataggtcctttacatctgttttggaatgattttcatcttttgtgatacacagattgaattatatcattttcatatctctccttgtaaatactagaagctctcctttacatttctctatcaaatttttcatctttatgggtttcccaattgtgactcttgtcttcatgaatatatgtttttcatttgcaaaagccaaaaatcagtgaaacagcagtgtaattaaaagcaacaactggattactccaaatttccaaatgacaaaactagggaaaaatagcctacacaagcctttaggcctactctttctgtgcttgggtttgagtgaacaaaggagattttagcttggctctgttctcccatggatgaaaggaggaggattttttttttcttttggccattgatgttctagccaatgtaattgacagaagtctcattttgcatgcgctctgctctacaaacagagttggtatggttggtatactgtactcacctgtgagggactggccactcagacccacttagctggtgagctagaagatgaggatcactcactggaaaagtcacaaggaccatctccaaacaagttggcagtgctcgatgtggacgaagagtgaggaagagaaaaagaaggagcaccagggagaaggctccgtctgtgctgggcagcagacagctgccaggatcacgaactctgtagtcaaagaaaagagtcgtgtggcagtttcagctctcgttcattgggcagctcgcctaggcccagcctctgagctgacatgggagttgttggattctttgtttcatagctttttctatgccataggcaatattgttgttcttggaaagtttattatttttttaactcccttactctgagaaagggatattttgaaggactgtcatatatctttgaaaaaagaaaatctgtaatacatatatttttatgtatgttcactggcactaaaaaatatagagagcttcattctgtcctttgggtagttgctgaggtaattgtccaggttgaaaaataatgtgctgatgctagagtccctctctgtccatactctacttctaaatacatataggcatacatagcaagttttatttgacttgtactttaagagaaaatatgtccaccatccacatgatgcacaaatgagctaacattgagcttcaagtagcttctaagtgtttgtttcattaggcacagcacagatgtggcctttccccccttctctcccttgatatctggcagggcataaaggcccaggccacttcctctgccccttcccagccctgcaccaaagctgcatttcaggagactctctccagacagcccagtaactacccgagcatggcccctgcatagccctggaaaaataagaggctgactgtctacgaattatcttgtgccagttgcccaggtgagagggcactgggccaagggagtggttttcatgtttgacccactacaaggggtcatgggaatcaggaatgccaaagcaccagatcaaatccaaaacttaaagtcaaaataagccattcagcatgttcagtttcttggaaaaggaagtttctacccctgatgcctttgtaggcagatctgttctcaccattaatctttttgaaaatcttttaaagcagtttttaaaaagagagatgaaagcatcacattatataaccaaagattacattgtacctgctaagataccaaaattcataagggcagggggggagcaagcattagtgcctctttgataagctgtccaaagacagactaaaggactctgctggtgactgacttataagagctttgtgggtttttttttccctaataatatacatgtttagaagaattgaaaataatttcgggaaaatgggattatgggtccttcactaagtgattttataagcagaactggctttccttttctctagtagttgctgagcaaattgttgaagctccatcattgcatggttggaaatggagctgttcttagccactgtgtttgctagtgcccatgttagcttatctgaagatgtgaaacccttgctgataagggagcatttaaagtactagattttgcactagagggacagcaggcagaaatccttatttctgcccactttggatggcacaaaaagttatctgcagttgaaggcagaaagttgaaatacattgtaaatgaatatttgtatccatgtttcaaaattgaaatatatatatatatatatatatatatatatatatatatatagtgtgtgtgtgtgttctgatagctttaactttctctgcatctttatatttggttccagatcacacctgatgccatgtacttgtgagagaggatgcagttttgttttggaagctctctcagaacaaacaagacacctggattgatcagttaactaaaagttttctcccctattgggtttgacccacaggtcctgtgaaggagcagagggataaaaagagtagaggacatgatacattgtactttactagttcaagacagatgaatgtggaaagcataaaaactcaatggaactgactgagatttaccacagggaaggcccaaacttggggccaaaagcctacccaagtgattgaccagtggccccctaatgggacctgagctgttggaagaagagaactgttccttggtcttcaccatccttgtgagagaagggcagtttcctgcattggaacctggagcaagcgctctatctttcacacaaattccctcacctgagattgaggtgctcttgttactgggtgtctgtgtgctgtaattctggttttggatatgttctgtaaagattttgacaaatgaaaatgtgtttttctctgttaaaacttgtcagagtactagaagttgtatctctgtaggtgcaggtccatttctgcccacaggtagggtgtttttctttgattaagagattgacacttctgttgcctaggacctcccaactcaaccatttctaggtgaaggcagaaaaatccacattagttactcctcttcagacatttcagctgagataacaaatcttttggaattttttcacccatagaaagagtggtagatatttgaatttagcaggtggagtttcatagtaaaaacagcttttgactcagctttgatttatcctcatttgatttggccagaaagtaggtaatatgcattgattggcttctgattccaattcagtatagcaaggtgctaggttttttcctttccccacctgtctcttagcctggggaattaaatgagaagccttagaatgggtggcccttgtgacctgaaacacttcccacataagctacttaacaagattgtcatggagctgcagattccattgcccaccaaagactagaacacacacatatccatacaccaaaggaaagacaattctgaaatgctgtttctctggtggttccctctctggctgctgcctcacagtatgggaacctgtactctgcagaggtgacaggccagatttgcattatctcacaaccttagcccttggtgctaactgtcctacagtgaagtgcctggggggttgtcctatcccataagccacttggatgctgacagcagccaccatcagaatgacccacgcaaaaaaaagaaaaaaaaaattaaaaagtcccctcacaacccagtgacacctttctgctttcctctagactggaacattgattagggagtgcctcagacatgacattcttgtgctgtccttggaattaatctggcagcaggagggagcagactatgtaaacagagataaaaattaattttcaatattgaaggaaaaaagaaataagaagagagagagaaagaaagcatcacacaaagattttcttaaaagaaacaattttgcttgaaatctctttagatggggctcatttctcacggtggcacttggcctccactgggcagcaggaccagctccaagcgctagtgttctgttctctttttgtaatcttggaatcttttgttgctctaaatacaattaaaaatggcagaaacttgtttgttggactacatgtgtgactttgggtctgtctctgcctctgctttcagaaatgtcatccattgtgtaaaatattggcttactggtctgccagctaaaacttggccacatcccctgttatggctgcaggatcgagttattgttaacaaagagacccaagaaaagctgctaatgtcctcttatcattgttgttaatttgttaaaacataaagaaatctaaaatttca

SEQ ID NO: 1288 - DNA, 2420 bp, Homo sapiens
  source 1..2420: mol_type = unassigned DNA
gacactgaatttggaaggtggaggattttgtttttttcttttaagatctgggcatcttttgaatctacccttcaagtattaagagacagactgtgagcctagcagggcagatcttgtccaccgtgtgtcttcttctgcacgagactttgaggctgtcagagcgctttttgcgtggttgctcccgcaagtttccttctctggagcttcccgcaggtgggcagctagctgcagcgactaccgcatcatcacagcctgttgaactcttctgagcaagagaaggggaggcggggtaagggaagtaggtggaagattcagccaagctcaaggatggaagtgcagttagggctgggaagggtctaccctcggccgccgtccaagacctaccgaggagctttccagaatctgttccagagcgtgcgcgaagtgatccagaacccgggccccaggcacccagaggccgcgagcgcagcacctcccggcgccagtttgctgctgctgcagcagcagcagcagcagcagcagcagcagcagcagcagcagcagcagcagcagcagcagcagcagcaagagactagccccaggcagcagcagcagcagcagggtgaggatggttctccccaagcccatcgtagaggccccacaggctacctggtcctggatgaggaacagcaaccttcacagccgcagtcggccctggagtgccaccccgagagaggttgcgtcccagagcctggagccgccgtggccgccagcaaggggctgccgcagcagctgccagcacctccggacgaggatgactcagctgccccatccacgttgtccctgctgggccccactttccccggcttaagcagctgctccgctgaccttaaagacatcctgagcgaggccagcaccatgcaactccttcagcaacagcagcaggaagcagtatccgaaggcagcagcagcgggagagcgagggaggcctcgggggctcccacttcctccaaggacaattacttagggggcacttcgaccatttctgacaacgccaaggagttgtgtaaggcagtgtcggtgtccatgggcctgggtgtggaggcgttggagcatctgagtccaggggaacagcttcggggggattgcatgtacgccccacttttgggagttccacccgctgtgcgtcccactccttgtgccccattggccgaatgcaaaggttctctgctagacgacagcgcaggcaagagcactgaagatactgctgagtattcccctttcaagggaggttacaccaaagggctagaaggcgagagcctaggctgctctggcagcgctgcagcagggagctccgggacacttgaactgccgtctaccctgtctctctacaagtccggagcactggacgaggcagctgcgtaccagagtcgcgactactacaactttccactggctctggccggaccgccgccccctccgccgcctccccatccccacgctcgcatcaagctggagaacccgctggactacggcagcgcctgggcggctgcggcggcgcagtgccgctatggggacctggcgagcctgcatggcgcgggtgcagcgggacccggttctgggtcaccctcagccgccgcttcctcatcctggcacactctcttcacagccgaagaaggccagttgtatggaccgtgtggtggtggtgggggtggtggcggcggcggcggcggcggcggcggcggcggcggcggcggcggcggcggcgaggcgggagctgtagccccctacggctacactcggccccctcaggggctggcgggccaggaaagcgacttcaccgcacctgatgtgtggtaccctggcggcatggtgagcagagtgccctatcccagtcccacttgtgtcaaaagcgaaatgggcccctggatggatagctactccggaccttacggggacatgcgtttggagactgccagggaccatgttttgcccattgactattactttccaccccagaagacctgcctgatctgtggagatgaagcttctgggtgtcactatggagctctcacatgtggaagctgcaaggtcttcttcaaaagagccgctgaagggaaacagaagtacctgtgcgccagcagaaatgattgcactattgataaattccgaaggaaaaattgtccatcttgtcgtcttcggaaatgttatgaagcagggatgactctgggagcagctgttgttgtttctgaaagaatcttgagggtgtttggagtctcagaatggcttccttaaagactaccttcagactctcagctgctcatccacaacagagatcagcctttctttgtagatgattcattcctggctgcatttgaaaaccacatattgttaattgcttgacgaatttaaatcccttgactacttttcatttcagaaaa

SEQ ID NO: 1289 - DNA, 3615 bp, Homo sapiens
  source 1..3615: mol_type = unassigned DNA
gacactgaatttggaaggtggaggattttgtttttttcttttaagatctgggcatcttttgaatctacccttcaagtattaagagacagactgtgagcctagcagggcagatcttgtccaccgtgtgtcttcttctgcacgagactttgaggctgtcagagcgctttttgcgtggttgctcccgcaagtttccttctctggagcttcccgcaggtgggcagctagctgcagcgactaccgcatcatcacagcctgttgaactcttctgagcaagagaaggggaggcggggtaagggaagtaggtggaagattcagccaagctcaaggatggaagtgcagttagggctgggaagggtctaccctcggccgccgtccaagacctaccgaggagctttccagaatctgttccagagcgtgcgcgaagtgatccagaacccgggccccaggcacccagaggccgcgagcgcagcacctcccggcgccagtttgctgctgctgcagcagcagcagcagcagcagcagcagcagcagcagcagcagcagcagcagcagcagcagcagcagcaagagactagccccaggcagcagcagcagcagcagggtgaggatggttctccccaagcccatcgtagaggccccacaggctacctggtcctggatgaggaacagcaaccttcacagccgcagtcggccctggagtgccaccccgagagaggttgcgtcccagagcctggagccgccgtggccgccagcaaggggctgccgcagcagctgccagcacctccggacgaggatgactcagctgccccatccacgttgtccctgctgggccccactttccccggcttaagcagctgctccgctgaccttaaagacatcctgagcgaggccagcaccatgcaactccttcagcaacagcagcaggaagcagtatccgaaggcagcagcagcgggagagcgagggaggcctcgggggctcccacttcctccaaggacaattacttagggggcacttcgaccatttctgacaacgccaaggagttgtgtaaggcagtgtcggtgtccatgggcctgggtgtggaggcgttggagcatctgagtccaggggaacagcttcggggggattgcatgtacgccccacttttgggagttccacccgctgtgcgtcccactccttgtgccccattggccgaatgcaaaggttctctgctagacgacagcgcaggcaagagcactgaagatactgctgagtattcccctttcaagggaggttacaccaaagggctagaaggcgagagcctaggctgctctggcagcgctgcagcagggagctccgggacacttgaactgccgtctaccctgtctctctacaagtccggagcactggacgaggcagctgcgtaccagagtcgcgactactacaactttccactggctctggccggaccgccgccccctccgccgcctccccatccccacgctcgcatcaagctggagaacccgctggactacggcagcgcctgggcggctgcggcggcgcagtgccgctatggggacctggcgagcctgcatggcgcgggtgcagcgggacccggttctgggtcaccctcagccgccgcttcctcatcctggcacactctcttcacagccgaagaaggccagttgtatggaccgtgtggtggtggtgggggtggtggcggcggcggcggcggcggcggcggcggcggcggcggcggcggcggcggcgaggcgggagctgtagccccctacggctacactcggccccctcaggggctggcgggccaggaaagcgacttcaccgcacctgatgtgtggtaccctggcggcatggtgagcagagtgccctatcccagtcccacttgtgtcaaaagcgaaatgggcccctggatggatagctactccggaccttacggggacatgcgtttggagactgccagggaccatgttttgcccattgactattactttccaccccagaagacctgcctgatctgtggagatgaagcttctgggtgtcactatggagctctcacatgtggaagctgcaaggtcttcttcaaaagagccgctgaagggaaacagaagtacctgtgcgccagcagaaatgattgcactattgataaattccgaaggaaaaattgtccatcttgtcgtcttcggaaatgttatgaagcagggatgactctgggagaaaaattccgggttggcaattgcaagcatctcaaaatgaccagaccctgaagaaaggctgacttgcctcattcaaaatgagggctctagagggctctagtggatagtctggagaaacctggcgtctgaggcttaggagcttaggtttttgctcctcaacacagactttgacgttggggttgggggctactctcttgattgctgactccctccagcgggaccaatagtgttttcctacctcacagggatgttgtgaggacgggctgtagaagtaatagtggttaccattcatgtagttgtgagtatcatgattattgtttcctgtaatgtggcttggcattggcaaagtgctttttgattgttcttgatcacatatgatgggggccaggcactgactcaggcggatgcagtgaagctctggctcagtcgcttgcttttcgtggtgtgctgccaggaagaaactttgctgatgggactcaaggtgtcaccttggacaagaagcaactgtgtctgtctgaggttcctgtggccatctttatttgtgtattaggcaattcgtatttcccccttaggttctagccttctggatcccagccagtgacctagatcttagcctcaggccctgtcactgagctgaaggtagtagctgatccacagaagttcagtaaacaaggaccagatttctgcttctccaggagaagaagccagccaacccctctcttcaaacacactgagagactacagtccgactttccctcttacatctagccttactgtagccacactccttgattgctctctcacatcacatgcttctcttcatcagttgtaagcctctcattcttctcccaagccagactcaaatattgtattgatgtcaaagaagaatcacttagagtttggaatatcttgttctctctctgctccatagcttccatattgacaccagtttctttctagtggagaagtggagtctgtgaagccagggaaacacacatgtgagagtcagaaggactctccctgacttgcctggggcctgtctttcccaccttctccagtctgtctaaacacacacacacacacacacacacacacacacacgctctctctctctctccccccccaacacacacacactctctctctctctcacacacacacacatacacacacacttctttctctttcccctgactcagcaacattctggagaaaagccaaggaaggacttcaggaggggagtttcccccttctcagggcagaattttaatctccagaccaacaagaagttccctaatgtggattgaaaggctaatgaggtttatttttaactactttctatttgtttgaatgttgcatatttctactagtgaaattttcccttaataaagccattaatacacc

SEQ ID NO: 1290 - DNA, 3899 bp, Homo sapiens
  source 1..3899: mol_type = unassigned DNA
gacactgaatttggaaggtggaggattttgtttttttcttttaagatctgggcatcttttgaatctacccttcaagtattaagagacagactgtgagcctagcagggcagatcttgtccaccgtgtgtcttcttctgcacgagactttgaggctgtcagagcgctttttgcgtggttgctcccgcaagtttccttctctggagcttcccgcaggtgggcagctagctgcagcgactaccgcatcatcacagcctgttgaactcttctgagcaagagaaggggaggcggggtaagggaagtaggtggaagattcagccaagctcaaggatggaagtgcagttagggctgggaagggtctaccctcggccgccgtccaagacctaccgaggagctttccagaatctgttccagagcgtgcgcgaagtgatccagaacccgggccccaggcacccagaggccgcgagcgcagcacctcccggcgccagtttgctgctgctgcagcagcagcagcagcagcagcagcagcagcagcagcagcagcagcagcagcagcagcagcagcagcaagagactagccccaggcagcagcagcagcagcagggtgaggatggttctccccaagcccatcgtagaggccccacaggctacctggtcctggatgaggaacagcaaccttcacagccgcagtcggccctggagtgccaccccgagagaggttgcgtcccagagcctggagccgccgtggccgccagcaaggggctgccgcagcagctgccagcacctccggacgaggatgactcagctgccccatccacgttgtccctgctgggccccactttccccggcttaagcagctgctccgctgaccttaaagacatcctgagcgaggccagcaccatgcaactccttcagcaacagcagcaggaagcagtatccgaaggcagcagcagcgggagagcgagggaggcctcgggggctcccacttcctccaaggacaattacttagggggcacttcgaccatttctgacaacgccaaggagttgtgtaaggcagtgtcggtgtccatgggcctgggtgtggaggcgttggagcatctgagtccaggggaacagcttcggggggattgcatgtacgccccacttttgggagttccacccgctgtgcgtcccactccttgtgccccattggccgaatgcaaaggttctctgctagacgacagcgcaggcaagagcactgaagatactgctgagtattcccctttcaagggaggttacaccaaagggctagaaggcgagagcctaggctgctctggcagcgctgcagcagggagctccgggacacttgaactgccgtctaccctgtctctctacaagtccggagcactggacgaggcagctgcgtaccagagtcgcgactactacaactttccactggctctggccggaccgccgccccctccgccgcctccccatccccacgctcgcatcaagctggagaacccgctggactacggcagcgcctgggcggctgcggcggcgcagtgccgctatggggacctggcgagcctgcatggcgcgggtgcagcgggacccggttctgggtcaccctcagccgccgcttcctcatcctggcacactctcttcacagccgaagaaggccagttgtatggaccgtgtggtggtggtgggggtggtggcggcggcggcggcggcggcggcggcggcggcggcggcggcggcggcggcgaggcgggagctgtagccccctacggctacactcggccccctcaggggctggcgggccaggaaagcgacttcaccgcacctgatgtgtggtaccctggcggcatggtgagcagagtgccctatcccagtcccacttgtgtcaaaagcgaaatgggcccctggatggatagctactccggaccttacggggacatgcgtttggagactgccagggaccatgttttgcccattgactattactttccaccccagaagacctgcctgatctgtggagatgaagcttctgggtgtcactatggagctctcacatgtggaagctgcaaggtcttcttcaaaagagccgctgaaggatttttcagaatgaacaaattaaaagaatcataatcagacactaaccccaagccatactgcatggcagcaccaatgggactgacagaaaacaacagaaataggaagaaatcctacagagaaacaaacttgaaagctgtctcatggcctttgaatcatacttaagttttatgatggaaggatacgactatgaagaaagacacagagcaacatcagacagtcaagaatttcagagccagctggcatgcagtggacctcatgccagcccattttatgactatttagggaaacagaagtacctgtgcgccagcagaaatgattgcactattgataaattccgaaggaaaaattgtccatcttgtcgtcttcggaaatgttatgaagcagggatgactctgggagaaaaattccgggttggcaattgcaagcatctcaaaatgaccagaccctgaagaaaggctgacttgcctcattcaaaatgagggctctagagggctctagtggatagtctggagaaacctggcgtctgaggcttaggagcttaggtttttgctcctcaacacagactttgacgttggggttgggggctactctcttgattgctgactccctccagcgggaccaatagtgttttcctacctcacagggatgttgtgaggacgggctgtagaagtaatagtggttaccattcatgtagttgtgagtatcatgattattgtttcctgtaatgtggcttggcattggcaaagtgctttttgattgttcttgatcacatatgatgggggccaggcactgactcaggcggatgcagtgaagctctggctcagtcgcttgcttttcgtggtgtgctgccaggaagaaactttgctgatgggactcaaggtgtcaccttggacaagaagcaactgtgtctgtctgaggttcctgtggccatctttatttgtgtattaggcaattcgtatttcccccttaggttctagccttctggatcccagccagtgacctagatcttagcctcaggccctgtcactgagctgaaggtagtagctgatccacagaagttcagtaaacaaggaccagatttctgcttctccaggagaagaagccagccaacccctctcttcaaacacactgagagactacagtccgactttccctcttacatctagccttactgtagccacactccttgattgctctctcacatcacatgcttctcttcatcagttgtaagcctctcattcttctcccaagccagactcaaatattgtattgatgtcaaagaagaatcacttagagtttggaatatcttgttctctctctgctccatagcttccatattgacaccagtttctttctagtggagaagtggagtctgtgaagccagggaaacacacatgtgagagtcagaaggactctccctgacttgcctggggcctgtctttcccaccttctccagtctgtctaaacacacacacacacacacacacacacacacacacgctctctctctctctccccccccaacacacacacactctctctctctctcacacacacacacatacacacacacttctttctctttcccctgactcagcaacattctggagaaaagccaaggaaggacttcaggaggggagtttcccccttctcagggcagaattttaatctccagaccaacaagaagttccctaatgtggattgaaaggctaatgaggtttatttttaactactttctatttgtttgaatgttgcatatttctactagtgaaattttcccttaataaagccattaatacacc

SEQ ID NO: 1291 - DNA, 1728 bp, Homo sapiens
  source 1..1728: mol_type = unassigned DNA
gcctatgcaaatgcctgcctgaagctgctggaggctggctttgtaccggactttgtacagggaaccagggaaacgaatgcagagtgctcctgacattgcctgtcactttttcccatgatactctggcttcacagtttggagactgccagggaccatgttttgcccattgactattactttccaccccagaagacctgcctgatctgtggagatgaagcttctgggtgtcactatggagctctcacatgtggaagctgcaaggtcttcttcaaaagagccgctgaagggaaacagaagtacctgtgcgccagcagaaatgattgcactattgataaattccgaaggaaaaattgtccatcttgtcgtcttcggaaatgttatgaagcagggatgactctgggagcccggaagctgaagaaacttggtaatctgaaactacaggaggaaggagaggcttccagcaccaccagccccactgaggagacaacccagaagctgacagtgtcacacattgaaggctatgaatgtcagcccatctttctgaatgtcctggaagccattgagccaggtgtagtgtgtgctggacacgacaacaaccagcccgactcctttgcagccttgctctctagcctcaatgaactgggagagagacagcttgtacacgtggtcaagtgggccaaggccttgcctggcttccgcaacttacacgtggacgaccagatggctgtcattcagtactcctggatggggctcatggtgtttgccatgggctggcgatccttcaccaatgtcaactccaggatgctctacttcgcccctgatctggttttcaatgagtaccgcatgcacaagtcccggatgtacagccagtgtgtccgaatgaggcacctctctcaagagtttggatggctccaaatcaccccccaggaattcctgtgcatgaaagcactgctactcttcagcattattccagtggatgggctgaaaaatcaaaaattctttgatgaacttcgaatgaactacatcaaggaactcgatcgtatcattgcatgcaaaagaaaaaatcccacatcctgctcaagacgcttctaccagctcaccaagctcctggactccgtgcagcctattgcgagagagctgcatcagttcacttttgacctgctaatcaagtcacacatggtgagcgtggactttccggaaatgatggcagagatcatctctgtgcaagtgcccaagatcctttctgggaaagtcaagcccatctatttccacacccagtgaagcattggaaaccctatttccccaccccagctcatgccccctttcagatgtcttctgcctgttataactctgcactactcctctgcagtgccttggggaatttcctctattgatgtacagtctgtcatgaacatgttcctgaattctatttgctgggctttttttttctctttctctcctttctttttcttcttccctccctatctaaccctcccatggcaccttcagactttgcttcccattgtggctcctatctgtgttttgaatggtgttgtatgcctttaaatctgtgatgatcctcatatggcccagtgtcaagttgtgcttgtttacagcactactctgtgccagccacacaaacgtttacttatcttatgccacgggaagtttagagagctaagattatctggggaaatcaaaacaaaaacaagcaaacaaaaaaaaaaa

SEQ ID NO: 1292 - DNA, 3896 bp, Homo sapiens
  source 1..3896: mol_type = unassigned DNA
gacactgaatttggaaggtggaggattttgtttttttcttttaagatctgggcatcttttgaatctacccttcaagtattaagagacagactgtgagcctagcagggcagatcttgtccaccgtgtgtcttcttctgcacgagactttgaggctgtcagagcgctttttgcgtggttgctcccgcaagtttccttctctggagcttcccgcaggtgggcagctagctgcagcgactaccgcatcatcacagcctgttgaactcttctgagcaagagaaggggaggcggggtaagggaagtaggtggaagattcagccaagctcaaggatggaagtgcagttagggctgggaagggtctaccctcggccgccgtccaagacctaccgaggagctttccagaatctgttccagagcgtgcgcgaagtgatccagaacccgggccccaggcacccagaggccgcgagcgcagcacctcccggcgccagtttgctgctgctgcagcagcagcagcagcagcagcagcagcagcagcagcagcagcagcagcagcagcagcagcagcagcaagagactagccccaggcagcagcagcagcagcagggtgaggatggttctccccaagcccatcgtagaggccccacaggctacctggtcctggatgaggaacagcaaccttcacagccgcagtcggccctggagtgccaccccgagagaggttgcgtcccagagcctggagccgccgtggccgccagcaaggggctgccgcagcagctgccagcacctccggacgaggatgactcagctgccccatccacgttgtccctgctgggccccactttccccggcttaagcagctgctccgctgaccttaaagacatcctgagcgaggccagcaccatgcaactccttcagcaacagcagcaggaagcagtatccgaaggcagcagcagcgggagagcgagggaggcctcgggggctcccacttcctccaaggacaattacttagggggcacttcgaccatttctgacaacgccaaggagttgtgtaaggcagtgtcggtgtccatgggcctgggtgtggaggcgttggagcatctgagtccaggggaacagcttcggggggattgcatgtacgccccacttttgggagttccacccgctgtgcgtcccactccttgtgccccattggccgaatgcaaaggttctctgctagacgacagcgcaggcaagagcactgaagatactgctgagtattcccctttcaagggaggttacaccaaagggctagaaggcgagagcctaggctgctctggcagcgctgcagcagggagctccgggacacttgaactgccgtctaccctgtctctctacaagtccggagcactggacgaggcagctgcgtaccagagtcgcgactactacaactttccactggctctggccggaccgccgccccctccgccgcctccccatccccacgctcgcatcaagctggagaacccgctggactacggcagcgcctgggcggctgcggcggcgcagtgccgctatggggacctggcgagcctgcatggcgcgggtgcagcgggacccggttctgggtcaccctcagccgccgcttcctcatcctggcacactctcttcacagccgaagaaggccagttgtatggaccgtgtggtggtggtgggggtggtggcggcggcggcggcggcggcggcggcggcggcggcggcggcggcggcggcgaggcgggagctgtagccccctacggctacactcggccccctcaggggctggcgggccaggaaagcgacttcaccgcacctgatgtgtggtaccctggcggcatggtgagcagagtgccctatcccagtcccacttgtgtcaaaagcgaaatgggcccctggatggatagctactccggaccttacggggacatgcgtttggagactgccagggaccatgttttgcccattgactattactttccaccccagaagacctgcctgatctgtggagatgaagcttctgggtgtcactatggagctctcacatgtggaagctgcaaggtcttcttcaaaagagccgctgaaggatttttcagaatgaacaaattaaaagaatcatcagacactaaccccaagccatactgcatggcagcaccaatgggactgacagaaaacaacagaaataggaagaaatcctacagagaaacaaacttgaaagctgtctcatggcctttgaatcatacttaagttttatgatggaaggatacgactatgaagaaagacacagagcaacatcagacagtcaagaatttcagagccagctggcatgcagtggacctcatgccagcccattttatgactatttagggaaacagaagtacctgtgcgccagcagaaatgattgcactattgataaattccgaaggaaaaattgtccatcttgtcgtcttcggaaatgttatgaagcagggatgactctgggagaaaaattccgggttggcaattgcaagcatctcaaaatgaccagaccctgaagaaaggctgacttgcctcattcaaaatgagggctctagagggctctagtggatagtctggagaaacctggcgtctgaggcttaggagcttaggtttttgctcctcaacacagactttgacgttggggttgggggctactctcttgattgctgactccctccagcgggaccaatagtgttttcctacctcacagggatgttgtgaggacgggctgtagaagtaatagtggttaccattcatgtagttgtgagtatcatgattattgtttcctgtaatgtggcttggcattggcaaagtgctttttgattgttcttgatcacatatgatgggggccaggcactgactcaggcggatgcagtgaagctctggctcagtcgcttgcttttcgtggtgtgctgccaggaagaaactttgctgatgggactcaaggtgtcaccttggacaagaagcaactgtgtctgtctgaggttcctgtggccatctttatttgtgtattaggcaattcgtatttcccccttaggttctagccttctggatcccagccagtgacctagatcttagcctcaggccctgtcactgagctgaaggtagtagctgatccacagaagttcagtaaacaaggaccagatttctgcttctccaggagaagaagccagccaacccctctcttcaaacacactgagagactacagtccgactttccctcttacatctagccttactgtagccacactccttgattgctctctcacatcacatgcttctcttcatcagttgtaagcctctcattcttctcccaagccagactcaaatattgtattgatgtcaaagaagaatcacttagagtttggaatatcttgttctctctctgctccatagcttccatattgacaccagtttctttctagtggagaagtggagtctgtgaagccagggaaacacacatgtgagagtcagaaggactctccctgacttgcctggggcctgtctttcccaccttctccagtctgtctaaacacacacacacacacacacacacacacacacacgctctctctctctctccccccccaacacacacacactctctctctctctcacacacacacacatacacacacacttctttctctttcccctgactcagcaacattctggagaaaagccaaggaaggacttcaggaggggagtttcccccttctcagggcagaattttaatctccagaccaacaagaagttccctaatgtggattgaaaggctaatgaggtttatttttaactactttctatttgtttgaatgttgcatatttctactagtgaaattttcccttaataaagccattaatacacc

SEQ ID NO: 1293 - DNA, 3532 bp, Homo sapiens
  source 1..3532: mol_type = unassigned DNA
gacactgaatttggaaggtggaggattttgtttttttcttttaagatctgggcatcttttgaatctacccttcaagtattaagagacagactgtgagcctagcagggcagatcttgtccaccgtgtgtcttcttctgcacgagactttgaggctgtcagagcgctttttgcgtggttgctcccgcaagtttccttctctggagcttcccgcaggtgggcagctagctgcagcgactaccgcatcatcacagcctgttgaactcttctgagcaagagaaggggaggcggggtaagggaagtaggtggaagattcagccaagctcaaggatggaagtgcagttagggctgggaagggtctaccctcggccgccgtccaagacctaccgaggagctttccagaatctgttccagagcgtgcgcgaagtgatccagaacccgggccccaggcacccagaggccgcgagcgcagcacctcccggcgccagtttgctgctgctgcagcagcagcagcagcagcagcagcagcagcagcagcagcagcagcagcagcagcagcagcagcagcaagagactagccccaggcagcagcagcagcagcagggtgaggatggttctccccaagcccatcgtagaggccccacaggctacctggtcctggatgaggaacagcaaccttcacagccgcagtcggccctggagtgccaccccgagagaggttgcgtcccagagcctggagccgccgtggccgccagcaaggggctgccgcagcagctgccagcacctccggacgaggatgactcagctgccccatccacgttgtccctgctgggccccactttccccggcttaagcagctgctccgctgaccttaaagacatcctgagcgaggccagcaccatgcaactccttcagcaacagcagcaggaagcagtatccgaaggcagcagcagcgggagagcgagggaggcctcgggggctcccacttcctccaaggacaattacttagggggcacttcgaccatttctgacaacgccaaggagttgtgtaaggcagtgtcggtgtccatgggcctgggtgtggaggcgttggagcatctgagtccaggggaacagcttcggggggattgcatgtacgccccacttttgggagttccacccgctgtgcgtcccactccttgtgccccattggccgaatgcaaaggttctctgctagacgacagcgcaggcaagagcactgaagatactgctgagtattcccctttcaagggaggttacaccaaagggctagaaggcgagagcctaggctgctctggcagcgctgcagcagggagctccgggacacttgaactgccgtctaccctgtctctctacaagtccggagcactggacgaggcagctgcgtaccagagtcgcgactactacaactttccactggctctggccggaccgccgccccctccgccgcctccccatccccacgctcgcatcaagctggagaacccgctggactacggcagcgcctgggcggctgcggcggcgcagtgccgctatggggacctggcgagcctgcatggcgcgggtgcagcgggacccggttctgggtcaccctcagccgccgcttcctcatcctggcacactctcttcacagccgaagaaggccagttgtatggaccgtgtggtggtggtgggggtggtggcggcggcggcggcggcggcggcggcggcggcggcggcggcggcggcggcgaggcgggagctgtagccccctacggctacactcggccccctcaggggctggcgggccaggaaagcgacttcaccgcacctgatgtgtggtaccctggcggcatggtgagcagagtgccctatcccagtcccacttgtgtcaaaagcgaaatgggcccctggatggatagctactccggaccttacggggacatgcgaaatacccgaagaaagagactctggaaactcattatcaggtctatcaactcttgtatttgttctcccagggaaacagaagtacctgtgcgccagcagaaatgattgcactattgataaattccgaaggaaaaattgtccatcttgtcgtcttcggaaatgttatgaagcagggatgactctgggagaaaaattccgggttggcaattgcaagcatctcaaaatgaccagaccctgaagaaaggctgacttgcctcattcaaaatgagggctctagagggctctagtggatagtctggagaaacctggcgtctgaggcttaggagcttaggtttttgctcctcaacacagactttgacgttggggttgggggctactctcttgattgctgactccctccagcgggaccaatagtgttttcctacctcacagggatgttgtgaggacgggctgtagaagtaatagtggttaccattcatgtagttgtgagtatcatgattattgtttcctgtaatgtggcttggcattggcaaagtgctttttgattgttcttgatcacatatgatgggggccaggcactgactcaggcggatgcagtgaagctctggctcagtcgcttgcttttcgtggtgtgctgccaggaagaaactttgctgatgggactcaaggtgtcaccttggacaagaagcaactgtgtctgtctgaggttcctgtggccatctttatttgtgtattaggcaattcgtatttcccccttaggttctagccttctggatcccagccagtgacctagatcttagcctcaggccctgtcactgagctgaaggtagtagctgatccacagaagttcagtaaacaaggaccagatttctgcttctccaggagaagaagccagccaacccctctcttcaaacacactgagagactacagtccgactttccctcttacatctagccttactgtagccacactccttgattgctctctcacatcacatgcttctcttcatcagttgtaagcctctcattcttctcccaagccagactcaaatattgtattgatgtcaaagaagaatcacttagagtttggaatatcttgttctctctctgctccatagcttccatattgacaccagtttctttctagtggagaagtggagtctgtgaagccagggaaacacacatgtgagagtcagaaggactctccctgacttgcctggggcctgtctttcccaccttctccagtctgtctaaacacacacacacacacacacacacacacacacacgctctctctctctctccccccccaacacacacacactctctctctctctcacacacacacacatacacacacacttctttctctttcccctgactcagcaacattctggagaaaagccaaggaaggacttcaggaggggagtttcccccttctcagggcagaattttaatctccagaccaacaagaagttccctaatgtggattgaaaggctaatgaggtttatttttaactactttctatttgtttgaatgttgcatatttctactagtgaaattttcccttaataaagccattaatacacc

SEQ ID NO: 1294 - DNA, 10676 bp, Homo sapiens
  source 1..10676: mol_type = unassigned DNA
cgagatcccggggagccagcttgctgggagagcgggacggtccggagcaagcccagaggcagaggaggcgacagagggaaaaagggccgagctagccgctccagtgctgtacaggagccgaagggacgcaccacgccagccccagcccggctccagcgacagccaacgcctcttgcagcgcggcggcttcgaagccgccgcccggagctgccctttcctcttcggtgaagtttttaaaagctgctaaagactcggaggaagcaaggaaagtgcctggtaggactgacggctgcctttgtcctcctcctctccaccccgcctccccccaccctgccttccccccctcccccgtcttctctcccgcagctgcctcagtcggctactctcagccaacccccctcaccacccttctccccacccgcccccccgcccccgtcggcccagcgctgccagcccgagtttgcagagaggtaactccctttggctgcgagcgggcgagctagctgcacattgcaaagaaggctcttaggagccaggcgactggggagcggcttcagcactgcagccacgacccgcctggttaggctgcacgcggagagaaccctctgttttcccccactctctctccacctcctcctgccttccccaccccgagtgcggagccagagatcaaaagatgaaaaggcagtcaggtcttcagtagccaaaaaacaaaacaaacaaaaacaaaaaagccgaaataaaagaaaaagataataactcagttcttatttgcacctacttcagtggacactgaatttggaaggtggaggattttgtttttttcttttaagatctgggcatcttttgaatctacccttcaagtattaagagacagactgtgagcctagcagggcagatcttgtccaccgtgtgtcttcttctgcacgagactttgaggctgtcagagcgctttttgcgtggttgctcccgcaagtttccttctctggagcttcccgcaggtgggcagctagctgcagcgactaccgcatcatcacagcctgttgaactcttctgagcaagagaaggggaggcggggtaagggaagtaggtggaagattcagccaagctcaaggatggaagtgcagttagggctgggaagggtctaccctcggccgccgtccaagacctaccgaggagctttccagaatctgttccagagcgtgcgcgaagtgatccagaacccgggccccaggcacccagaggccgcgagcgcagcacctcccggcgccagtttgctgctgctgcagcagcagcagcagcagcagcagcagcagcagcagcagcagcagcagcagcagcagcagcagcagcaagagactagccccaggcagcagcagcagcagcagggtgaggatggttctccccaagcccatcgtagaggccccacaggctacctggtcctggatgaggaacagcaaccttcacagccgcagtcggccctggagtgccaccccgagagaggttgcgtcccagagcctggagccgccgtggccgccagcaaggggctgccgcagcagctgccagcacctccggacgaggatgactcagctgccccatccacgttgtccctgctgggccccactttccccggcttaagcagctgctccgctgaccttaaagacatcctgagcgaggccagcaccatgcaactccttcagcaacagcagcaggaagcagtatccgaaggcagcagcagcgggagagcgagggaggcctcgggggctcccacttcctccaaggacaattacttagggggcacttcgaccatttctgacaacgccaaggagttgtgtaaggcagtgtcggtgtccatgggcctgggtgtggaggcgttggagcatctgagtccaggggaacagcttcggggggattgcatgtacgccccacttttgggagttccacccgctgtgcgtcccactccttgtgccccattggccgaatgcaaaggttctctgctagacgacagcgcaggcaagagcactgaagatactgctgagtattcccctttcaagggaggttacaccaaagggctagaaggcgagagcctaggctgctctggcagcgctgcagcagggagctccgggacacttgaactgccgtctaccctgtctctctacaagtccggagcactggacgaggcagctgcgtaccagagtcgcgactactacaactttccactggctctggccggaccgccgccccctccgccgcctccccatccccacgctcgcatcaagctggagaacccgctggactacggcagcgcctgggcggctgcggcggcgcagtgccgctatggggacctggcgagcctgcatggcgcgggtgcagcgggacccggttctgggtcaccctcagccgccgcttcctcatcctggcacactctcttcacagccgaagaaggccagttgtatggaccgtgtggtggtggtgggggtggtggcggcggcggcggcggcggcggcggcggcggcggcggcggcggcggcggcgaggcgggagctgtagccccctacggctacactcggccccctcaggggctggcgggccaggaaagcgacttcaccgcacctgatgtgtggtaccctggcggcatggtgagcagagtgccctatcccagtcccacttgtgtcaaaagcgaaatgggcccctggatggatagctactccggaccttacggggacatgcgtttggagactgccagggaccatgttttgcccattgactattactttccaccccagaagacctgcctgatctgtggagatgaagcttctgggtgtcactatggagctctcacatgtggaagctgcaaggtcttcttcaaaagagccgctgaagggaaacagaagtacctgtgcgccagcagaaatgattgcactattgataaattccgaaggaaaaattgtccatcttgtcgtcttcggaaatgttatgaagcagggatgactctgggagcccggaagctgaagaaacttggtaatctgaaactacaggaggaaggagaggcttccagcaccaccagccccactgaggagacaacccagaagctgacagtgtcacacattgaaggctatgaatgtcagcccatctttctgaatgtcctggaagccattgagccaggtgtagtgtgtgctggacacgacaacaaccagcccgactcctttgcagccttgctctctagcctcaatgaactgggagagagacagcttgtacacgtggtcaagtgggccaaggccttgcctggcttccgcaacttacacgtggacgaccagatggctgtcattcagtactcctggatggggctcatggtgtttgccatgggctggcgatccttcaccaatgtcaactccaggatgctctacttcgcccctgatctggttttcaatgagtaccgcatgcacaagtcccggatgtacagccagtgtgtccgaatgaggcacctctctcaagagtttggatggctccaaatcaccccccaggaattcctgtgcatgaaagcactgctactcttcagcattaaagccaatttatttgctagaattccagtggatgggctgaaaaatcaaaaattctttgatgaacttcgaatgaactacatcaaggaactcgatcgtatcattgcatgcaaaagaaaaaatcccacatcctgctcaagacgcttctaccagctcaccaagctcctggactccgtgcagcctattgcgagagagctgcatcagttcacttttgacctgctaatcaagtcacacatggtgagcgtggactttccggaaatgatggcagagatcatctctgtgcaagtgcccaagatcctttctgggaaagtcaagcccatctatttccacacccagtgaagcattggaaaccctatttccccaccccagctcatgccccctttcagatgtcttctgcctgttataactctgcactactcctctgcagtgccttggggaatttcctctattgatgtacagtctgtcatgaacatgttcctgaattctatttgctgggctttttttttctctttctctcctttctttttcttcttccctccctatctaaccctcccatggcaccttcagactttgcttcccattgtggctcctatctgtgttttgaatggtgttgtatgcctttaaatctgtgatgatcctcatatggcccagtgtcaagttgtgcttgtttacagcactactctgtgccagccacacaaacgtttacttatcttatgccacgggaagtttagagagctaagattatctggggaaatcaaaacaaaaacaagcaaacaaaaaaaaaaagcaaaaacaaaacaaaaaataagccaaaaaaccttgctagtgttttttcctcaaaaataaataaataaataaataaatacgtacatacatacacacatacatacaaacatatagaaatccccaaagaggccaatagtgacgagaaggtgaaaattgcaggcccatggggagttactgattttttcatctcctccctccacgggagactttattttctgccaatggctattgccattagagggcagagtgaccccagagctgagttgggcaggggggtggacagagaggagaggacaaggagggcaatggagcatcagtacctgcccacagccttggtccctgggggctagactgctcaactgtggagcaattcattatactgaaaatgtgcttgttgttgaaaatttgtctgcatgttaatgcctcacccccaaacccttttctctctcactctctgcctccaacttcagattgactttcaatagtttttctaagacctttgaactgaatgttctcttcagccaaaacttggcgacttccacagaaaagtctgaccactgagaagaaggagagcagagatttaaccctttgtaaggccccatttggatccaggtctgctttctcatgtgtgagtcagggaggagctggagccagaggagaagaaaatgatagcttggctgttctcctgcttaggacactgactgaatagttaaactctcactgccactaccttttccccacctttaaaagacctgaatgaagttttctgccaaactccgtgaagccacaagcaccttatgtcctcccttcagtgttttgtgggcctgaatttcatcacactgcatttcagccatggtcatcaagcctgtttgcttcttttgggcatgttcacagattctctgttaagagcccccaccaccaagaaggttagcaggccaacagctctgacatctatctgtagatgccagtagtcacaaagatttcttaccaactctcagatcgctggagcccttagacaaactggaaagaaggcatcaaagggatcaggcaagctgggcgtcttgcccttgtcccccagagatgataccctcccagcaagtggagaagttctcacttccttctttagagcagctaaaggggctacccagatcagggttgaagagaaaactcaattaccagggtgggaagaatgaaggcactagaaccagaaaccctgcaaatgctcttcttgtcacccagcatatccacctgcagaagtcatgagaagagagaaggaacaaagaggagactctgactactgaattaaaatcttcagcggcaaagcctaaagccagatggacaccatctggtgagtttactcatcatcctcctctgctgctgattctgggctctgacattgcccatactcactcagattccccacctttgttgctgcctcttagtcagagggaggccaaaccattgagactttctacagaaccatggcttctttcggaaaggtctggttggtgtggctccaatactttgccacccatgaactcagggtgtgccctgggacactggttttatatagtcttttggcacacctgtgttctgttgacttcgttcttcaagcccaagtgcaagggaaaatgtccacctactttctcatcttggcctctgcctccttacttagctcttaatctcatctgttgaactcaagaaatcaagggccagtcatcaagctgcccattttaattgattcactctgtttgttgagaggatagtttctgagtgacatgatatgatccacaagggtttccttccctgatttctgcattgatattaatagccaaacgaacttcaaaacagctttaaataacaagggagaggggaacctaagatgagtaatatgccaatccaagactgctggagaaaactaaagctgacaggttccctttttggggtgggatagacatgttctggttttctttattattacacaatctggctcatgtacaggatcacttttagctgttttaaacagaaaaaaatatccaccactcttttcagttacactaggttacattttaataggtcctttacatctgttttggaatgattttcatcttttgtgatacacagattgaattatatcattttcatatctctccttgtaaatactagaagctctcctttacatttctctatcaaatttttcatctttatgggtttcccaattgtgactcttgtcttcatgaatatatgtttttcatttgcaaaagccaaaaatcagtgaaacagcagtgtaattaaaagcaacaactggattactccaaatttccaaatgacaaaactagggaaaaatagcctacacaagcctttaggcctactctttctgtgcttgggtttgagtgaacaaaggagattttagcttggctctgttctcccatggatgaaaggaggaggattttttttttcttttggccattgatgttctagccaatgtaattgacagaagtctcattttgcatgcgctctgctctacaaacagagttggtatggttggtatactgtactcacctgtgagggactggccactcagacccacttagctggtgagctagaagatgaggatcactcactggaaaagtcacaaggaccatctccaaacaagttggcagtgctcgatgtggacgaagagtgaggaagagaaaaagaaggagcaccagggagaaggctccgtctgtgctgggcagcagacagctgccaggatcacgaactctgtagtcaaagaaaagagtcgtgtggcagtttcagctctcgttcattgggcagctcgcctaggcccagcctctgagctgacatgggagttgttggattctttgtttcatagctttttctatgccataggcaatattgttgttcttggaaagtttattatttttttaactcccttactctgagaaagggatattttgaaggactgtcatatatctttgaaaaaagaaaatctgtaatacatatatttttatgtatgttcactggcactaaaaaatatagagagcttcattctgtcctttgggtagttgctgaggtaattgtccaggttgaaaaataatgtgctgatgctagagtccctctctgtccatactctacttctaaatacatataggcatacatagcaagttttatttgacttgtactttaagagaaaatatgtccaccatccacatgatgcacaaatgagctaacattgagcttcaagtagcttctaagtgtttgtttcattaggcacagcacagatgtggcctttccccccttctctcccttgatatctggcagggcataaaggcccaggccacttcctctgccccttcccagccctgcaccaaagctgcatttcaggagactctctccagacagcccagtaactacccgagcatggcccctgcatagccctggaaaaataagaggctgactgtctacgaattatcttgtgccagttgcccaggtgagagggcactgggccaagggagtggttttcatgtttgacccactacaaggggtcatgggaatcaggaatgccaaagcaccagatcaaatccaaaacttaaagtcaaaataagccattcagcatgttcagtttcttggaaaaggaagtttctacccctgatgcctttgtaggcagatctgttctcaccattaatctttttgaaaatcttttaaagcagtttttaaaaagagagatgaaagcatcacattatataaccaaagattacattgtacctgctaagataccaaaattcataagggcagggggggagcaagcattagtgcctctttgataagctgtccaaagacagactaaaggactctgctggtgactgacttataagagctttgtgggtttttttttccctaataatatacatgtttagaagaattgaaaataatttcgggaaaatgggattatgggtccttcactaagtgattttataagcagaactggctttccttttctctagtagttgctgagcaaattgttgaagctccatcattgcatggttggaaatggagctgttcttagccactgtgtttgctagtgcccatgttagcttatctgaagatgtgaaacccttgctgataagggagcatttaaagtactagattttgcactagagggacagcaggcagaaatccttatttctgcccactttggatggcacaaaaagttatctgcagttgaaggcagaaagttgaaatacattgtaaatgaatatttgtatccatgtttcaaaattgaaatatatatatatatatatatatatatatatatatatatatagtgtgtgtgtgtgttctgatagctttaactttctctgcatctttatatttggttccagatcacacctgatgccatgtacttgtgagagaggatgcagttttgttttggaagctctctcagaacaaacaagacacctggattgatcagttaactaaaagttttctcccctattgggtttgacccacaggtcctgtgaaggagcagagggataaaaagagtagaggacatgatacattgtactttactagttcaagacagatgaatgtggaaagcataaaaactcaatggaactgactgagatttaccacagggaaggcccaaacttggggccaaaagcctacccaagtgattgaccagtggccccctaatgggacctgagctgttggaagaagagaactgttccttggtcttcaccatccttgtgagagaagggcagtttcctgcattggaacctggagcaagcgctctatctttcacacaaattccctcacctgagattgaggtgctcttgttactgggtgtctgtgtgctgtaattctggttttggatatgttctgtaaagattttgacaaatgaaaatgtgtttttctctgttaaaacttgtcagagtactagaagttgtatctctgtaggtgcaggtccatttctgcccacaggtagggtgtttttctttgattaagagattgacacttctgttgcctaggacctcccaactcaaccatttctaggtgaaggcagaaaaatccacattagttactcctcttcagacatttcagctgagataacaaatcttttggaattttttcacccatagaaagagtggtagatatttgaatttagcaggtggagtttcatagtaaaaacagcttttgactcagctttgatttatcctcatttgatttggccagaaagtaggtaatatgcattgattggcttctgattccaattcagtatagcaaggtgctaggttttttcctttccccacctgtctcttagcctggggaattaaatgagaagccttagaatgggtggcccttgtgacctgaaacacttcccacataagctacttaacaagattgtcatggagctgcagattccattgcccaccaaagactagaacacacacatatccatacaccaaaggaaagacaattctgaaatgctgtttctctggtggttccctctctggctgctgcctcacagtatgggaacctgtactctgcagaggtgacaggccagatttgcattatctcacaaccttagcccttggtgctaactgtcctacagtgaagtgcctggggggttgtcctatcccataagccacttggatgctgacagcagccaccatcagaatgacccacgcaaaaaaaagaaaaaaaaaattaaaaagtcccctcacaacccagtgacacctttctgctttcctctagactggaacattgattagggagtgcctcagacatgacattcttgtgctgtccttggaattaatctggcagcaggagggagcagactatgtaaacagagataaaaattaattttcaatattgaaggaaaaaagaaataagaagagagagagaaagaaagcatcacacaaagattttcttaaaagaaacaattttgcttgaaatctctttagatggggctcatttctcacggtggcacttggcctccactgggcagcaggaccagctccaagcgctagtgttctgttctctttttgtaatcttggaatcttttgttgctctaaatacaattaaaaatggcagaaacttgtttgttggactacatgtgtgactttgggtctgtctctgcctctgctttcagaaatgtcatccattgtgtaaaatattggcttactggtctgccagctaaaacttggccacatcccctgttatggctgcaggatcgagttattgttaacaaagagacccaagaaaagctgctaatgtcctcttatcattgttgttaatttgttaaaacataaagaaatctaaaatttc

SEQ ID NO: 1295 - DNA, 10221 bp, Homo sapiens
  source 1..10221: mol_type = unassigned DNA
cgagatcccggggagccagcttgctgggagagcgggacggtccggagcaagcccagaggcagaggaggcgacagagggaaaaagggccgagctagccgctccagtgctgtacaggagccgaagggacgcaccacgccagccccagcccggctccagcgacagccaacgcctcttgcagcgcggcggcttcgaagccgccgcccggagctgccctttcctcttcggtgaagtttttaaaagctgctaaagactcggaggaagcaaggaaagtgcctggtaggactgacggctgcctttgtcctcctcctctccaccccgcctccccccaccctgccttccccccctcccccgtcttctctcccgcagctgcctcagtcggctactctcagccaacccccctcaccacccttctccccacccgcccccccgcccccgtcggcccagcgctgccagcccgagtttgcagagaggtaactccctttggctgcgagcgggcgagctagctgcacattgcaaagaaggctcttaggagccaggcgactggggagcggcttcagcactgcagccacgacccgcctggttaggctgcacgcggagagaaccctctgttttcccccactctctctccacctcctcctgccttccccaccccgagtgcggagccagagatcaaaagatgaaaaggcagtcaggtcttcagtagccaaaaaacaaaacaaacaaaaacaaaaaagccgaaataaaagaaaaagataataactcagttcttatttgcacctacttcagtggacactgaatttggaaggtggaggattttgtttttttcttttaagatctgggcatcttttgaatctacccttcaagtattaagagacagactgtgagcctagcagggcagatcttgtccaccgtgtgtcttcttctgcacgagactttgaggctgtcagagcgctttttgcgtggttgctcccgcaagtttccttctctggagcttcccgcaggtgggcagctagctgcagcgactaccgcatcatcacagcctgttgaactcttctgagcaagagaaggggaggcggggtaagggaagtaggtggaagattcagccaagctcaaggatggaagtgcagttagggctgggaagggtctaccctcggccgccgtccaagacctaccgaggagctttccagaatctgttccagagcgtgcgcgaagtgatccagaacccgggccccaggcacccagaggccgcgagcgcagcacctcccggcgccagtttgctgctgctgcagcagcagcagcagcagcagcagcagcagcagcagcagcagcagcagcagcagcagcagcagcagcaagagactagccccaggcagcagcagcagcagcagggtgaggatggttctccccaagcccatcgtagaggccccacaggctacctggtcctggatgaggaacagcaaccttcacagccgcagtcggccctggagtgccaccccgagagaggttgcgtcccagagcctggagccgccgtggccgccagcaaggggctgccgcagcagctgccagcacctccggacgaggatgactcagctgccccatccacgttgtccctgctgggccccactttccccggcttaagcagctgctccgctgaccttaaagacatcctgagcgaggccagcaccatgcaactccttcagcaacagcagcaggaagcagtatccgaaggcagcagcagcgggagagcgagggaggcctcgggggctcccacttcctccaaggacaattacttagggggcacttcgaccatttctgacaacgccaaggagttgtgtaaggcagtgtcggtgtccatgggcctgggtgtggaggcgttggagcatctgagtccaggggaacagcttcggggggattgcatgtacgccccacttttgggagttccacccgctgtgcgtcccactccttgtgccccattggccgaatgcaaaggttctctgctagacgacagcgcaggcaagagcactgaagatactgctgagtattcccctttcaagggaggttacaccaaagggctagaaggcgagagcctaggctgctctggcagcgctgcagcagggagctccgggacacttgaactgccgtctaccctgtctctctacaagtccggagcactggacgaggcagctgcgtaccagagtcgcgactactacaactttccactggctctggccggaccgccgccccctccgccgcctccccatccccacgctcgcatcaagctggagaacccgctggactacggcagcgcctgggcggctgcggcggcgcagtgccgctatggggacctggcgagcctgcatggcgcgggtgcagcgggacccggttctgggtcaccctcagccgccgcttcctcatcctggcacactctcttcacagccgaagaaggccagttgtatggaccgtgtggtggtggtgggggtggtggcggcggcggcggcggcggcggcggcggcggcggcggcggcggcggcggcgaggcgggagctgtagccccctacggctacactcggccccctcaggggctggcgggccaggaaagcgacttcaccgcacctgatgtgtggtaccctggcggcatggtgagcagagtgccctatcccagtcccacttgtgtcaaaagcgaaatgggcccctggatggatagctactccggaccttacggggacatgcgtttggagactgccagggaccatgttttgcccattgactattactttccaccccagaagacctgcctgatctgtggagatgaagcttctgggtgtcactatggagctctcacatgtggaagctgcaaggtcttcttcaaaagagccgctgaagggaaacagaagtacctgtgcgccagcagaaatgattgcactattgataaattccgaaggaaaaattgtccatcttgtcgtcttcggaaatgttatgaagcagggatgactctgggagcccggaagctgaagaaacttggtaatctgaaactacaggaggaaggagaggcttccagcaccaccagccccactgaggagacaacccagaagctgacagtgtcacacattgaaggctatgaatgtcagcccatctttctgaatgtcctggaagccattgagccaggtgtagtgtgtgctggacacgacaacaaccagcccgactcctttgcagccttgctctctagcctcaatgaactgggagagagacagcttgtacacgtggtcaagtgggccaaggccttgcctgattgcgagagagctgcatcagttcacttttgacctgctaatcaagtcacacatggtgagcgtggactttccggaaatgatggcagagatcatctctgtgcaagtgcccaagatcctttctgggaaagtcaagcccatctatttccacacccagtgaagcattggaaaccctatttccccaccccagctcatgccccctttcagatgtcttctgcctgttataactctgcactactcctctgcagtgccttggggaatttcctctattgatgtacagtctgtcatgaacatgttcctgaattctatttgctgggctttttttttctctttctctcctttctttttcttcttccctccctatctaaccctcccatggcaccttcagactttgcttcccattgtggctcctatctgtgttttgaatggtgttgtatgcctttaaatctgtgatgatcctcatatggcccagtgtcaagttgtgcttgtttacagcactactctgtgccagccacacaaacgtttacttatcttatgccacgggaagtttagagagctaagattatctggggaaatcaaaacaaaaacaagcaaacaaaaaaaaaaagcaaaaacaaaacaaaaaataagccaaaaaaccttgctagtgttttttcctcaaaaataaataaataaataaataaatacgtacatacatacacacatacatacaaacatatagaaatccccaaagaggccaatagtgacgagaaggtgaaaattgcaggcccatggggagttactgattttttcatctcctccctccacgggagactttattttctgccaatggctattgccattagagggcagagtgaccccagagctgagttgggcaggggggtggacagagaggagaggacaaggagggcaatggagcatcagtacctgcccacagccttggtccctgggggctagactgctcaactgtggagcaattcattatactgaaaatgtgcttgttgttgaaaatttgtctgcatgttaatgcctcacccccaaacccttttctctctcactctctgcctccaacttcagattgactttcaatagtttttctaagacctttgaactgaatgttctcttcagccaaaacttggcgacttccacagaaaagtctgaccactgagaagaaggagagcagagatttaaccctttgtaaggccccatttggatccaggtctgctttctcatgtgtgagtcagggaggagctggagccagaggagaagaaaatgatagcttggctgttctcctgcttaggacactgactgaatagttaaactctcactgccactaccttttccccacctttaaaagacctgaatgaagttttctgccaaactccgtgaagccacaagcaccttatgtcctcccttcagtgttttgtgggcctgaatttcatcacactgcatttcagccatggtcatcaagcctgtttgcttcttttgggcatgttcacagattctctgttaagagcccccaccaccaagaaggttagcaggccaacagctctgacatctatctgtagatgccagtagtcacaaagatttcttaccaactctcagatcgctggagcccttagacaaactggaaagaaggcatcaaagggatcaggcaagctgggcgtcttgcccttgtcccccagagatgataccctcccagcaagtggagaagttctcacttccttctttagagcagctaaaggggctacccagatcagggttgaagagaaaactcaattaccagggtgggaagaatgaaggcactagaaccagaaaccctgcaaatgctcttcttgtcacccagcatatccacctgcagaagtcatgagaagagagaaggaacaaagaggagactctgactactgaattaaaatcttcagcggcaaagcctaaagccagatggacaccatctggtgagtttactcatcatcctcctctgctgctgattctgggctctgacattgcccatactcactcagattccccacctttgttgctgcctcttagtcagagggaggccaaaccattgagactttctacagaaccatggcttctttcggaaaggtctggttggtgtggctccaatactttgccacccatgaactcagggtgtgccctgggacactggttttatatagtcttttggcacacctgtgttctgttgacttcgttcttcaagcccaagtgcaagggaaaatgtccacctactttctcatcttggcctctgcctccttacttagctcttaatctcatctgttgaactcaagaaatcaagggccagtcatcaagctgcccattttaattgattcactctgtttgttgagaggatagtttctgagtgacatgatatgatccacaagggtttccttccctgatttctgcattgatattaatagccaaacgaacttcaaaacagctttaaataacaagggagaggggaacctaagatgagtaatatgccaatccaagactgctggagaaaactaaagctgacaggttccctttttggggtgggatagacatgttctggttttctttattattacacaatctggctcatgtacaggatcacttttagctgttttaaacagaaaaaaatatccaccactcttttcagttacactaggttacattttaataggtcctttacatctgttttggaatgattttcatcttttgtgatacacagattgaattatatcattttcatatctctccttgtaaatactagaagctctcctttacatttctctatcaaatttttcatctttatgggtttcccaattgtgactcttgtcttcatgaatatatgtttttcatttgcaaaagccaaaaatcagtgaaacagcagtgtaattaaaagcaacaactggattactccaaatttccaaatgacaaaactagggaaaaatagcctacacaagcctttaggcctactctttctgtgcttgggtttgagtgaacaaaggagattttagcttggctctgttctcccatggatgaaaggaggaggattttttttttcttttggccattgatgttctagccaatgtaattgacagaagtctcattttgcatgcgctctgctctacaaacagagttggtatggttggtatactgtactcacctgtgagggactggccactcagacccacttagctggtgagctagaagatgaggatcactcactggaaaagtcacaaggaccatctccaaacaagttggcagtgctcgatgtggacgaagagtgaggaagagaaaaagaaggagcaccagggagaaggctccgtctgtgctgggcagcagacagctgccaggatcacgaactctgtagtcaaagaaaagagtcgtgtggcagtttcagctctcgttcattgggcagctcgcctaggcccagcctctgagctgacatgggagttgttggattctttgtttcatagctttttctatgccataggcaatattgttgttcttggaaagtttattatttttttaactcccttactctgagaaagggatattttgaaggactgtcatatatctttgaaaaaagaaaatctgtaatacatatatttttatgtatgttcactggcactaaaaaatatagagagcttcattctgtcctttgggtagttgctgaggtaattgtccaggttgaaaaataatgtgctgatgctagagtccctctctgtccatactctacttctaaatacatataggcatacatagcaagttttatttgacttgtactttaagagaaaatatgtccaccatccacatgatgcacaaatgagctaacattgagcttcaagtagcttctaagtgtttgtttcattaggcacagcacagatgtggcctttccccccttctctcccttgatatctggcagggcataaaggcccaggccacttcctctgccccttcccagccctgcaccaaagctgcatttcaggagactctctccagacagcccagtaactacccgagcatggcccctgcatagccctggaaaaataagaggctgactgtctacgaattatcttgtgccagttgcccaggtgagagggcactgggccaagggagtggttttcatgtttgacccactacaaggggtcatgggaatcaggaatgccaaagcaccagatcaaatccaaaacttaaagtcaaaataagccattcagcatgttcagtttcttggaaaaggaagtttctacccctgatgcctttgtaggcagatctgttctcaccattaatctttttgaaaatcttttaaagcagtttttaaaaagagagatgaaagcatcacattatataaccaaagattacattgtacctgctaagataccaaaattcataagggcagggggggagcaagcattagtgcctctttgataagctgtccaaagacagactaaaggactctgctggtgactgacttataagagctttgtgggtttttttttccctaataatatacatgtttagaagaattgaaaataatttcgggaaaatgggattatgggtccttcactaagtgattttataagcagaactggctttccttttctctagtagttgctgagcaaattgttgaagctccatcattgcatggttggaaatggagctgttcttagccactgtgtttgctagtgcccatgttagcttatctgaagatgtgaaacccttgctgataagggagcatttaaagtactagattttgcactagagggacagcaggcagaaatccttatttctgcccactttggatggcacaaaaagttatctgcagttgaaggcagaaagttgaaatacattgtaaatgaatatttgtatccatgtttcaaaattgaaatatatatatatatatatatatatatatatatatatatatagtgtgtgtgtgtgttctgatagctttaactttctctgcatctttatatttggttccagatcacacctgatgccatgtacttgtgagagaggatgcagttttgttttggaagctctctcagaacaaacaagacacctggattgatcagttaactaaaagttttctcccctattgggtttgacccacaggtcctgtgaaggagcagagggataaaaagagtagaggacatgatacattgtactttactagttcaagacagatgaatgtggaaagcataaaaactcaatggaactgactgagatttaccacagggaaggcccaaacttggggccaaaagcctacccaagtgattgaccagtggccccctaatgggacctgagctgttggaagaagagaactgttccttggtcttcaccatccttgtgagagaagggcagtttcctgcattggaacctggagcaagcgctctatctttcacacaaattccctcacctgagattgaggtgctcttgttactgggtgtctgtgtgctgtaattctggttttggatatgttctgtaaagattttgacaaatgaaaatgtgtttttctctgttaaaacttgtcagagtactagaagttgtatctctgtaggtgcaggtccatttctgcccacaggtagggtgtttttctttgattaagagattgacacttctgttgcctaggacctcccaactcaaccatttctaggtgaaggcagaaaaatccacattagttactcctcttcagacatttcagctgagataacaaatcttttggaattttttcacccatagaaagagtggtagatatttgaatttagcaggtggagtttcatagtaaaaacagcttttgactcagctttgatttatcctcatttgatttggccagaaagtaggtaatatgcattgattggcttctgattccaattcagtatagcaaggtgctaggttttttcctttccccacctgtctcttagcctggggaattaaatgagaagccttagaatgggtggcccttgtgacctgaaacacttcccacataagctacttaacaagattgtcatggagctgcagattccattgcccaccaaagactagaacacacacatatccatacaccaaaggaaagacaattctgaaatgctgtttctctggtggttccctctctggctgctgcctcacagtatgggaacctgtactctgcagaggtgacaggccagatttgcattatctcacaaccttagcccttggtgctaactgtcctacagtgaagtgcctggggggttgtcctatcccataagccacttggatgctgacagcagccaccatcagaatgacccacgcaaaaaaaagaaaaaaaaaattaaaaagtcccctcacaacccagtgacacctttctgctttcctctagactggaacattgattagggagtgcctcagacatgacattcttgtgctgtccttggaattaatctggcagcaggagggagcagactatgtaaacagagataaaaattaattttcaatattgaaggaaaaaagaaataagaagagagagagaaagaaagcatcacacaaagattttcttaaaagaaacaattttgcttgaaatctctttagatggggctcatttctcacggtggcacttggcctccactgggcagcaggaccagctccaagcgctagtgttctgttctctttttgtaatcttggaatcttttgttgctctaaatacaattaaaaatggcagaaacttgtttgttggactacatgtgtgactttgggtctgtctctgcctctgctttcagaaatgtcatccattgtgtaaaatattggcttactggtctgccagctaaaacttggccacatcccctgttatggctgcaggatcgagttattgttaacaaagagacccaagaaaagctgctaatgtcctcttatcattgttgttaatttgttaaaacataaagaaatctaaaatttc

SEQ ID NO: 1296 - DNA, 4927 bp, Homo sapiens
  source 1..4927: mol_type = unassigned DNA
acccgcgagcggacggcggccgcgtagtgaggacctggacatcgctgtgtggctggccacggtgcacctggagcagtatgcagacacgttccgacggcatggcctggctacagcaggtgcagcccggggcctgggccacgaggagttgaagcagttgggcatcagcgccacagggcaccggaaacgcattctacgcctgctacagacaggcaccgaagagggctccctggatcccaaatcagatagtgccatggaaccatcccccagcccagccccgcaagcccagccccctaagcccgtgccgaagcccaggaccgtgtttggtggactcagtggccctgccaccactcagagacctgggctgagcccagccctcgggggaccaggagtgtccaggagcccagagcccagcccaaggcctcctcctctccccacttcctcctctgagcagtcttcagccctaaatactgtggagatgatgcctaattccatctacttcggcctggactcaagaggcagggcacaggcagctcaggacaaggccccagacagctcccaaatctctgcccccacccctgccctcaggcccacaacaggcacagtgcacatcatggatcctggttgcctgtactatggtgtccaacctgtggggactccaggagcccccgacagaagagagagcagaggtgtttgtcagggcagggctgaacacaggctcagcagacaggatctggaggcacgggaggatgctggctatgccagccttgagctacctggagactccaccctcttatcgcccaccctggaaacagaggagaccagtgatgacctcatttcaccctatgccagcttctccttcacggcagaccgcctcacgcccctgctcagtggctggctagacaagctctcccctcagggaaactatgtcttccagagacgctttgtgcagttcaatgggaggagtctgatgtactttggcagtgacaaggaccccttccctaagggtgtgatacctttgactgccattgagatgacccgcagcagcaaggacaacaagttccaggtcatcaccggccagagggtgttcgtgttccgcacagagagcgaggctcagcgggacatgtggtgctccacgctgcagtcctgtctgaaggagcagcgcctcctgggccacccccggcccccccaaccaccccgacccctccgcacgggcatgctggagctgcgtggacacaaggccaaggtgtttgctgccttgagccctggagagctggcactgtacaagagtgagcaggccttctctctgggcatcgggatctgcttcatcgaactgcagggctgcagcgtccgggagaccaagagtcgaagctttgacctgctcacaccccatcgctgcttcagcttcacagccgagtctgggggtgctcggcagagctgggcggccgctctgcaggaagcagtaaccgagaccctgtctgactacgaggtggctgagaagatctggtctaatcgggccaaccggcagtgtgcggactgtgggtcctcccgcccagattgggctgctgtcaatttgggggtggtcatctgcaagcagtgtgcaggtcagcaccgggccctgggttctgggatctccaaggtgcagagcctgaagctggacacgagtgtctggagtaatgagatagtacagttattcattgtcctgggaaatgatcgtgccaaccgcttctgggcagggaccctacccccaggtgagggactacatccagatgcgacccctggcccccggggagagttcatctcccgaaagtaccgtctgggtctcttccggaagccccaccctcagtacccagatcatagccagcttctccaggcactgtgtgcagctgtggcaagacccaacctgctgaagaacatgacccagctcctctgtgttgaggcctttgaagacccctcccctggtgtgtacaatgaggtggtggtgcgtgctacttacagcggcttcctgtactgcagtcccgtcagcaacaaagctggaccctcaccccctcgcaggggccgggatgctcccccgcgcctttggtgtgtgctgggagcagctctggaaatgtttgcatcggaaaacagccctgaacccctcagcctcatacagccccaggatattgtatgtctgggtgtgagccccccacccactgacccaggtgacaggttccccttttcctttgagctcatcctcgctggggggaggatccagcattttggcacagatggagctgacagtctggaggcctggactagtgctgtgggcaagtggttctccccgctgagctgccaccagctgctgggccccgggctgctgcggctgggccgcctatggctgcggtccccctcccatacagccccggcccctggtctctggctgtcagggtttggcctccttcgtggtgaccacctcttcctgtgctcagcgccgggcccaggccccccagcccctgaggacatggtgcatctgcggcggctacaggagatcagtgtggtttctgcagctgacaccccagataagaaagagcatttggtcctggtggagacaggaaggaccctgtatctgcaaggagagggccggctggacttcacggcatggaacgcagccattgggggcgcggctggtgggggcggcacagggctgcaggagcagcagatgagccggggtgacatccccatcatcgtggatgcctgcatcagttttgttacccagcatgagctgccccagaagaatcagcgcctggagaaatataaagatgtgattggctgcctgccgcgggtcaaccgccgcacactggccaccctcattgggcatctctatcgggtgcagaaatgtgcggctctaaaccagatgtgcacgcggaacttggctctgctgtttgcacccagcgtgttccagacggatgggcgaggggagcacgaggtgcgagtgctgcaagagctcattgatggctacatctctgtctttgatatcgattctgaccaggtagctcagattgacttggaggtcagtcttatcaccacctggaaggacgtgcagctgtctcaggctggagacctcatcatggaagtttatatagagcagcagctcccagacaactgtgtcaccctgaaggtgtccccaaccctgactgctgaggagctgactaaccaggtactggagatgcgggggacagcagctgggatggacttgtgggtgacttttgagattcgcgagcatggggagctggagcggccactgcatcccaaggaaaaggtcttagagcaggctttacaatggtgccagctcccagagccctgctcagcttccctgctcttgaaaaaagtccccctggcccaagctggctgcctcttcacaggtatccgacgtgagagcccacgggtggggctgttgcggtgtcgtgaggagccacctcgcttgctgggaagccgcttccaggagaggttctttctgctgcgtggccgctgcctgctgctgctcaaggagaagaaaagctctaaaccagaacgggagtggcctttggaaggtgccaaggtctacctgggaatccgcaagaagttaaagcccccaacaccgtggggcttcacattgatactagagaagatgcacctctacttgtcctgcactgacgaggatgaaatgtgggattggaccaccagcatccttaaagcccagcacgatgaccagcagccagtggtcttacgacgccattcctcctctgaccttgcccgtcagaagtttggcactatgcctttgctgcctatccgtggggatgacagtggagccaccctcctctctgccaatcagaccctgcggcgactacacaaccggaggaccctgtccatgttctttccaatgaagtcatcccaggggtctgtggaggagcaagaggagctggaggagcctgtgtacgaggagccagtgtatgaggaagtaggggccttccctgagttgatccaggacacttctacctccttctccaccacacgggagtggacagtgaagccagagaaccccctcaccagccagaagtcattggatcaaccctttctctccaagtcaagcacccttggccaggaggagaggccacctgagccccctccaggccccccttcaaagagcagtccccaggcacgggggtccctagaggaacagctgctccaggagctcagcagcctcatcctgaggaaaggagagaccactgcaggcctgggaagtccttcccagccatccagcccccaatcccccagccccactggccttccaacacagacacctggcttccccacccaacccccatgcacttccagtccaccctccagccagcccctcacatgaccctaggaccagcagtctgagagggtaggtaccagaagacccagaaactcttatcgtggcactgttgcagcttcctctgccctggctggaaagactccagaatccagtgtggtgctgtggaaggagcactggactaaaggcttcagtggctgcgtgtcccaggacaggtcatggcccctctctgggcccagcccatttatctataccatgaggtaactgaagtaaggagagcagtgaatgtcaaactgtgtttcttagagccataagccccacatattatccctgaacaagggcagctcctgctttatatatttgatacgtaggggttccatgagagattttgggttttaaaggaatggttttactgcattaaagaaaaaaaatgctttggaaaccagaggcctgggtgatgttaaagtctatcctgtcccacttcctacattctgggactaccgtgaagcctggagtagggagagcgagtttgggagctgggactcggggagtcaaaaatagatgagtaattgtcaataaacctgggaaccaaaagac

SEQ ID NO: 1297 - DNA, 5250 bp, Homo sapiens
  source 1..5250: mol_type = unassigned DNA
ctcggacgagcggcgggcacccgcgagcggacggcggccgcgtagtgagcaatggcctgagcccccatggctgcccctcaggacctggacatcgctgtgtggctggccacggtgcacctggagcagtatgcagacacgttccgacggcatggcctggctacagcaggtgcagcccggggcctgggccacgaggagttgaagcagttgggcatcagcgccacagggcaccggaaacgcattctacgcctgctacagacaggcaccgaagagggctccctggatcccaaatcagatagtgccatggaaccatcccccagcccagccccgcaagcccagccccctaagcccgtgccgaagcccaggaccgtgtttggtggactcagtggccctgccaccactcagagacctgggctgagcccagccctcgggggaccaggagtgtccaggagcccagagcccagcccaaggcctcctcctctccccacttcctcctctgagcagtcttcagccctaaatactgtggagatgatgcctaattccatctacttcggcctggactcaagaggcagggcacaggcagctcaggacaaggccccagacagctcccaaatctctgcccccacccctgccctcaggcccacaacaggcacagtgcacatcatggatcctggttgcctgtactatggtgtccaacctgtggggactccaggagcccccgacagaagagagagcagaggtgtttgtcagggcagggctgaacacaggctcagcagacaggatctggaggcacgggaggatgctggctatgccagccttgagctacctggagactccaccctcttatcgcccaccctggaaacagaggagaccagtgatgacctcatttcaccctatgccagcttctccttcacggcagaccgcctcacgcccctgctcagtggctggctagacaagctctcccctcagggaaactatgtcttccagagacgctttgtgcagttcaatgggaggagtctgatgtactttggcagtgacaaggaccccttccctaagggtgtgatacctttgactgccattgagatgacccgcagcagcaaggacaacaagttccaggtcatcaccggccagagggtgttcgtgttccgcacagagagcgaggctcagcgggacatgtggtgctccacgctgcagtcctgtctgaaggagcagcgcctcctgggccacccccggcccccccaaccaccccgacccctccgcacgggcatgctggagctgcgtggacacaaggccaaggtgtttgctgccttgagccctggagagctggcactgtacaagagtgagcaggccttctctctgggcatcgggatctgcttcatcgaactgcagggctgcagcgtccgggagaccaagagtcgaagctttgacctgctcacaccccatcgctgcttcagcttcacagccgagtctgggggtgctcggcagagctgggcggccgctctgcaggaagcagtaaccgagaccctgtctgactacgaggtggctgagaagatctggtctaatcgggccaaccggcagtgtgcggactgtgggtcctcccgcccagattgggctgctgtcaatttgggggtggtcatctgcaagcagtgtgcaggtcagcaccgggccctgggttctgggatctccaaggtgcagagcctgaagctggacacgagtgtctggagtaatgagatagtacagttattcattgtcctgggaaatgatcgtgccaaccgcttctgggcagggaccctacccccaggtgagggactacatccagatgcgacccctggcccccggggagagttcatctcccgaaagtaccgtctgggtctcttccggaagccccaccctcagtacccagatcatagccagcttctccaggcactgtgtgcagctgtggcaagacccaacctgctgaagaacatgacccagctcctctgtgttgaggcctttgaaggcgaggagccctggttccccccagcccctgatggcagctgccctggcctcttgccctcagacccctcccctggtgtgtacaatgaggtggtggtgcgtgctacttacagcggcttcctgtactgcagtcccgtcagcaacaaagctggaccctcaccccctcgcaggggccgggatgctcccccgcgcctttggtgtgtgctgggagcagctctggaaatgtttgcatcggaaaacagccctgaacccctcagcctcatacagccccaggatattgtatgtctgggtgtgagccccccacccactgacccaggtgacaggttccccttttcctttgagctcatcctcgctggggggaggatccagcattttggcacagatggagctgacagtctggaggcctggactagtgctgtgggcaagtggttctccccgctgagctgccaccagctgctgggccccgggctgctgcggctgggccgcctatggctgcggtccccctcccatacagccccggcccctggtctctggctgtcagggtttggcctccttcgtggtgaccacctcttcctgtgctcagcgccgggcccaggccccccagcccctgaggacatggtgcatctgcggcggctacaggagatcagtgtggtttctgcagctgacaccccagataagaaagagcatttggtcctggtggagacaggaaggaccctgtatctgcaaggagagggccggctggacttcacggcatggaacgcagccattgggggcgcggctggtgggggcggcacagggctgcaggagcagcagatgagccggggtgacatccccatcatcgtggatgcctgcatcagttttgttacccagcatgggctccggctggaaggtgtataccggaaagggggcgctcgtgcccgcagcctgagactcctggctgagttccgtcgggatgcccggtcggtgaagctccgaccaggggagcactttgtggaggatgtcactgacacactcaaacgcttctttcgtgagctcgatgaccctgtgacctctgcacggttgctgcctcgctggagggaggctgctgagctgccccagaagaatcagcgcctggagaaatataaagatgtgattggctgcctgccgcgggtcaaccgccgcacactggccaccctcattgggcatctctatcgggtgcagaaatgtgcggctctaaaccagatgtgcacgcggaacttggctctgctgtttgcacccagcgtgttccagacggatgggcgaggggagcacgaggtgcgagtgctgcaagagctcattgatggctacatctctgtctttgatatcgattctgaccaggtagctcagattgacttggaggtcagtcttatcaccacctggaaggacgtgcagctgtctcaggctggagacctcatcatggaagtttatatagagcagcagctcccagacaactgtgtcaccctgaaggtgtccccaaccctgactgctgaggagctgactaaccaggtactggagatgcgggggacagcagctgggatggacttgtgggtgacttttgagattcgcgagcatggggagctggagcggccactgcatcccaaggaaaaggtcttagagcaggctttacaatggtgccagctcccagagccctgctcagcttccctgctcttgaaaaaagtccccctggcccaagctggctgcctcttcacaggtatccgacgtgagagcccacgggtggggctgttgcggtgtcgtgaggagccacctcgcttgctgggaagccgcttccaggagaggttctttctgctgcgtggccgctgcctgctgctgctcaaggagaagaaaagctctaaaccagaacgggagtggcctttggaaggtgccaaggtctacctgggaatccgcaagaagttaaagcccccaacaccgtggggcttcacattgatactagagaagatgcacctctacttgtcctgcactgacgaggatgaaatgtgggattggaccaccagcatccttaaagcccagcacgatgaccagcagccagtggtcttacgacgccattcctcctctgaccttgcccgtcagaagtttggcactatgcctttgctgcctatccgtggggatgacagtggagccaccctcctctctgccaatcagaccctgcggcgactacacaaccggaggaccctgtccatgttctttccaatgaagtcatcccaggggtctgtggaggagcaagaggagctggaggagcctgtgtacgaggagccagtgtatgaggaagtaggggccttccctgagttgatccaggacacttctacctccttctccaccacacgggagtggacagtgaagccagagaaccccctcaccagccagaagtcattggatcaaccctttctctccaagtcaagcacccttggccaggaggagaggccacctgagccccctccaggccccccttcaaagagcagtccccaggcacgggggtccctagaggaacagctgctccaggagctcagcagcctcatcctgaggaaaggagagaccactgcaggcctgggaagtccttcccagccatccagcccccaatcccccagccccactggccttccaacacagacacctggcttccccacccaacccccatgcacttccagtccaccctccagccagcccctcacatgaccctaggaccagcagtctgagagggtaggtaccagaagacccagaaactcttatcgtggcactgttgcagcttcctctgccctggctggaaagactccagaatccagtgtggtgctgtggaaggagcactggactaaaggcttcagtggctgcgtgtcccaggacaggtcatggcccctctctgggcccagcccatttatctataccatgaggtaactgaagtaaggagagcagtgaatgtcaaactgtgtttcttagagccataagccccacatattatccctgaacaagggcagctcctgctttatatatttgatacgtaggggttccatgagagattttgggttttaaaggaatggttttactgcattaaagaaaaaaaatgctttggaaaccagaggcctgggtgatgttaaagtctatcctgtcccacttcctacattctgggactaccgtgaagcctggagtagggagagcgagtttgggagctgggactcggggagtcaaaaatagatgagtaattgtcaataaacctgggaaccaaaagac

SEQ ID NO: 1298 - DNA, 3179 bp, Homo sapiens
  source 1..3179: mol_type = unassigned DNA
ttttctctgcttttcgctaccccggtcactctcatttctctcccctattccttgtctcttcccccatccccctttctcctgtcctccccctgcctctacagtggttctccccgctgagctgccaccagctgctgggccccgggctgctgcggctgggccgcctatggctgcggtccccctcccatacagccccggcccctggtctctggctgtcagggtttggcctccttcgtggtgaccacctcttcctgtgctcagcgccgggcccaggccccccagcccctgaggacatggtgcatctgcggcggctacaggagatcagtgtggtttctgcagctgacaccccagataagaaagagcatttggtcctggtggagacaggaaggaccctgtatctgcaaggagagggccggctggacttcacggcatggaacgcagccattgggggcgcggctggtgggggcggcacagggctgcaggagcagcagatgagccggggtgacatccccatcatcgtggatgcctgcatcagttttgttacccagcatgggctccggctggaaggtgtataccggaaagggggcgctcgtgcccgcagcctgagactcctggctgagttccgtcgggatgcccggtcggtgaagctccgaccaggggagcactttgtggaggatgtcactgacacactcaaacgcttctttcgtgagctcgatgaccctgtgacctctgcacggttgctgcctcgctggagggaggctgctggtattcctaagatccctgagagccaaggcccaaccaggatctctgccttcccccaccagaatccatggtttggcagccctccgccccatcacttcccaccctgggggatcatccagagacttggctcagggggaggtgggaagggggcagagacacatccatcctgcatttgtgcctaaaaatccctccctctgtaccagctgccactctttcttcccgggtcctccccaaccctcctccattccatccccagagctgccccagaagaatcagcgcctggagaaatataaagatgtgattggctgcctgccgcgggtcaaccgccgcacactggccaccctcattgggcatctctatcgggtgcagaaatgtgcggctctaaaccagatgtgcacgcggaacttggctctgctgtttgcacccagcgtgttccagacggatgggcgaggggagcacgaggtgcgagtgctgcaagagctcattgatggctacatctctgtctttgatatcgattctgaccaggtagctcagattgacttggaggtcagtcttatcaccacctggaaggacgtgcagctgtctcaggctggagacctcatcatggaagtttatatagagcagcagctcccagacaactgtgtcaccctgaaggtgtccccaaccctgactgctgaggagctgactaaccaggtactggagatgcgggggacagcagctgggatggacttgtgggtgacttttgagattcgcgagcatggggagctggagcggccactgcatcccaaggaaaaggtcttagagcaggctttacaatggtgccagctcccagagccctgctcagcttccctgctcttgaaaaaagtccccctggcccaagctggctgcctcttcacaggtatccgacgtgagagcccacgggtggggctgttgcggtgtcgtgaggagccacctcgcttgctgggaagccgcttccaggagaggttctttctgctgcgtggccgctgcctgctgctgctcaaggagaagaaaagctctaaaccagaacgggagtggcctttggaaggtgccaaggtctacctgggaatccgcaagaagttaaagcccccaacaccgtggggcttcacattgatactagagaagatgcacctctacttgtcctgcactgacgaggatgaaatgtgggattggaccaccagcatccttaaagcccagcacgatgaccagcagccagtggtcttacgacgccattcctcctctgaccttgcccgtcagaagtttggcactatgcctttgctgcctatccgtggggatgacagtggagccaccctcctctctgccaatcagaccctgcggcgactacacaaccggaggaccctgtccatgttctttccaatgaagtcatcccaggggtctgtggaggagcaagaggagctggaggagcctgtgtacgaggagccagtgtatgaggaagtaggggccttccctgagttgatccaggacacttctacctccttctccaccacacgggagtggacagtgaagccagagaaccccctcaccagccagaagtcattggatcaaccctttctctccaagtcaagcacccttggccaggaggagaggccacctgagccccctccaggccccccttcaaagagcagtccccaggcacgggggtccctagaggaacagctgctccaggagctcagcagcctcatcctgaggaaaggagagaccactgcaggcctgggaagtccttcccagccatccagcccccaatcccccagccccactggccttccaacacagacacctggcttccccacccaacccccatgcacttccagtccaccctccagccagcccctcacatgaccctaggaccagcagtctgagagggtaggtaccagaagacccagaaactcttatcgtggcactgttgcagcttcctctgccctggctggaaagactccagaatccagtgtggtgctgtggaaggagcactggactaaaggcttcagtggctgcgtgtcccaggacaggtcatggcccctctctgggcccagcccatttatctataccatgaggtaactgaagtaaggagagcagtgaatgtcaaactgtgtttcttagagccataagccccacatattatccctgaacaagggcagctcctgctttatatatttgatacgtaggggttccatgagagattttgggttttaaaggaatggttttactgcattaaagaaaaaaaatgctttggaaaccagaggcctgggtgatgttaaagtctatcctgtcccacttcctacattctgggactaccgtgaagcctggagtagggagagcgagtttgggagctgggactcggggagtcaaaaatagatgagtaattgtcaataaacctgggaacc

SEQ ID NO: 1299 - DNA, 3810 bp, Homo sapiens
  source 1..3810: mol_type = unassigned DNA
atgggtcattgagctctctctctccaggaccccttccctaagggtgtgatacctttgactgccattgagatgacccgcagcagcaaggacaacaagttccaggtcatcaccggccagagggtgttcgtgttccgcacagagagcgaggctcagcgggacatgtggtgctccacgctgcagtcctgtctgaaggagcagcgcctcctgggccacccccggcccccccaaccaccccgacccctccgcacgggcatgctggagctgcgtggacacaaggccaaggtgtttgctgccttgagccctggagagctggcactgtacaagagtgagcaggccttctctctgggcatcgggatctgcttcatcgaactgcagggctgcagcgtccgggagaccaagagtcgaagctttgacctgctcacaccccatcgctgcttcagcttcacagccgagtctgggggtgctcggcagagctgggcggccgctctgcaggaagcagtaaccgagaccctgtctgactacgaggtggctgagaagatctggtctaatcgggccaaccggcagtgtgcggactgtgggtcctcccgcccagattgggctgctgtcaatttgggggtggtcatctgcaagcagtgtgcaggtcagcaccgggccctgggttctgggatctccaaggtgcagagcctgaagctggacacgagtgtctggagtaatgagatagtacagttattcattgtcctgggaaatgatcgtgccaaccgcttctgggcagggaccctacccccaggtgagggactacatccagatgcgacccctggcccccggggagagttcatctcccgaaagtaccgtctgggtctcttccggaagccccaccctcagtacccagatcatagccagcttctccaggcactgtgtgcagctgtggcaagacccaacctgctgaagaacatgacccagctcctctgtgttgaggcctttgaaggcgaggagccctggttccccccagcccctgatggcagctgccctggcctcttgccctcagacccctcccctggtgtgtacaatgaggtggtggtgcgtgctacttacagcggcttcctgtactgcagtcccgtcagcaacaaagctggaccctcaccccctcgcaggggccgggatgctcccccgcgcctttggtgtgtgctgggagcagctctggaaatgtttgcatcggaaaacagccctgaacccctcagcctcatacagccccaggatattgtatgtctgggtgtgagccccccacccactgacccaggtgacaggttccccttttcctttgagctcatcctcgctggggggaggatccagcattttggcacagatggagctgacagtctggaggcctggactagtgctgtgggcaagtggttctccccgctgagctgccaccagctgctgggccccgggctgctgcggctgggccgcctatggctgcggtccccctcccatacagccccggcccctggtctctggctgtcagggtttggcctccttcgtggtgaccacctcttcctgtgctcagcgccgggcccaggccccccagcccctgaggacatggtgcatctgcggcggctacaggagatcagtgtggtttctgcagctgacaccccagataagaaagagcatttggtcctggtggagacaggaaggaccctgtatctgcaaggagagggccggctggacttcacggcatggaacgcagccattgggggcgcggctggtgggggcggcacagggctgcaggagcagcagatgagccggggtgacatccccatcatcgtggatgcctgcatcagttttgttacccagcatgggctccggctggaaggtgtataccggaaagggggcgctcgtgcccgcagcctgagactcctggctgagttccgtcgggatgcccggtcggtgaagctccgaccaggggagcactttgtggaggatgtcactgacacactcaaacgcttctttcgtgagctcgatgaccctgtgacctctgcacggttgctgcctcgctggagggaggctgctgagctgccccagaagaatcagcgcctggagaaatataaagatgtgattggctgcctgccgcgggtcaaccgccgcacactggccaccctcattgggcatctctatcgggtgcagaaatgtgcggctctaaaccagatgtgcacgcggaacttggctctgctgtttgcacccagcgtgttccagacggatgggcgaggggagcacgaggtgcgagtgctgcaagagctcattgatggctacatctctgtctttgatatcgattctgaccaggtagctcagattgacttggaggtcagtcttatcaccacctggaaggacgtgcagctgtctcaggctggagacctcatcatggaagtttatatagagcagcagctcccagacaactgtgtcaccctgaaggtgtccccaaccctgactgctgaggagctgactaaccaggtactggagatgcgggggacagcagctgggatggacttgtgggtgacttttgagattcgcgagcatggggagctggagcggccactgcatcccaaggaaaaggtcttagagcaggctttacaatggtgccagctcccagagccctgctcagcttccctgctcttgaaaaaagtccccctggcccaagctggctgcctcttcacaggtatccgacgtgagagcccacgggtggggctgttgcggtgtcgtgaggagccacctcgcttgctgggaagccgcttccaggagaggttctttctgctgcgtggccgctgcctgctgctgctcaaggagaagaaaagctctaaaccagaacgggagtggcctttggaaggtgccaaggtctacctgggaatccgcaagaagttaaagcccccaacaccgtggggcttcacattgatactagagaagatgcacctctacttgtcctgcactgacgaggatgaaatgtgggattggaccaccagcatccttaaagcccagcacgatgaccagcagccagtggtcttacgacgccattcctcctctgaccttgcccgtcagaagtttggcactatgcctttgctgcctatccgtggggatgacagtggagccaccctcctctctgccaatcagaccctgccaatgaagtcatcccaggggtctgtggaggagcaagaggagctggaggagcctgtgtacgaggagccagtgtatgaggaagtaggggccttccctgagttgatccaggacacttctacctccttctccaccacacgggagtggacagtgaagccagagaaccccctcaccagccagaagtcattggatcaaccctttctctccaagtcaagcacccttggccaggaggagaggccacctgagccccctccaggccccccttcaaagagcagtccccaggcacgggggtccctagaggaacagctgctccaggagctcagcagcctcatcctgaggaaaggagagaccactgcaggcctgggaagtccttcccagccatccagcccccaatcccccagccccactggccttccaacacagacacctggcttccccacccaacccccatgcacttccagtccaccctccagccagcccctcacatgaccctaggaccagcagtctgagagggtaggtaccagaagacccagaaactcttatcgtggcactgttgcagcttcctctgccctggctggaaagactccagaatccagtgtggtgctgtggaaggagcactggactaaaggcttcagtggctgcgtgtcc

SEQ ID NO: 1300 - DNA, 1765 bp, Homo sapiens
  source 1..1765: mol_type = unassigned DNA
gtgcagtcaggcaggagcagagctttgacccagacccagggtgggcaggaactgaggggccaactctagcactgacttactgtgaacctggggcaagccccttcccctctctgggcctcagtttccttaacttcaaatgaagtcccttccctaagtagagagccattgctgttgttctgggatggctctgcttccagatcgcaggcctttcagcatctttctttggaggaagattggaggctggtgctcactgtccaggcctcagactctggggcagagagggggattctcagcctgagccctcccttcaccctgcccctccccccagcaatggcctgagcccccatggctgcccctcaggacctggacatcgctgtgtggctggccacggtgcacctggagcagtatgcagacacgttccgacggcatggcctggctacagcaggtgcagcccggggcctgggccacgaggagttgaagcagttgggcatcagcgccacagggcaccggaaacgcattctacgcctgctacagacaggcaccgaagagggctccctggatcccaaatcagatagtgccatggaaccatcccccagcccagccccgcaagcccagccccctaagcccgtgccgaagcccaggaccgtgtttggtggactcagtggccctgccaccactcagagacctgggctgagcccagccctcgggggaccaggagtgtccaggagcccagagcccagcccaaggcctcctcctctccccacttcctcctctgagcagtcttcagccctaaatactgtggagatgatgcctaattccatctacttcggcctggactcaagaggcagggcacaggcagctcaggacaaggccccagacagctcccaaatctctgcccccacccctgccctcaggcccacaacaggcacagtgcacatcatggatcctggttgcctgtactatggtgtccaacctgtggggactccaggagcccccgacagaagagagagcagaggtgtttgtcagggcagggctgaacacaggctcagcagacaggatctggaggcacgggaggatgctggctatgccagccttgagctacctggagactccaccctcttatcgcccaccctggaaacagaggagaccagtgatgacctcatttcaccctatgccagcttctccttcacggcagaccgcctcacgcccctgctcagtggctggctagacaagctctcccctcagggaaactatgtcttccagagacgctttgtgcagttcaatgggaggagtctgatgtactttggcagtgacaaggaccccttccctaagggtgtgatacctttgactgccattgagatgacccgcagcagcaaggacaacaagttccaggtcatcaccggccagagggtgttcgtgttccgcacagagagcgaggctcagcgggacatgtggtgctccacgctgcagtcctgtctgaaggagcagcgcctcctgggccacccccggcccccccaaccaccccgacccctccgcacgggcatgctggagctgcgtggacacaaggccaaggtgtttgctgccttgagccctggagagctggcactgtacaagagtgagcaggccttctctctgggcatcgggatctgcttcatcgaactgcagggctgcagcgtccgggagaccaagagtcgaagctttgacctgctcacaccccatcgctgcttcagcttcacagccgagtctgggggtgctcggcagagct

SEQ ID NO: 1301 - DNA, 533 bp, Homo sapiens
  source 1..533: mol_type = unassigned DNA
agatgtgacgatatggagatgagggagagggagggctgagaggggctcagaattggaaggagggaagtccattgtgtgtgtgggcggggcagtgactgcatgactgatgtcagcatttaaagtagctggcttagcagctgtacccactgcttgtggatttaatgccaatcttataaaatctggggcaggacccaggggctggcacacatggctcagttcctgtcctcatgggtcattgagctctctctctccaggaccccttccctaagggtgtgatacctttgactgccattgagatgacccgcagcagcaaggacaacaagttccaggtcatcaccggccagagggtgttcgtgttccgcacagagagcgaggctcagcgggacatgtggtgctccacgctgcagtcctgtctgaaggagcagcgcctcctgggccacccccggcccccccaaccaccccgacccctccgcacgggcatgctggagctgcgtggacacaaggccaaggtgtttgctgccttgagccctgga

SEQ ID NO: 1302 - DNA, 4928 bp, Homo sapiens
  source 1..4928: mol_type = unassigned DNA
agcaatggcctgagcccccatggctgcccctcaggacctggacatcgctgtgtggctggccacggtgcacctggagcagtatgcagacacgttccgacggcatggcctggctacagcaggtgcagcccggggcctgggccacgaggagttgaagcagttgggcatcagcgccacagggcaccggaaacgcattctacgcctgctacagacaggcaccgaagagggctccctggatcccaaatcagatagtgccatggaaccatcccccagcccagccccgcaagcccagccccctaagcccgtgccgaagcccaggaccgtgtttggtggactcagtggccctgccaccactcagagacctgggctgagcccagccctcgggggaccaggagtgtccaggagcccagagcccagcccaaggcctcctcctctccccacttcctcctctgagcagtcttcagccctaaatactgtggagatgatgcctaattccatctacttcggcctggactcaagaggcagggcacaggcagctcaggacaaggccccagacagctcccaaatctctgcccccacccctgccctcaggcccacaacaggcacagtgcacatcatggatcctggttgcctgtactatggtgtccaacctgtggggactccaggagcccccgacagaagagagagcagaggtgtttgtcagggcagggctgaacacaggctcagcagacaggatctggaggcacgggaggatgctggctatgccagccttgagctacctggagactccaccctcttatcgcccaccctggaaacagaggagaccagtgatgacctcatttcaccctatgccagcttctccttcacggcagaccgcctcacgcccctgctcagtggctggctagacaagctctcccctcagggaaactatgtcttccagagacgctttgtgcagttcaatgggaggagtctgatgtactttggcagtgacaaggaccccttccctaagggtgtgatacctttgactgccattgagatgacccgcagcagcaaggacaacaagttccaggtcatcaccggccagagggtgttcgtgttccgcacagagagcgaggctcagcgggacatgtggtgctccacgctgcagtcctgtctgaaggagcagcgcctcctgggccacccccggcccccccaaccaccccgacccctccgcacgggcatgctggagctgcgtggacacaaggccaaggtgtttgctgccttgagccctggagagctggcactgtacaagagtgagcaggccttctctctgggcatcgggatctgcttcatcgaactgcagggctgcagcgtccgggagaccaagagtcgaagctttgacctgctcacaccccatcgctgcttcagcttcacagccgagtctgggggtgctcggcagagctgggcggccgctctgcaggaagcagtaaccgagaccctgtctgactacgaggtggctgagaagatctggtctaatcgggccaaccggcagtgtgcggactgtgggtcctcccgcccagattgggctgctgtcaatttgggggtggtcatctgcaagcagtgtgcaggtcagcaccgggccctgggttctgggatctccaaggtgcagagcctgaagctggacacgagtgtctggagtaatgagatagtacagttattcattgtcctgggaaatgatcgtgccaaccgcttctgggcagggaccctacccccaggtgagggactacatccagatgcgacccctggcccccggggagagttcatctcccgaaagtaccgtctgggtctcttccggaagccccaccctcagtacccagatcatagccagcttctccaggcactgtgtgcagctgtggcaagacccaacctgctgaagaacatgacccagctcctctgtgttgaggcctttgaagacccctcccctggtgtgtacaatgaggtggtggtgcgtgctacttacagcggcttcctgtactgcagtcccgtcagcaacaaagctggaccctcaccccctcgcaggggccgggatgctcccccgcgcctttggtgtgtgctgggagcagctctggaaatgtttgcatcggaaaacagccctgaacccctcagcctcatacagccccaggatattgtatgtctgggtgtgagccccccacccactgacccaggtgacaggttccccttttcctttgagctcatcctcgctggggggaggatccagcattttggcacagatggagctgacagtctggaggcctggactagtgctgtgggcaagtggttctccccgctgagctgccaccagctgctgggccccgggctgctgcggctgggccgcctatggctgcggtccccctcccatacagccccggcccctggtctctggctgtcagggtttggcctccttcgtggtgaccacctcttcctgtgctcagcgccgggcccaggccccccagcccctgaggacatggtgcatctgcggcggctacaggagatcagtgtggtttctgcagctgacaccccagataagaaagagcatttggtcctggtggagacaggaaggaccctgtatctgcaaggagagggccggctggacttcacggcatggaacgcagccattgggggcgcggctggtgggggcggcacagggctgcaggagcagcagatgagccggggtgacatccccatcatcgtggatgcctgcatcagttttgttacccagcatgagctgccccagaagaatcagcgcctggagaaatataaagatgtgattggctgcctgccgcgggtcaaccgccgcacactggccaccctcattgggcatctctatcgggtgcagaaatgtgcggctctaaaccagatgtgcacgcggaacttggctctgctgtttgcacccagcgtgttccagacggatgggcgaggggagcacgaggtgcgagtgctgcaagagctcattgatggctacatctctgtctttgatatcgattctgaccaggtagctcagattgacttggaggtcagtcttatcaccacctggaaggacgtgcagctgtctcaggctggagacctcatcatggaagtttatatagagcagcagctcccagacaactgtgtcaccctgaaggtgtccccaaccctgactgctgaggagctgactaaccaggtactggagatgcgggggacagcagctgggatggacttgtgggtgacttttgagattcgcgagcatggggagctggagcggccactgcatcccaaggaaaaggtcttagagcaggctttacaatggtgccagctcccagagccctgctcagcttccctgctcttgaaaaaagtccccctggcccaagctggctgcctcttcacaggtatccgacgtgagagcccacgggtggggctgttgcggtgtcgtgaggagccacctcgcttgctgggaagccgcttccaggagaggttctttctgctgcgtggccgctgcctgctgctgctcaaggagaagaaaagctctaaaccagaacgggagtggcctttggaaggtgccaaggtctacctgggaatccgcaagaagttaaagcccccaacaccgtggggcttcacattgatactagagaagatgcacctctacttgtcctgcactgacgaggatgaaatgtgggattggaccaccagcatccttaaagcccagcacgatgaccagcagccagtggtcttacgacgccattcctcctctgaccttgcccgtcagaagtttggcactatgcctttgctgcctatccgtggggatgacagtggagccaccctcctctctgccaatcagaccctgcggcgactacacaaccggaggaccctgtccatgttctttccaatgaagtcatcccaggggtctgtggaggagcaagaggagctggaggagcctgtgtacgaggagccagtgtatgaggaagtaggggccttccctgagttgatccaggacacttctacctccttctccaccacacgggagtggacagtgaagccagagaaccccctcaccagccagaagtcattggatcaaccctttctctccaagtcaagcacccttggccaggaggagaggccacctgagccccctccaggccccccttcaaagagcagtccccaggcacgggggtccctagaggaacagctgctccaggagctcagcagcctcatcctgaggaaaggagagaccactgcaggcctgggaagtccttcccagccatccagcccccaatcccccagccccactggccttccaacacagacacctggcttccccacccaacccccatgcacttccagtccaccctccagccagcccctcacatgaccctaggaccagcagtctgagagggtaggtaccagaagacccagaaactcttatcgtggcactgttgcagcttcctctgccctggctggaaagactccagaatccagtgtggtgctgtggaaggagcactggactaaaggcttcagtggctgcgtgtcccaggacaggtcatggcccctctctgggcccagcccatttatctataccatgaggtaactgaagtaaggagagcagtgaatgtcaaactgtgtttcttagagccataagccccacatattatccctgaacaagggcagctcctgctttatatatttgatacgtaggggttccatgagagattttgggttttaaaggaatggttttactgcattaaagaaaaaaaatgctttggaaaccagaggcctgggtgatgttaaagtctatcctgtcccacttcctacattctgggactaccgtgaagcctggagtagggagagcgagtttgggagctgggactcggggagtcaaaaatagatgagtaattgtcaataaacctgggaaccaaaag

SEQ ID NO: 1303 - DNA, 2948 bp, Homo sapiens
  source 1..2948: mol_type = unassigned DNA
tcgggcgcggcgtcctccctccgcagcagccgagccggacctgcctccccgggcgtgctccgccggccccgccgccggcccgcagcgacagacaggcgctccccgcagctccgcacgggacccaggccgccggaccccagcgccggaccaccctctgtccgccccgaggagtttgccgcctgccggagcacctgcgcacagatggagctggaccaccggaccagcggcgggctccacgcctaccccgggccgcggggcgggcaggtggccaagcccaacgtgatcctgcagatcgggaagtgccgggccgagatgctggagcacgtgcggcggacgcaccggcacctgctggccgaggtgtccaagcaggtggagcgcgagctgaaggggctgcaccggtcggtcgggaagctggagagcaacctggacggctacgtgcccacgagcgactcgcagcgctggaagaagtccatcaaggcctgcctgtgccgctgccaggagaccatcgccaacctggagcgctgggtcaagcgcgagatgcacgtgtggcgcgaggtgttctaccgcctggagcgctgggccgaccgcctggagtccacgggcggcaagtacccggtgggcagcgagtcagcccgccacaccgtttccgtgggcgtggggggtcccgagagctactgccacgaggcagacggctacgactacaccgtcagcccctacgccatcaccccgcccccagccgctggcgagctgcccgggcaggagcccgccgaggcccagcagtaccagccgtgggtccccggcgaggacgggcagcccagccccggcgtggacacgcagatcttcgaggaccctcgagagttcctgagccacctagaggagtacttgcggcaggtgggcggctctgaggagtactggctgtcccagatccagaatcacatgaacgggccggccaagaagtggtgggagttcaagcagggctccgtgaagaactgggtggagttcaagaaggagttcctgcagtacagcgagggcacgctgtcccgagaggccatccagcgcgagctggacctgccgcagaagcagggcgagccgctggaccagttcctgtggcgcaagcgggacctgtaccagacgctctacgtggacgcggacgaggaggagatcatccagtacgtggtgggcaccctgcagcccaagctcaagcgtttcctgcgccaccccctgcccaagaccctggagcagctcatccagaggggcatggaggtgcaggatgacctggagcaggcggccgagccggccggcccccacctcccggtggaggatgaggcggagaccctcacgcccgcccccaacagcgagtccgtggccagtgaccggacccagcccgagtagagggcatcccggagcccccagcctgcccactacatccagcctgtggctttgcccaccaggacttttgagctggggctgactcctgcaggggaagccctggtccagctgggtgccccctcgagctccgggcggactcgcacacactcgtgtcatccagatgtgagcaccgcacccagcggcaaagagccctcccccctgcagggctccacccatcaccctccctccgtctgtctttccggcctggaccccaccctccacactctcaggccatcacagaacaccccagcttcctcattctgctacaacacccaggccctctggacatccagaaaaccaagtgtccggatggcaggggccagcggccaccaagctcatgggacacccagagcagaagctagggcagagccaatgctgagggagcctcgacttccggcgccgccgccctctcccggcatccgcagagccagctgacgccctccctgcctcccagggcagctggccagcctcgggcagcgcggccccctcctcccaggggagagtagaagtcgcacacgcagcagagcagacctgatgtcccggtgcttcctggcccctcagctccagtgattcacgcccgcctggagaagaatcagagctcagctcatgactcacccatggcaggcggagggtcccagaggggctgagtcctcaaatccggctgaggcagcagctggcaccatcagagccaggagagtgacaacaggtctcaaggttcccacaaagtctttgctgctgtgctgggcaccacccacccctcaccttgcaggctgcctgcgtgggaggcgaagtcccaggacagcccagaggggggctacagagaggagtcggctgcagcagagggcaggagccccagcttagccctgagcgccagcgcgaggaccagggcctgccactaagcccgccccgctggccgccagctgcccgtccccagagccactgcagcaggagtcgggccctgcctccctcccagcagggaaaccccgcccgctgccaggccatcctctctgccagaggctttcatgagccccaaggctggggccacagctcctacccctgcccagcagccctgagctcagctgcaggaaggacatcccagaagccatggctcctggggcgcttccaggcattctgccctgccccgacaccagaaccctggtgctggtgggccactagcgtctgcagcctaagcaggtgctggctcagggttcatcgttctgccttgtccactgggggaccagccctgcagaccactctgacaagtcttcagcccacaccctgccagccccacagattttatttttgcacataagccataaccaatcctcaaggctggcacaggctttggggaagccctggagcctgtgaagaccctggaaacctcatgaggctgtggccaacccctgccccttgccccacacagaccaggccttaaatgtcggtccaggccctgtgcaccttaccccagagacagactctttttgtaagattttgttaataaaacactgaaacttcctgga

SEQ ID NO: 1304 - DNA, 407 bp, Homo sapiens
  source 1..407: mol_type = unassigned DNA
acacccagagcagaagctagggcagagccaatgctgagggagcctcgacttccggcgccgccgccctctcccggcatccgcagagccagctgacgccctccctgcctcccagggcagctggccagcctcgggcagcgcggccccctcctcccaggggagagtagaagtcgcacacgcagcagagcagacctgatgtcccggtgcttcctggcccctcagctccagtgattcacgcccgcctggagaagaatcagagctcagctcatgactcacccatggcaggcggagggtcccagaggggctgagtcctcaaatccggctgaggcagcagctggcaccatcagagccaggagagtgacaacaggtaacggagcaccacccttccacccagaccccaccatcagctg

SEQ ID NO: 1305 - DNA, 1660 bp, Homo sapiens
  source 1..1660: mol_type = unassigned DNA
gccgcggccgccgcgtgacgtggcacagccagagcctaaaggctagagccggagctgccgcgccagtcgcctagcaggtcctctaccggcttattcctgtgccggatcttcatcggcacaggggccactgagacgtttctgcctccctctttcttcctccgctctttctcttccctctcgtttagtttgcctgggagcttgaaaggagaaagcacggggtcgccccaaaccccttctgcttctgcccatcacaagtgccactaccgccatgggcctcactatctcctccctcttctcccgactatttggcaagaagcagatgcgcattttgatggttggattggatgctgctggcaagacaaccattctgtataaactgaagttaggggagatagtcaccaccattcctaccattggttttaatgtggaaacagtagaatataagaacatttgtttcacagtatgggatgttggtggtcaagatagaattaggcctctctggaagcattacttccagaatacccagggtcttatttttgtggtagatagcaacgatcgtgaaagaattcaggaagtagcagatgagctgcagaaaatgcttctggtagatgaattgagagatgcagtgctgctactttttgcaaacaaacaggatttgccaaatgctatggccatcagtgaaatgacagataaactagggcttcagtctcttcgtaacagaacatggtatgttcaagccacttgtgcaacacaaggaactggtctgtatgaaggacttgactggctgtcaaatgagctttcaaaacgttaaatgaaattggatatctaaccaaggacatgtttgataaaattggtctaggcttgttacaacaaaattagtttgtatcttggttattaaacagtatctgggactggtttgggcagaatattaaacttattttgttgccaattattgtttaccgagtataatgttgctatttagcaatgtgcttggttttaaagaaattctccttgggaaaaaagtatcctcttttaattttacttcccataagcgtaaatgcctggacatagctcttgtgcaacctttaaataaattgttttgagtgttttttgagccccagacaaataatgttttaaagttatccccttgctactttactgatacctttatcattcctgagacagtttgctaatttaaaaatgtagcattccatttgtatttatttctctcccttgccaaaaagattttctaatactgcttgtaccagccagagaaagatccaaaacactactcagctctcttgcactgaggaaatttttccccctacattgactcctggcctacatcagccaaacttaaccttggtggggtttggatttgatagccaattagttctgtgctggttgcaaagaattgatatttagatggtttttaatactcagcagattgtcttcctttatattgtgtcttttttatgttgcatgttgcttttgttatcagcctgattttttgctcagtatatgatagttctgctgatgttttgtttattgggcagacatatcttcattaagagtttttggaaaactcatcaaattcgatgaatacattttcttcataacccatttggaattattcctaataaaatgataaaatacgtaa

SEQ ID NO: 1306 - DNA, 1467 bp, Homo sapiens
  source 1..1467: mol_type = unassigned DNA
taccggcttattcctgtgccggatcttcatcggcacaggggccactgagacgtttctgcctccctctttcttcctccgctctttctcttccctctcgtttagtttgcctgggagcttgaaaggagaaagcacggggtcgccccaaaccccttctgcttctgcccatcacaagtgccactaccgccatgggcctcactatctcctccctcttctcccgactatttggcaagaagcagatgcgcattttgatgggttttaatgtggaaacagtagaatataagaacatttgtttcacagtatgggatgttggtggtcaagatagaattaggcctctctggaagcattacttccagaatacccagggtcttatttttgtggtagatagcaacgatcgtgaaagaattcaggaagtagcagatgagctgcagaaaatgcttctggtagatgaattgagagatgcagtgctgctactttttgcaaacaaacaggatttgccaaatgctatggccatcagtgaaatgacagataaactagggcttcagtctcttcgtaacagaacatggtatgttcaagccacttgtgcaacacaaggaactggtctgtatgaaggacttgactggctgtcaaatgagctttcaaaacgttaaatgaaattggatatctaaccaaggacatgtttgataaaattggtctaggcttgttacaacaaaattagtttgtatcttggttattaaacagtatctgggactggtttgggcagaatattaaacttattttgttgccaattattgtttaccgagtataatgttgctatttagcaatgtgcttggttttaaagaaattctccttgggaaaaaagtatcctcttttaattttacttcccataagcgtaaatgcctggacatagctcttgtgcaacctttaaataaattgttttgagtgttttttgagccccagacaaataatgttttaaagttatccccttgctactttactgatacctttatcattcctgagacagtttgctaatttaaaaatgtagcattccatttgtatttatttctctcccttgccaaaaagattttctaatactgcttgtaccagccagagaaagatccaaaacactactcagctctcttgcactgaggaaatttttccccctacattgactcctggcctacatcagccaaacttaaccttggtggggtttggatttgatagccaattagttctgtgctggttgcaaagaattgatatttagatggtttttaatactcagcagattgtcttcctttatattgtgtcttttttatgttgcatgttgcttttgttatcagcctgattttttgctcagtatatgatagttctgctgatgttttgtttattgggcagacatatcttcattaagagtttttggaaaactcatcaaattcgatgaatacattttcttcataacccatttggaat

SEQ ID NO: 1307 - DNA, 1360 bp, Homo sapiens
  source 1..1360: mol_type = unassigned DNA
caggtcctctaccggcttattcctgtgccggatcttcatcggcacaggggccactgagacgtttctgcctccctctttcttcctccgctctttctcttccctctcgtttagtttgcctgggagcttgaaaggagaaagcacggggtcgccccaaaccccttctgcttctgcccatcacaagtgccactaccgccatgggcctcactatctcctccctcttctcccgactatttggcaagaagcagatgcgcattttgatggggtcttatttttgtggtagatagcaacgatcgtgaaagaattcaggaagtagcagatgagctgcagaaaatgcttctggtagatgaattgagagatgcagtgctgctactttttgcaaacaaacaggatttgccaaatgctatggccatcagtgaaatgacagataaactagggcttcagtctcttcgtaacagaacatggtatgttcaagccacttgtgcaacacaaggaactggtctgtatgaaggacttgactggctgtcaaatgagctttcaaaacgttaaatgaaattggatatctaaccaaggacatgtttgataaaattggtctaggcttgttacaacaaaattagtttgtatcttggttattaaacagtatctgggactggtttgggcagaatattaaacttattttgttgccaattattgtttaccgagtataatgttgctatttagcaatgtgcttggttttaaagaaattctccttgggaaaaaagtatcctcttttaattttacttcccataagcgtaaatgcctggacatagctcttgtgcaacctttaaataaattgttttgagtgttttttgagccccagacaaataatgttttaaagttatccccttgctactttactgatacctttatcattcctgagacagtttgctaatttaaaaatgtagcattccatttgtatttatttctctcccttgccaaaaagattttctaatactgcttgtaccagccagagaaagatccaaaacactactcagctctcttgcactgaggaaatttttccccctacattgactcctggcctacatcagccaaacttaaccttggtggggtttggatttgatagccaattagttctgtgctggttgcaaagaattgatatttagatggtttttaatactcagcagattgtcttcctttatattgtgtcttttttatgttgcatgttgcttttgttatcagcctgattttttgctcagtatatgatagttctgctgatgttttgtttattgggcagacatatcttcattaagagtttttggaaaactcatcaaattcgatgaatacattttcttcataacccatt

SEQ ID NO: 1308 - DNA, 1601 bp, Homo sapiens
  source 1..1601: mol_type = unassigned DNA
ctagagccggagctgccgcgccagtcgcctagcaggtcctctaccggcttattcctgtgccggatcttcatcggcacaggggccactgagacgtttctgcctccctctttcttcctccgctctttctcttccctctcgtttagtttgcctgggagcttgaaaggagaaagcacggggtcgccccaaaccccttctgcttctgcccatcacaagtgccactaccgccatgggcctcactatctcctccctcttctcccgactatttggcaagaagcagatgcgcattttgatggttggattggatgctgctggcaagacaaccattctgtataaactgaagttaggggagatagtcaccaccattcctaccattgcggtcatttttgtttttctttgtaggttttaatgtggaaacagtagaatataagaacatttgtttcacagtatgggatgttggtggtcaagatagaattaggcctctctggaagcattacttccagaatacccagggtcttatttttgtggtagatagcaacgatcgtgaaagaattcaggaagtagcagatgagctgcagaaaatgcttctggtagatgaattgagagatgcagtgctgctactttttgcaaacaaacaggatttgccaaatgctatggccatcagtgaaatgacagataaactagggcttcagtctcttcgtaacagaacatggtatgttcaagccacttgtgcaacacaaggaactggtctgtatgaaggacttgactggctgtcaaatgagctttcaaaacgttaaatgaaattggatatctaaccaaggacatgtttgataaaattggtctaggcttgttacaacaaaattagtttgtatcttggttattaaacagtatctgggactggtttgggcagaatattaaacttattttgttgccaattattgtttaccgagtataatgttgctatttagcaatgtgcttggttttaaagaaattctccttgggaaaaaagtatcctcttttaattttacttcccataagcgtaaatgcctggacatagctcttgtgcaacctttaaataaattgttttgagtgttttttgagccccagacaaataatgttttaaagttatccccttgctactttactgatacctttatcattcctgagacagtttgctaatttaaaaatgtagcattccatttgtatttatttctctcccttgccaaaaagattttctaatactgcttgtaccagccagagaaagatccaaaacactactcagctctcttgcactgaggaaatttttccccctacattgactcctggcctacatcagccaaacttaaccttggtggggtttggatttgatagccaattagttctgtgctggttgcaaagaattgatatttagatggtttttaatactcagcagattgtcttcctttatattgtgtcttttttatgttgcatgttgcttttgttatcagcctgattttttgctcagtatatgatagttctgctgatgttttgtttattgggcagacatatcttcattaagagtttttggaaaactcatcaaattcgatgaatacattttcttcata

SEQ ID NO: 1309 - DNA, 404 bp, Homo sapiens
  source 1..404: mol_type = unassigned DNA
agcacggggtcgccccaaaccccttctgcttctgcccatcacaagtgccactaccgccatgggcctcactatctcctccctcttctcccgactatttggcaagaagcagatgcgcattttgatggttggattggatgctgctggcaagacaaccattctgtataaactgaagttaggggagatagtcaccaccattcctaccattgggtcttatttttgtggtagatagcaacgatcgtgaaagaattcaggaagtagcagatgagctgcagaaaatgcttctggtagatgaattgagagatgcagtgctgctactttttgcaaacaaacaggatttgccaaatgctatggccatcagtgaaatgacagataaactagggcttcagtctcttcgtaacagaaca

SEQ ID NO: 1310 - DNA, 641 bp, Homo sapiens
  source 1..641: mol_type = unassigned DNA
gcgcaagcgcagtggctcgggcgcaccggaagcgcagggggatggggcggcggtgacgcgattctgtccgcgttggaggggccgggccgctgctggagtcgccgcggccgccgcgtgacgtggcacagccagagcctaaaggctagagccggagctgccgcgccagtcgcctagcagtttgcctgggagcttgaaaggagaaagcacggggtcgccccaaaccccttctgcttctgcccatcacaagtgccactaccgccatgggcctcactatctcctccctcttctcccgactatttggcaagaagcagatgcgcattttgatggttggattggatgctgctggcaagacaaccattctgtataaactgaagttaggggagatagtcaccaccattcctaccattggttttaatgtggaaacagtagaatataagaacatttgtttcacagtatgggatgttggtggtcaagatagaattaggcctctctggaagcattacttccagaatacccagggtcttatttttgtggtagatagcaacgatcgtgaaagaattcaggaagtagcagatgagctgcagaaaatgcttctggtagatgaattgagagatgcagtgctgctactttttgcaaacaaa

SEQ ID NO: 1311 - DNA, 548 bp, Homo sapiens
  source 1..548: mol_type = unassigned DNA
cggccgccgcgtgacgtggcacagccagagcctaaaggctagagccggagctgccgcgccagtcgcctagcaggtcctctaccggcttattcctgtgccggatcttcatcggcacaggggccactgagacgtttctgcctccctctttcttcctccgctctttctcttccctctcgtttagtttgcctgggagcttgaaaggagaaagcacggggtcgccccaaaccccttctgcttctgcccatcacaagtgccactaccgccatgggcctcactatctcctccctcttctcccgactatttggcaagaagcagatgcgcattttgatggttggattggatgctgctggcaagacaaccattctgtataaactgaagttaggggagatagtcaccaccattcctaccattggttttattttcttaatgacgctgcacagcggtcatttttgtttttctttgtaggttttaatgtggaaacagtagaatataagaacatttgtttcacagtatgggatgttggtggtcaagatagaattaggcctctc

SEQ ID NO: 1312 - DNA, 495 bp, Homo sapiens
  source 1..495: mol_type = unassigned DNA
ggctagagccggagctgccgcgccagtcgcctagcaggtcctctaccggcttattcctgtgccggatcttcatcggcacaggggccactgagacgtttctgcctccctctttcttcctccgctctttctcttccctctcgtttagtttgcctgggagcttgaaaggagaaagcacggggtcgccccaaaccccttctgcttctgcccatcacaagtgccactaccgccatgggcctcactatctcctccctcttctcccgactatttggcaagaagcagatgcgcattttgatggctggacaacattgggcagagatgtggggaaagccaactctgggaagcaaacacttggcgaggccctttctgggggtgcgatctgcataccttcttgcccgggtgtggacagcggtcaggagggaggcagagcaactccagccttttccctccccttctgcgtttcgtgtacagtccctgcatactccattggtatgtaag

SEQ ID NO: 1313 - DNA, 732 bp, Homo sapiens
  source 1..732: mol_type = unassigned DNA
ctgtgaattttaaaaggtgtagcaggccgggcgcggtgagtcaccgcgccaggcccgatcataaacacttttaaagtgaagaggctttccgcttcctcaacataaggagtaaatctttaatgctgcttctaggaaaaaaagtacaagaaaagcaagacttcctccttgccttctctttaaaaagcaacagccgatgaacacgtgttggagcgctctcgccttgacagaattagagatcttcagaatcacttggcgtggtggtcgaagcgtctagccctagctcattagggtgccacagtttctcggcccacaagtcagcttttaaccacttttctccgcaaaagaccggaccggtcttcatgcgtcaactaaagcaagcgtctggtcccgtgtgtgaaacgtgtaagttcatggcatcagggaatacccatcgcgcgtaccgtaatagaagagggcgaggttcctcacctaacccataatgctcagctcgcctttccggaagcaaggactatcaccccgacaataccttcatccgggcggaagcgtctcaccctgagtctgatttggcagtgacgaagcgagtttgcctgggagcttgaaaggagaaagcacggggtcgccccaaaccccttctgcttctgcccatcacaagtgccactaccgccatgggcctcactatctcctccctcttctcccgactatttggcaagaagcagatgcgcattttgatgg

SEQ ID NO: 1314 - DNA, 2045 bp, Homo sapiens
  source 1..2045: mol_type = unassigned DNA
gcgaagaaggtgtgccgggggctggttggaggcgcgggcggcggggccaatgtggcggtgacgtcacggggcgggcggacgctggcgcgggtaggtaagagcagcggcgggcggtggcgctcactcccggcttccaaccgcgcggagcctctgccttggagattctcagtgctgcggatcatgtccctaaggggcagcctctcgcgtctcctccagacgcgagtgcattccatcctgaagaaatccgtccactccgtggctgtgataggagccccgttctcacaagggcagaaaagaaaaggagtggagcatggtcccgctgccataagagaagctggcttgatgaaaaggctctccagtttgggctgccacctaaaagactttggagatttgagttttactccagtccccaaagatgatctctacaacaacctgatagtgaatccacgctcagtgggtcttgccaaccaggaactggctgaggtggttagcagagctgtgtcagatggctacagctgtgtcacactgggaggagaccacagcctggcaatcggtaccattagtggccatgcccgacactgcccagacctttgtgttgtctgggttgatgcccatgctgacatcaacacaccccttaccacttcatcaggaaatctccatggacagccagtttcatttctcctcagagaactacaggataaggtaccacaactcccaggattttcctggatcaaaccttgtatctcttctgcaagtattgtgtatattggtctgagagacgtggaccctcctgaacattttattttaaagaactatgatatccagtatttttccatgagagatattgatcgacttggtatccagaaggtcatggaacgaacatttgatctgctgattggcaagagacaaagaccaatccatttgagttttgatattgatgcatttgaccctacactggctccagccacaggaactcctgttgtcgggggactaacctatcgagaaggcatgtatattgctgaggaaatacacaatacagggttgctatcagcactggatcttgttgaagtcaatcctcagttggccacctcagaggaagaggcgaagactacagctaacctggcagtagatgtgattgcttcaagctttggtcagacaagagaaggagggcatattgtctatgaccaacttcctactcccagttcaccagatgaatcagaaaatcaagcacgtgtgagaatttaggagacactgtgcactgacatgtttcacaacaggcattccagaattatgaggcattgaggggatagatgaatactaaatggttgtctgggtcaatactgccttaatgagaacatttacacattctcacaattgtaaagtttcccctctattttggtgaccaatactactgtaaatgtatttggttttttgcagttcacagggtattaatatgctacagtactatgtaaatttaaagaagtcataaacagcatttattaccttggtatatcatactggtcttgttgctgttgttccttcacatttaagtggtttttcatctttcctccctcctcccacagcctggctatacagtgcatccttgaactgtcagcccacagcagcaatatgcttattctatccacatccctaacatcatgcattcacaaggtcaaagttctggtccacaaacccttccctatagaagttcaatggctgcgaaagaatttgtagtaaaccaggcctcccaggatggcgagctccagtaagatgataatggaaagcagcagcttgttggttgtcactctacaaagagaagcaaagtggggagtagtcagaagtttggataaccttccttctaaacattttggggttagacctgggaccacggctggatactctgaggctgtatgtttgatcacacagccacttagcaggaagtactcataaggttctttagctgtcacttagggataacactgtctacctcacagaaatgttaaactgagacaataaaaaccaaagcataaaaatggattctgaaa

SEQ ID NO: 1315 - DNA, 836 bp, Homo sapiens
  source 1..836: mol_type = unassigned DNA
cgcgcggagcctctgccttggagattctcagtgctgcggatcatgtccctaaggggcagcctctcgcgtctcctccagacgcgagtgcattccatcctgaagaaatccgtccactccgtggctgtgataggagccccgttctcacaagggcagaaaagaaaaggagtggagcatggtcccgctgccataagagaagctggcttgatgaaaaggctctccagtttgggctgccacctaaaagactttggagatttgagttttactccagtccccaaagatgatctctacaacaacctgatagtgaatccacgctcagtgggtcttgccaaccaggaactggctgaggtggttagcagagctgtgtcagatggctacagctgtgtcacactgggaggagaccacagcctggcaatcggtaccattagtggccatgcccgacactgcccagacctttgtgttgtctgggttgatgcccatgctgacatcaacacaccccttaccacttcatcaggaaatctccatggacagccagtttcatttctcctcagagaactacaggataaggtaccacaactcccaggattttcctggatcaaaccttgtatctcttctgcaagtattgtgtatattggtctgagagacgtggaccctcctgaacagtaagttgatgcatttggctgaagtttagggcctgtcctagccaattatgttctatttgaaaggctgatgcttaacttggtctattgcaggtcactacaacaaacccaccctctcccccaaatacatatttgttaaaaatgctctttaaactaaggactcctccctttatatctcat

SEQ ID NO: 1316 - DNA, 457 bp, Homo sapiens
  source 1..457: mol_type = unassigned DNA
gtccctaaggggcagcctctcgcgtctcctccagacgcgagtgcattccatcctgaagaaatccgtccactccgtggctgtgataggagccccgttctcacaagggcagaaaagaaaaggagtggagcatggtcccgctgccataagagaagctggcttgatgaaaaggctctccagtttgggctgccacctaaaagactttggagatttgagttttactccagtccccaaagatgatctctacaacaacctgatagtgaatccacgctcagtgggtcttgccaaccaggaactggctgaggtggttagcagagctgtgtcagatggctacagctgtgtcacactgggaggagaccacaggtaccacaactcccaggattttcctggatcaaaccttgtatctcttctgcaagtattgtgtatattggtctgagagacgtggaccctcctgaacagt

SEQ ID NO: 1317 - DNA, 627 bp, Homo sapiens
  source 1..627: mol_type = unassigned DNA
gttcctcagctgcccttctgaaacatttccaccttgtgtcacttctccttcccagatcaagtgtgtcctgtgttgctctaaacttaccctgtgggtggcagaagaaagcagattgcatacccacggacgcacatgataatgatcttggtgagaacaagaattcttgattaatcctgtccatttctccctttcataggtaccacaactcccaggattttcctggatcaaaccttgtatctcttctgcaagtattgtgtatattggtctgagagacgtggaccctcctgaacattttattttaaagaactatgatatccagtatttttccatgagagatattgatcgacttggtatccagaaggtcatggaacgaacatttgatctgctgattggcaagagacaaagaccaatccatttgagttttgatattgatgcatttgaccctacactggctccagccacaggaactcctgttgtcgggggactaacctatcgagaaggcatgtatattgctgaggaaatacacaatacagggttgctatcagcactggatcttgttgaagtcaatcctcagttggccacctcagaggaagaggcgaagactacagctaacctggcagtagatgt

SEQ ID NO: 1318 - DNA, 1559 bp, Homo sapiens
  source 1..1559: mol_type = unassigned DNA
gagctcggcgggggctgccgggattggggcgccgcagctagcgctggtctcggtggcagctcctccgcgccgcaggactcggctctacgggacatgtccgtgccgcgctcgccgcgcgcccgggcctgctagctcctctgtgctccctgaacgcgcggcgccgcacctggcagcggcctcggagctcggctcgggcaggagcgcgcggccgtgcgcaccgcgcagcgaccgctgccgtcatggggctgcagcccctggagttcagcgactgctacctcgacagcccgtggttccgggagaggatccgcgctcacgaagcggaactcgagaggaccaacaagttcatcaaagagctcattaaggacgggaagaacctcatcgctgcgacgaaaagtctgtcagtggcccagcggaagtttgctcattcactcagagactttaagtttgagtttatcggtgatgctgtgacagatgatgaacgatgcatagatgcttccttacgtgaattttcaaattttttgaagaatctggaggaacagagagaaattatggcattaagtgtaactgaaaccctgattaaacccttggaaaaattcagaaaagagcaacttggagctgtaaaggaagaaaaaaagaagtttgacaaagagacagaaaagaattatagtctaattgataaacatttgaatttatcagcaaaaaagaaagactcacatttacaagaggtataattttttatttttctgttacgttttcaaaatttgataagcaatacatgtcttttaaaaatgtgctttaatttggataacttttcatctggcattatatagagataacaaaaagtgaacaggtattgtcataaattaagaaaaaagtccttgtgaaacaagaaaaaataatgaatacatcttatagtgattaatgagctatggattcatagtagtaaaatttttgtttctgagcattattttataggaacataactttaaaccagcattagtgaagaacagatatattatttgcaggaatagatcaattaattggcttttgggagttcttgaagaaatgaattgaatttaataagctcatataccattatgcgtttatgtgaaggcagcattaatcttatttaatgctgaggattcaggaggttcaactttgttggaaagagagcatctgttttacttgtattaatagactcatttattttggaggcagccatatgtaagcaggaaggaatttatattttatttttcattttctctttgtttacttctaaatcccctgccatttgtttctctcactcacacacttggatggaaactcagttgtttacaattcaaaacaaaatgcttttattaaaaataatgctgtttgccattgttaggatttagtctcatcccacaaaattgtatttttttttcttgtttttttaacacataaggaatctggacattatgtactactgtcataaacacttattgaagtattatcaaaatgacacagtattaagtcttgtgtaaacctggattatatttaaatgttagctatttagttac

SEQ ID NO: 1319 - DNA, 3299 bp, Homo sapiens
  source 1..3299: mol_type = unassigned DNA
gagctcggcgggggctgccgggattggggcgccgcagctagcgctggtctcggtggcagctcctccgcgccgcaggactcggctctacgggacatgtccgtgccgcgctcgccgcgcgcccgggcctgctagctcctctgtgctccctgaacgcgcggcgccgcacctggcagcggcctcggagctcggctcgggcaggagcgcgcggccgtgcgcaccgcgcagcgaccgctgccgtcatggggctgcagcccctggagttcagcgactgctacctcgacagcccgtggttccgggagaggatccgcgctcacgaagcggaactcgagaggaccaacaagttcatcaaagagctcattaaggacgggaagaacctcatcgctgcgacgaaaagtctgtcagtggcccagcggaagtttgctcattcactcagagactttaagtttgagtttatcggtgatgctgtgacagatgatgaacgatgcatagatgcttccttacgtgaattttcaaattttttgaagaatctggaggaacagagagaaattatggcattaagtgtaactgaaaccctgattaaacccttggaaaaattcagaaaagagcaacttggagctgtaaaggaagaaaaaaagaagtttgacaaagagacagaaaagaattatagtctaattgataaacatttgaatttatcagcaaaaaagaaagactcacatttacaagaggcagatatccaagtagagcagaaccggcaacacttctatgaactgtctctcgagtatgtgtgtaagctgcaggaaatccaagaaagaaagaagtttgagtttgtggaacctatgctgtcattttttcaggggatgtttaccttctatcatcagggccatgaacttgccaaagacttcaatcactacaaaatggaactacagatcaacattcagaatacacggaatcgatttgaaggaacaaggtcagaagtggaagagctcatgaacaaaatcagacagaatcccaaggaccacaaacgagcaagtcagtttacagccgaaggctacctgtatgtccaggaaaaaaggcctgctccgtttggttccagttgggtcaaacactattgcatgtatcgaaaagcagcaaagaagttcaacatgatcccatttgagcacagatctggagggaaacttggggacggagaggtgttctttttgaaagaatgtaccaagaggcatactgactccattgacagaaggttttgttttgacatagaagctgctgatcggcctggcgtttccttgaccatgcaggcattttccgaagaggaaaggaagcagtggttggaagctctgggtggaaaggaagctctgtcccatagttttaatacagccatcatcccaagaccagaaggaaatgcacagttggataagatggggttcacaattatcagaaaatgcatcagtgccgttgaaacacgaggtataaatgaccaaggattgtacagagttgtgggggtgagttcaaaggtccagagacttctgagtatgttgatggatgtaaaaacatgcaatgaggtggacctggagaattctgcagattgggaagtgaagacaataacaagtgccttgaaacagtatttgaggagtcttccagagcctctcatgacctatgagttacatggagatttcattgttccagccaaaagcggcagcccagaatctcgtgttaatgcgatccatttcttggtacacaaactgccagagaagaataaagagatgttggatattttggtgaaacacttaacaaatgtttcaaatcactccaagcagaacctgatgactgtggcaaacttaggagtggtgtttggaccaactctgatgaggccacaggaagaaactgtcgctgccctcatggacttgaagtttcagaatattgttgtggaaatcttaattgaaaaccatgaaaagatttttcggacgccgcccgatactacattccctgagcccacctgcctgtcagcatcacccccaaatgcgccaccaaggcagtcgaagagacaaggccagagaaccaagaggcccgtggccgtctacaatctttgtctggagctggaagatggtgacaatccttacccttccaaggaggacacccctaccagcagtctggactcactttcctccccgtctcccgtgactacagctgtccctgggcctcctggaccagacaaaaaccaccttctggcagatggagggagctttggagactgggcatccactatcccaggccagacccgatcgtctatggtccagtggcttaacccacagtctccaaccacaacaagctccaactcagctgtgacacctctttcacccgggtcgtcccctttccccttttctcctcctgctactgtagcggacaagccacctgaaagcatccgcagtcggaaggctcgagccgtgtatccgtgtgaagcagaacacagctcggaattatcttttgaaataggagcaatttttgaggatgtacaaacctccagggaacctggctggctagaagggactctgaacggcaagagggggctgattccacagaactacgtcaagctgctgtagctcctggcctcagagcccctgctgaccctggcacccagggacctgcctgggggcagagagctgtcttcctcctccgaggctctgggctgcacccacaggtacctccacacttgggagttaccatcatcacagtcagccctgggggtggggggtggtgggcagggatgggacgcaccacacagaactgtgattgtggatcaggaggggaatgtcaggattcgcaaaatggacttttcatttgtcaagtattgggacttgtgatttttaattatccagcatatagaatgagagggagggcagccttctgccacctgtgtcgcctccactggcagtcacgccaccagagccaccctggctccctctcctccctgagcacctgctgctgcgattttaaagggaactgtactactcgcagtgataggtttgcagagtgtgtgcttggctgtggcagcctagcttggagaagctgctgttggtgcaagggagatggtctcaagtcagagggaagcagagacgcgcgtctcaagcctgcccttcctagacggccacctgcaggaccccacactcactgcactggcagcgtgcactggcgtatttgtaacaggcttctcggtgctcctcacccgtgtgctgttttccaaacaccacctttttgcctcaaggtctctgtaaatgaaataaactgtaatttactatttg

SEQ ID NO: 1320 - DNA, 8188 bp, Homo sapiens
  source 1..8188: mol_type = unassigned DNA
gatgtctcttttccagccagaaatctctgtgtctggtgatgcctttgcccaagttttgctctggcccgctgggcttgttctgcctgctcttcctggcaggctgcactcggcttgtgctactggcctggatctcatgcctgccaagggcgagccaggcacggagtggcgaggagttcgtgagtgagttcagggtcatccggccactgtgcacagccgggcatgccgactgtggtggggcaggcagctccaggcacaggcactggctccgtgcaaggctgtggctggaccaggcatactgcaggtcgcttccattgtgggcactgggaacacggtggcacccggaaacttggagacaccaggaaccgcagagccccaaagaggatgtcacagccctggcttagggagcccctaggtctgggctccccgaagggccgcagctcttctctccttctcgtcgcccacaatgtagtgagcaggggagggggaggatcacccctgtttgtgttacagctctttcagtctggccattccttgggtcccaagttcttgtcccacatccaagaggaatgaggtatggagacaactggagggtgagcaaggtacaggggaacttcattgagcaacagaacagttctcaggagacctgaagtgagtagcctttttctgcaggcaggtcgacgtaatgagtgtccagctctcactggagaggagacctgtagtgcatagctcctttccacaggcaggtcatcctgactagtggaggagacccccagagggttgctccttccaacagctggtagtccccatgtctttctgagtctggctgagtccagagtttttctgggctcagaagggaggaagtgtgctgattggcccatgcgcagccatgagtgggcctggaaaaagcaccgtaagttttcatcccaggctgcagactccacctagaactggcagcccagcggctcccaggcttcaggccatccctggcttgaagctggggtttcaccagggacctgtctgtcccttcccacctaggaacctgtctcccgcagctgtcaacatgtcatccatggcgcccaaggtatttgtgccaagaggtgcctgcaggcccctgttaagctgctctcagccccctggcctccctcctgtgcttgttggcatccaaagtccagagggggccgagctggaggttggggttaccaggggcgctggcatgtcagaaccaccctgtgtgcatgcatacccggctgggtggcaacagtacctgggcttggctacaactttgctccacactgcatcaggcgccgggagccgggagaggccagggagcaggagcaggcacttcttgagcctgctggtggggcagtgggccttcgccggcccccaagagcacagggatgccctggtccagagctgtggctgcacggctgcagctgtgtctgggagcatggggctcctgccctgataactctgtagaagttggggctcctgcctgtttctggcccccgcgggcaccatggagtgcgcagccctggctgcactttgccctctgcagctggtgtcctcacagcggctgctccagactggccgctgctgccatcattgccagtaatcccagggattctggtgatttaatcacagagcatgtggcacaacagttctggattttcagaacattaagggggtggtgatagaggttgactggtaatgcaagggtaattacagtagcaagaacaaccaggagagagaatttactaaaagataaaatcaaattgataaatctgatgctggtataaatttcttcaagagcctttgcagtaataacaaatgaggaaatcacccttcttatgtctttattaaatagtcaacaaaattacagtgtttttgctgggagatgtgccaactaactgctgatggctgaactatcaaactctggttattggaggcacaaaaatatgattcagatgagtgttaggtagaaattctcattttagcttagtaatatatattaaagtatttgctgaaatggtttttattacattttgaaatgtgtttcaaatgtgttaaatgcttttcaaaaacaacacatttttggttataaaacgtgaataaaatttcaataaaatgtatgattttattttaaagtctatggcccagtggtattaagtacattcacattgttttgcaactgtcaccaccatgcatctccagggctttttaaaaaatcttcccagactgcagctctgtacctattaacaataactctccattctcccctgctccagctcctggcagccgtcgttctgctttcagtttctatgaatttaactactctaggtgtctcatgtgagtgggatcatatagtatctgtccctttgtgactagtttatttcacttagcctgatgtcctcaaggtttatccatgttgtagtatgtatcagaatttccttcctgtctaaggctgaataatattctgttatacatatggattggctacattttatttactcatccatccatccatgggcattggggtcactttgccccctgctgctatgaacaggggtgtacacatatctgttcgagtctctgctttcagttcttttgggtatatgcccagctgtagaattgctgggtcatgtggtaatactatttttcatttgagggaaaaatttattttaattttttgctgggagttgtgcctgttaactgctggtggctgaactattgaattctggttaatgaagccacaaaaatatgattttgaggagtgttaggtagaaatgttcatgttagcttagtaacacgttatgtttcaatattattttacttaaagcactatttttcacagtgcttgtaccatcttgcattcccactaatgatgcacaagggtttcagtttcttgacatcctcaccaacaccactacttttcttttttgtacagtagccaccctagtgagtgtgaggtggcatctccttgtgagtttgatttgcatcctaatgatgagcgatgttgagtgtcttttcacatgcttattggccttttgtatatcctctctggagaaatgcccagataaatatttttaagagtaaaattagctaagttaggaaaaatatcacatgatacctagtaagaatggtttcttggacatgagttctctctccactattctctgtggagtcctgctcttctcccagttcctttctagttaggcaagctaagctggaagctttttttggaatagcgtcctgaccagctggtgcccccttctctcccaggggatcagacgttctgagggccgcagatgggcgtccagccctggcccgcctttgagagccgggttcttgagatgctgccatggctggctccttctcacttgccgccatcactccctgagcgctgaggtgctgggccctttctcaggcagactttattcctagaggatttgttcatcgaaatgtttgttgattgtgattgcatgtggttcagccttggggcatcagttgtggttggggtgagtttttcaagaagagaagtccctttgatcttcagttcttgggggtcaacttcaacaaacagagtaggagtcacaagctttttctgcaaagaaactgatagtaaatattttagacttctgtggaccataaagttcctgttgcacctgctcaattctgctgttgcagcaggaaagtagctgcagacaatacataaatgaattgtcgtacctgtgttgcaatactttatttacaaaatcaggcagcacaccgtattttggcccatggaccacagtgtgatgacctctgatgtagcgtttcacttttcaccatctccagtttgactaacctctgtgattttaacataggcagatatccaagtagagcagaaccggcaacacttctatgaactgtctctcgagtatgtgtgtaagctgcaggaaatccaagaaagaaagaagtttgagtttgtggaacctgtgagtattgccaagttgtttgctggtggatttttgcaatgtaagataagtatttattttcctagatctgatttatggtttatagttactagaggccatagtgcataaacatgaaagagacatattaaaaagggcagacacagatagccatgaagtcaaggaattgcctctaaatcagtggttctcagctgtatttgcactgataatacacgtaatattcccattgctacatgatctcaaggaaggcaaccatgtgcaatttctgccaccttagcctatagctctatcttttaaaaatttctctgaaataatttatactagaatgagtgaacatgggttgtttataccggttcaaactttggtactttaaacaatcgtttgtaacatgacttcaaacacaattcacaatgcttatggcaatctaagtttagaagcaggatatggaacatttgagacaattttgtgagttactctaacatttctttttacttatattagaaacacatgatttttgtttgtgattatatagatgttttctagtagcttcagttgtttatatatgaagatgtatgcacatgaatgtatatatcataatgtaaaggatatttcatgtggatttcagcaaaaaaacactggatctcattctcaggattcattttaattttaatatcgacttattgaatggtttctttttcttaaacagctttattaagataatattcacacagtatacaatttactcattgtgagtatggtttatagaaacaagaataaccaagtaatgattaaaaatgagcatttgtggagctatggtttagttggagcgatagtcattaacctaaaccattagagaaaaactcaacctcctcaaagctttctttttaatgtgaaataataataatggcctgcttttattgggcatttataatgctcagtctctgttcaagccattgttctaagtgttgtaccgaactcattattccacactataactcaatgaggagataaggaaatagaagtagagaaaggctgagtaatttgcctaaggtcccataacaggtcatggctgacgttgggaatggagcctgctgggtgtcagagccccagattcctaaccacccacggtgtggcatttggaagaaaatgaatctcaagatttccttaactgtctccccagatcacttctttttacttctagatttattgacttacatgtggagcagaggcaacagccctctaattcagagacaggttgggagttggtaggaaagtaaaggtttaattacgggtttgaggctgcccctggcaagtcatggaatatctttgtcaacaaaacacaggggttgcagtctgctggatgtggctggggagagcctggagctctttgattctgtgattttactttcttaaagattgtgtcaacctatagtgataagatttcaattacaaatattgggattctcctgactaaagaggacaaatggatgacttaataattcaatttttcctgcagaacatgccatataagctgtctaatggctgtgatatttaagggaaaaaagcatcattttctataaagaccaattaatagataatatgtacttgtgtttacttgaatattagtgacttccctttaatcagtttatttcagtggaataacagtgagatggcggggggaacacttggttgtttatatgattctttttttctcctgagtttttttgtgctaatatctcttttcttcctgtgtcttagatgctgtcattttttcaggggatgtttaccttctatcatcagggccatgaacttgccaaagacttcaatcactacaaaatggaactacagatcaacattcagaatacacggaatcgatttgaaggaacaaggtcagaagtggaagagctcatgaacaaaatcagacagaatcccaaggaccacaaacgagcaagtcagtttacagccgaaggctacctgtatgtccaggaaaaaaggcctgctccgtttggttccagttgggtcaaacactattgcatgtatcgaaaagcagcaaagaagttcaacatgatcccatttgagcacagatctggagggaaacttggggacggagaggtgttctttttgaaagaatgtaccaagaggcatactgactccattgacagaaggttttgttttgacatagaagctgctgatcggcctggcgtttccttgaccatgcaggcattttccgaagaggaaaggaagcagtggttggaagctctgggtggaaaggaagctctgtcccatagttttaatacagccatcatcccaagaccagaaggaaatgcacagttggataagatggggttcacaattatcagaaaatgcatcagtgccgttgaaacacgaggtataaatgaccaaggattgtacagagttgtgggggtgagttcaaaggtccagagacttctgagtatgttgatggatgtaaaaacatgcaatgaggtggacctggagaattctgcagattgggaagtgaagacaataacaagtgccttgaaacagtatttgaggagtcttccagagcctctcatgacctatgagttacatggagatttcattgttccagccaaaagcggcagcccagaatctcgtgttaatgcgatccatttcttggtacacaaactgccagagaagaataaagagatgttggatattttggtgaaacacttaacaaatgtttcaaatcactccaagcagaacctgatgactgtggcaaacttaggagtggtgtttggaccaactctgatgaggccacaggaagaaactgtcgctgccctcatggacttgaagtttcagaatattgttgtggaaatcttaattgaaaaccatgaaaagatttttcggacgccgcccgatactacattccctgagcccacctgcctgtcagcatcacccccaaatgcgccaccaaggcagtcgaagagacaaggccagagaaccaagaggcccgtggccgtctacaatctttgtctggagctggaagatggtgacaatccttacccttccaaggaggacacccctaccagcagtctggactcactttcctccccgtctcccgtgactacagctgtccctgggcctcctggaccagacaaaaaccaccttctggcagatggagggagctttggagactgggcatccactatcccaggccagacccgatcgtctatggtccagtggcttaacccacagtctccaaccacaacaagctccaactcagctgtgacacctctttcacccgggtcgtcccctttccccttttctcctcctgctactgtagcggacaagccacctgaaagcatccgcagtcggaaggctcgagccgtgtatccgtgtgaagcagaacacagctcggaattatcttttgaaataggagcaatttttgaggatgtacaaacctccagggaacctggctggctagaagggactctgaacggcaagagggggctgattccacagaactacgtcaagctgctgtagctcctggcctcagagcccctgctgaccctggcacccagggacctgcctgggggcagagagctgtcttcctcctccgaggctctgggctgcacccacaggtacctccacacttgggagttaccatcatcacagtcagccctgggggtggggggtggtgggcagggatgggacgcaccacacagaactgtgattgtggatcaggaggggaatgtcaggattcgcaaaatggacttttcatttgtcaagtattgggacttgtgatttttaattatccagcatatagaatgagagggagggcagccttctgccacctgtgtcgcctccactggcagtcacgccaccagagccaccctggctccctctcctccctgagcacctgctgctgcgattttaaagggaactgtactactcgcagtgataggtttgcagagtgtgtgcttggctgtggcagcctagcttggagaagctgctgttggtgcaagggagatggtctcaagtcagagggaagcagagacgcgcgtctcaagcctgcccttcctagacggccacctgcaggaccccacactcactgcactggcagcgtgcactggcgtatttgtaacaggcttctcggtgctcctcacccgtgtgctgttttccaaacaccacctttttgcctcaaggtctctgtaaatgaaataaactgtaatttacta

SEQ ID NO: 1321 - DNA, 1934 bp, Homo sapiens
  source 1..1934: mol_type = unassigned DNA
atgtaccaagaggcatactgactccattgacagaaggttttgttttgacatagaagctgctgatcggcctggcgtttccttgaccatgcaggcattttccgaagaggaaaggaagcagtggttggaagctctgggtggaaaggaagctctgtcccatagttttaatacagccatcatcccaagaccagaaggaaatgcacagttggataagatggggttcacaattatcagaaaatgcatcagtgccgttgaaacacgaggtataaatgaccaaggattgtacagagttgtgggggtgagttcaaaggtccagagacttctgagtatgttgatggatgtaaaaacatgcaatgaggtggacctggagaattctgcagattgggaagtgaagacaataacaagtgccttgaaacagtatttgaggagtcttccagagcctctcatgacctatgagttacatggagatttcattgttccagccaaaagcggcagcccagaatctcgtgttaatgcgatccatttcttggtacacaaactgccagagaagaataaagagatgttggatattttggtgaaacacttaacaaatgtttcaaatcactccaagcagaacctgatgactgtggcaaacttaggagtggtgtttggaccaactctgatgaggccacaggaagaaactgtcgctgccctcatggacttgaagtttcagaatattgttgtggaaatcttaattgaaaaccatgaaaagatttttcggacgccgcccgatactacattccctgagcccacctgcctgtcagcatcacccccaaatgcgccaccaaggcagtcgaagagacaaggccagagaaccaagaggcccgtggccgtctacaatctttgtctggagctggaagatggtgacaatccttacccttccaaggaggacacccctaccagcagtctggactcactttcctccccgtctcccgtgactacagctgtccctgggcctcctggaccagacaaaaaccaccttctggcagatggagggagctttggagactgggcatccactatcatccgcagtcggaaggctcgagccgtgtatccgtgtgaagcagaacacagctcggaattatcttttgaaataggagcaatttttgaggatgtacaaacctccagggaacctggctggctagaagggactctgaacggcaagagggggctgattccacagaactacgtcaagctgctgtagctcctggcctcagagcccctgctgaccctggcacccagggacctgcctgggggcagagagctgtcttcctcctccgaggctctgggctgcacccacaggtacctccacacttgggagttaccatcatcacagtcagccctgggggtggggggtggtgggcagggatgggacgcaccacacagaactgtgattgtggatcaggaggggaatgtcaggattcgcaaaatggacttttcatttgtcaagtattgggacttgtgatttttaattatccagcatatagaatgagagggagggcagccttctgccacctgtgtcgcctccactggcagtcacgccaccagagccaccctggctccctctcctccctgagcacctgctgctgcgattttaaagggaactgtactactcgcagtgataggtttgcagagtgtgtgcttggctgtggcagcctagcttggagaagctgctgttggtgcaagggagatggtctcaagtcagagggaagcagagacgcgcgtctcaagcctgcccttcctagacggccacctgcaggaccccacactcactgcactggcagcgtgcactggcgtatttgtaacaggcttctcggtgctcctcacccgtgtgctgttttccaaacaccacctttttgcctcaaggtctctgtaaatgaaataaactgtaatttact

SEQ ID NO: 1322 - DNA, 2131 bp, Homo sapiens
  source 1..2131: mol_type = unassigned DNA
catgtgcatacaactgaaagtgccgcttgctataagccaaggctactgagtgatactgttaacgatgatgatgataatagctatacatgaattacattgtggatgttgaaataatatactatgtctaattcttccttactcccaacccatctcttattttttgctttgatctctactacagattttacgaagtgccagaagtgtctagtcatagaacatagcttatagtattttagagaaatcatatatataatgttttcctaggaaactgcaggattgtggtttgcccatttaaaaatggaagctttgtgagctagacaagaggacctttgatgatcaaggttttaattatttttttcttgtttgcttgctcactagatgtaaaaacatgcaatgaggtggacctggagaattctgcagattgggaagtgaagacaataacaagtgccttgaaacagtatttgaggagtcttccagagcctctcatgacctatgagttacatggagatttcattgttccagccaaaagcggcagcccagaatctcgtgttaatgcgatccatttcttggtacacaaactgccagagaagaataaagagatgttggatattttggtgaaacacttaacaaatgtttcaaatcactccaagcagaacctgatgactgtggcaaacttaggagtggtgtttggaccaactctgatgaggccacaggaagaaactgtcgctgccctcatggacttgaagtttcagaatattgttgtggaaatcttaattgaaaaccatgaaaagatttttcggacgccgcccgatactacattccctgagcccacctgcctgtcagcatcacccccaaatgcgccaccaaggcagtcgaagagacaaggccagagaaccaagaggcccgtggccgtctacaatctttgtctggagctggaagatggtgacaatccttacccttccaaggaggacacccctaccagcagtctggactcactttcctccccgtctcccgtgactacagctgtccctgggcctcctggaccagacaaaaaccaccttctggcagatggagggagctttggagactgggcatccactatcccaggccagacccgatcgtctatggtccagtggcttaacccacagtctccaaccacaacaagctccaactcagctgtgacacctctttcacccgggtcgtcccctttccccttttctcctcctgctactgtagcggacaagccacctgaaagcatccgcagtcggaaggctcgagccgtgtatccgtgtgaagcagaacacagctcggaattatcttttgaaataggagcaatttttgaggatgtacaaacctccagggaacctggctggctagaagggactctgaacggcaagagggggctgattccacagaactacgtcaagctgctgtagctcctggcctcagagcccctgctgaccctggcacccagggacctgcctgggggcagagagctgtcttcctcctccgaggctctgggctgcacccacaggtacctccacacttgggagttaccatcatcacagtcagccctgggggtggggggtggtgggcagggatgggacgcaccacacagaactgtgattgtggatcaggaggggaatgtcaggattcgcaaaatggacttttcatttgtcaagtattgggacttgtgatttttaattatccagcatatagaatgagagggagggcagccttctgccacctgtgtcgcctccactggcagtcacgccaccagagccaccctggctccctctcctccctgagcacctgctgctgcgattttaaagggaactgtactactcgcagtgataggtttgcagagtgtgtgcttggctgtggcagcctagcttggagaagctgctgttggtgcaagggagatggtctcaagtcagagggaagcagagacgcgcgtctcaagcctgcccttcctagacggccacctgcaggaccccacactcactgcactggcagcgtgcactggcgtatttgtaacaggcttctcggtgctcctcacccgtgtgctgttttccaaacaccacctttttgcctcaaggtctctgtaaatgaaataaactgtaatttacta

SEQ ID NO: 1323 - DNA, 645 bp, Homo sapiens
  source 1..645: mol_type = unassigned DNA
tttaaatttaatcagagattttattttggaatcttctgttaaaaaaataaaaggctatgacctcttcccttcattggaaggaatggattttgggctctagcctgtcttgaatgaactccaaatcaaatgttgtggtgctggtttactggagtaacacacaggtttctgttcatggtaaataattcctgtcctttatgctttgttggaagatttttcggacgccgcccgatactacattccctgagcccacctgcctgtcagcatcacccccaaatgcgccaccaaggcagtcgaagagacaaggccagagaaccaagaggcccgtggccgtctacaatctttgtctggagctggaagatggtgacaatccttacccttccaaggaggacacccctaccagcagtctggactcactttcctccccgtctcccgtgactacagctgtccctgggcctcctggaccagacaaaaaccaccttctggcagatggagggagctttggagactgggcatccactatgccagacccgatcgtctatggtccagtggcttaacccacagtctccaaccacaacaagctccaactcagctgtgacacctctttcacccgggtcgtcccctttccccttttctcctcctgctact

SEQ ID NO: 1324 - DNA, 627 bp, Homo sapiens
  source 1..627: mol_type = unassigned DNA
gggaagcagtaggaaccttagctgcttggaatggaatggttgattatccagaatgtttgggatatgtggaatgtatcaacacgaggcacagtggtgtactgtcagtaatgcagcatttgctgacgattgttttttagaaagcaagttgcctcatttagaatagatttctatatgcgtgtgatatgtactcttcagagacagagactcctggtagtgtcagaaaacaaacaacaacaacaaaaccccacatggaacagaattagactttgtggagaaattttgttcttggaatagaagcaagatcattcctccatcaccataacatacatgcagttttgccaagagaatgtggaacgtagctgccctgccccaggcctgtctcatgttggcacaccatatggctgaaggggagggtgcgatgtacaaacctccagggaacctggctggctagaagggactctgaacggcaagagggggctgattccacagaactacgtcaagctgctgtagctcctggcctcagagcccctgctgaccctggcacccagggacctgcctgggggcagagagctgtcttcctcctccgaggctctgggctgcacccacagcatatagaatgagagggag

SEQ ID NO: 1325 - DNA, 2968 bp, Homo sapiens
  source 1..2968: mol_type = unassigned DNA
attgaacaaagtattttgaggtgcatttgtgtgtgcttgatacttgctccttttgattcaggtcagaatattaaatataagctcagtttctacaactggtttggcagaaatcaaatccgagtttgtctacagtgattcagaggggaccaggcctttcgcgatggatagcactataatatgcagaaatctacaaattctgatacttccgtggaaacactgaattctacccgccaaggcacaggagctgtgcaaatgagaatcaaaaatgccaacagccaccatgacaggctcagccaaagtaaatccatgatcctcaccgatgtcgggaaggtcactgaacctatatccagacacagaaggaatcattcacagcatatcttgaaagatgtcattcctccattggaacaactgatggttgaaaaagaaggttatctgcaaaaagctaaaattgcagatggaggaaagaaactaaggaaaaactggtctacttcctggattgttctttctagtcgaagaattgaattttacaaagaatccaagcaacaggctctgtccaatatgagcttctgcttgatgtgttcaggaggcacctgaccatgttcatgggatttggcaaatctccatttttggttaaacaaaacccatttgatggattgcatcatagagaagaagctctgcaatttagaacatccattcatttattctctcaacagttaacaactcctaccaggtgtcatataatttttttctttttgttttgttttgtttttacattaggggcaacagaaatattcaaatgaatagtatatgatccctgctcttaaagtactcacaatatggtaaaagagacataattttgtataggtttattataataaaaccatgactaaagtgttaaaaaatattagacaacatgccatggaaccatagatttagctataggtagtctttttccagagaaactattgttgcaagtcatgttcagcttaggtatctctccttttgttcaaatattactgtttgatattattatatcaaatattattgagcatctcttatgtttaagtcactacgataggtgttctgaaagataaaaaatgaaccagactgaaacaaatagaaagtatggccttagattgagtatagtgaagaaatggatgttggtagttgtcctaaaatggcatgaacagagacatggcgtcgttttatgataactcaagagaagagtgtgattgcttccatttggacaggatttgaaatatattcatggaggaagtgacatttgagcacatttctgaaggatgtataggattttgatgtaaaagggggcaaaagatattttatgtactaataagagagtaattaatagtgaactatggaaaattctttttttgttgtttattttacagatgtatattgatctcttgccttcttccatgcactgtgtactagtcactgttcttgaaatgtttgaatgggggttccctgaggcctggagtgaatatttcctagtccagagtattttgtgtttcttctctaagttgcctgggagtgaggaacagctttagactaagttgcggaacagcattgtggaacagcaaacagtgtaatttggttagaaagtcagtgtggaaccggtttaggaaagactttgaacaggattgggagaagagatcatttcattctgtaggtaatgtggggtttttgtaaccaatatgaaatattctcaaattaagagagactcagagttttcagagacatgtttagggaactgatatatatatcagttgtctataaaattaagtctctcttaattttgtgtatatataacttaaaaacacatgcaggacttggtaaattatccgagagacatgttctaaaaatttatgcaaatagatgtgagcaataaggcctgagctcttacgacagagaaaattgtaaaacggctgtgtgtcatcattttggctcaatgcatttagtaaatcacaggacatcttttcactgacaaaatattttgatattctcatatgtctctgacctccaacagtatggccatttctaaagacgttctagtgcaaagagaacaagcagagctatccatctaaggagagcgaaaaacatgctgtcccaagaactaggtgtgtcaccatctcagtgagcacccgttgcaaacctactggtgcttccatctgactccagaacatctgtttagtgtcacaccctacttaaacaaatgcattgtgtgaagtctttccaccaacaatcagacgctgtggaactcattgtcaccaattgggtggatgagagccaccgtttctattatattcatcacacactgctcagaaaatttagtgtcacttttgatataaattcaaaaacattgtaaacattttagggaatattttccccctaaaatggtgtggttctaaagccagtatattcagtagaaagcctatatgttggttgtgtaagggacttttttgttactcttatgttttttattttacattgtactaatatgtatttttaatcagagccaacaactggcaatttttactttttaaaaattatatttttgggttttacatttaagtctttaatccatcttgagttaatttttgtatatggtgtaaggaaggggtccagtttcaattttctgcatatggttacccagttccccacatttattaaataaactataaaaactctagaatgaaatctaggcaataccattcaggacataggcacagacaaagattttatgatgaaaatgccaaaagcaattgtaataaaagcaaatggtgacaaatggggtctaattaaactaaagagcttccgcacagcaaaagtaactatcatcagagtgaacagacaactttcagaatgggagacaatttttgcaatctattcagctgacaaaattctaatatccagagtctataaggaacttaaacaaatgtacaagaaa

SEQ ID NO: 1326 - DNA, 1775 bp, Homo sapiens
  source 1..1775: mol_type = unassigned DNA
gcctttttcttcccccagtactgaaattaagcagcatccaacacaggcctactcttacgacatgtgactttactgttttccgtttttgttgaaagagtcattaacagttaggagttgatggcagtttcaataacaggtcattgccgagaaaaggatagcactataatatgcagaaatctacaaattctgatacttccgtggaaacactgaattctacccgccaaggcacaggagctgtgcaaatgagaatcaaaaatgccaacagccaccatgacaggctcagccaaagtaaatccatgatcctcaccgatgtcgggaaggtcactgaacctatatccagacacagaaggaatcattcacagcatatcttgaaagatgtcattcctccattggaacaactgatggttgaaaaagaaggttatctgcaaaaagctaaaattgcagatggaggaaagaaactaaggaaaaactggtctacttcctggattgttctttctagtcgaagaattgaattttacaaagaatccaagcaacaggctctgtccaatatgaaaactgggcacaaaccagaaagtgtggatttgtgtggagcacacattgaatgggccaaggaaaaatcgagcagaaagaatgtctttcagatcacaacagtatcaggaaatgagttccttctacagtcagatattgacttcatcatattggattggttccacgctatcaaaaatgcaattgacagattgccaaaggattcaagttgtccatcaagaaacctggaattattcaaaatccaaagatcctctagcactgaattgctaagtcactacgacagtgatataaaagaacagaaaccagagcacagaaaatctttaatgttcagactgcatcacagtgcttccgatacaagcgacaaaaatcgagttaaaagcagattaaagaagtttattacccgaagaccttccctgaaaactctgcaagaaaaaggacttattaaagatcaaatttttggctctcatctgcacaaagtgtgtgaacgtgaaaattccacagttccgtggtttgtaaagcaatgcattgaagctgttgagaaaagaggtctagatgttgatggaatatatcgagttagtggcaatctggcaacaatacagaagttaagatttattgtcaaccaagaagagaagctgaatttggacgacagccagtgggaggacatccacgttgtcaccggagcactgaagatgtttttccgggagctgcctgagccgctcttcccttacagtttctttgagcagtttgtggaagcgatcaaaaagcaagacaacaacacaagaattgaagctgtaaaatctcttgtacaaaaactccctccgccaaatcgtgacaccatgaaagtcctctttggacatctaactaagatagtggccaaagcctccaagaacctcatgtccacgcaaagcttggggattgtatttggacctacccttctgcgagctgaaaatgaaacaggaaacatggcgatccacatggtctaccagaaccagatagctgagctcatgctgagtgagtacagtaagatcttcggctcagaggaagactgacagacaagacaagctactgaatacgttcacatctgtcttgatgcctaatatttttacatttctgtaaacatatttctgaaatattttttgcctttcaagcgacagatgcctcattttgtgaaaacttaatgatgattttgtgtttaagttccaaacatttgaataaaataattgacaata

SEQ ID NO: 1327 - DNA, 1086 bp, Homo sapiens
  source 1..1086: mol_type = unassigned DNA
attaacagttaggagttgatggcagtttcaataacaggtcattgccgagaaaaggatagcactataatatgcagaaatctacaaattctgatacttccgtggaaacactgaattctacccgccaaggcacaggagctgtgcaaatgagaatcaaaaatgccaacagccaccatgacaggctcagccaaagtaaatccatgatcctcaccgatgtcgggaaggtcactgaacctatatccagacacagaaggaatcattcacagcatatcttgaaagatgtcattcctccattggaacaactgatggttgaaaaagaaggttatctgcaaaaagctaaaattgcagatggaggaaagaaactaaggaaaaactggtctacttcctggattgttctttctagtcgaagaattgaattttacaaagaatccaagcaacaggctctgtccaatatgaaaactgggcacaaaccagaaagtgtggatttgtgtggagcacacattgaatgggccaaggaaaaatcgagcagaaagaatgtctttcagatcacaacagtatcaggaaatgagttccttctacagtcagatattgacttcatcatattggattggttccacgctatcaaaaatgcaattgacagattgccaaaggattcaagttgtccatcaagaaacctggaattattcaaaatccaaagatcctctagcactgaattgctaagtcactacgacagtgatataaaagaacagaaaccagagcacagaaaatctttaagtgagtattttctttgacttgctcattttaagtttgtctaaatgcagtgcttatgaaatataaatgcattgaaatgagatttaagccaaactcatcatactcatggaagattcgtagccatttcctggccagggatttgtgcactggagggcagtctgggcactttgctcacatcattgttggtaatgccttttgagaaaataattgttccaaggtcatggtctctgcttacagcaaacctctgaatctctgagtaatagccatggtgttcagatcagtgattgattttgagagtgggaaatgtcaagcatctcc

SEQ ID NO: 1328 - DNA, 521 bp, Homo sapiens
  source 1..521: mol_type = unassigned DNA
aacagctgtctggcctgagccaacatacttacgaccaaggaaaagtgccatccttcaatcctgctgagttggattaaccttcagaactaaatctgctttttcggcagcagaagatatccagacacagaaggaatcattcacagcatatcttgaaagatgtcattcctccattggaacaactgatggttgaaaaagaaggttatctgcaaaaagctaaaattgcagatggaggaaagaaactaaggaaaaactggtctacttcctggattgttctttctagtcgaagaattgaattttacaaagaatccaagcaacaggctctgtccaatatgaaaactgggcacaaaccagaaagtgtggatttgtgtggagcacacattgaatgggccaaggaaaaatcgagcagaaagaatgtctttcagatcacaacagtatcaggaaatgagttccttctacagtcagatattgacttcatcatattggattggttccacgctatcaaaaatgcaattgacagattg

SEQ ID NO: 1329 - DNA, 337 bp, Homo sapiens
  source 1..337: mol_type = unassigned DNA
tttctagtaagattcaacattatgaaaatattttgaattaagcaatgacacatgaggctggaaaaactggtctacttcctggattgttctttctagtcgaagaattgaattttacaaagaatccaagcaacaggctctgtccaatatgaaaactgggcacaaaccagaaagtgtggatttgtgtggagcacacattgaatgggccaaggaaaaatcgagcagaaagaatgtctttcagatcacaacagtatcaggaaatgagttccttctacagtcagatattgacttcatcatattggattggttccacgctatcaaaaatgcaattgacagattg

SEQ ID NO: 1330 - DNA, 434 bp, Homo sapiens
  source 1..434: mol_type = unassigned DNA
gtggttttcctgcccagccctccgccactgggctgtggagcccgctgctgctggtgcattcttgtacgtgaggtgtttctcctgtccagcctggcaccactggcctctttccccgaaaactgggcacaaaccagaaagtgtggatttgtgtggagcacacattgaatgggccaaggaaaaatcgagcagaaagaatgtctttcagatcacaacagtatcaggaaatgagttccttctacagtcagatattgacttcatcatattggattggttccacgctatcaaaaatgcaattgacagattgccaaaggattcaagttgtccatcaagaaacctggaattattcaaaatccaaagatcctctagcactgaattgctaagtcactacgacagtgatataaaagaacagaaaccagagcacagaaaatctttaa

SEQ ID NO: 1331 - DNA, 627 bp, Homo sapiens
  source 1..627: mol_type = unassigned DNA
gcatttttctgcgggttctgacttaagtgtgtactgtctgcagttctctgaacttcctggcttgtttctccttaagttggagtaattcagctctagccctactctgacttaatcgttctattattaaaacaataatgtatttgttatgacgtgaaaaacagtttatagagagcggttcaaaatgctcccagttcccagaaagacaattactggaatacaagaaaatatttcattttattaaactgtgttttttaaaaaaggatttttacatgtaagagatctatcttacatagtttctttacctgtctatttctttttcttttttttttttttgcagatcacaacagtatcaggaaatgagttccttctacagtcagatattgacttcatcatattggattggttccacgctatcaaaaatgcaattgacagattgccaaaggattcaagttgtccatcaagaaacctggaattattcaaaatccaaagatcctctagcactgaattgctaagtcactacgacagtgatataaaagaacagaaaccagagcacagaaaatctttaagtgagtattttctttgacttgctcattttaagtttgtctaaatgcagtgcttatgaaatat

SEQ ID NO: 1332 - DNA, 540 bp, Homo sapiens
  source 1..540: mol_type = unassigned DNA
atttttctgcgggttctgacttaaatcacaacagtatcaggaaatgagttccttctacagtcagatattgacttcatcatattggattggttccacgctatcaaaaatgcaattgacagattgccaaaggattcaagttgtccatcaagaaacctggaattattcaaaatccaaagatcctctagcactgaattgctaagtcactacgacagtgatataaaagaacagaaaccagagcacagaaaatctttaatgttcagactgcatcacagtgcttccgatacaagcgacaaaaatcgagttaaaagcagattaaagaagtttattacccgaagaccttccctgaaaactctgcaagaaaaaggacttattaaagatcaaatttttggctctcatctgcacaaagtgtgtgaacgtgaaaattccacagttccgtggtttgtaaagcaatgcattgaagctgttgagaaaagaggtaacatgattaacgttggaagaactctgaaaccccgaaaacaagagaagacgtgtgaacctgtt

SEQ ID NO: 1333 - DNA, 623 bp, Homo sapiens
  source 1..623: mol_type = unassigned DNA
aacttcctggcttgtttctccttaagttggagtaattcagctctagccctactctgacttaatcgttctattattaaaacaataatgtatttgttatgacgtgaaaaacagtttatagagagcggttcaaaatgctcccagttcccagaaagacaattactggaatacaagaaaatatttcattttattaaactgtgttttttaaaaaaggatttttacatgtaagagatctatcttacatagtttctttacctgtctatttctttttcttttttttttttttgcagatcacaacagtatcaggaaatgagttccttctacagtcagatattgacttcatcatattggattggttccacgctatcaaaaatgcaattgacagattgccaaaggattcaagttgtccatcaagaaacctggaattattcaaaatccaaagatcctctagcactgaattgctaagtcactacgacagtgatataaaagaacagaaaccagagcacagaaaatctttaatgttcagactgcatcacagtgcttccgatacaagcgacaaaaatcgagttaaaagcagattaaagaagtttattacccgaagaccttccctgaaaactctgcaagaa

SEQ ID NO: 1334 - DNA, 353 bp, Homo sapiens
  source 1..353: mol_type = unassigned DNA
aaatcttcagtgttcagactgcatcacagtgcttccgatacaagcgacaaaaatcgagttaaaagcagattaaagaagtttattacccgaagaccttccctgaaaactctgcaagaaaaaggacttattaaagatcaaatttttggctctcatctgcacaaagtgtgtgaacgtgaaaattccacagttccgtggtttgtaaagcaatgcattgaagctgttgagaaaagaggtgggtgactgaatgtgcagcagttccccccattactgcaccctctacacaaccaatactcaagttagcagtgccacctgatttgtctgagaagccatgcaattaaaacttgacttgtgtt

SEQ ID NO: 1335 - DNA, 842 bp, Homo sapiens
  source 1..842: mol_type = unassigned DNA; mol_type = unassigned DNA
gctctcatctgcacaaagtgtgtgaacgtgaaaattccacagttccgtggtttgtaaagcaatgcattgaagctgttgagaaaagaggtctagatgttgatggaatatatcgagttagtggcaatctggcaacaatacagaagttaagatttattgtcaaccaagaagagaagctgaatttggacgacagccagtgggaggacatccacgttgtcaccggagcactgaagatgtttttccgggagctgcctgagccgctcttcccttacagtttctttgagcagtttgtggaagcgatcaaaaagcaagacaacaacacaagaattgaagctgtaaaatctcttgtacaaaaactccctccgccaaatcgtgacaccatgaaagtcctctttggacatctaactaagtaagttgtaaggatttctggatgtgtcattttatagtcatttcctaaatgggcaatattgaatttcacatctctaaggcaagagtttccaaatgcgtacatctcgtattttcccttgtagctgaactaggtctttctgcagaagctggagaatgtgttagggataggaaggacaatctacaaaaggaacttctgaaataacttatttttcaaggccctttcaactagtatatgtttgctgattgcttgtcagaaccatcgcctggaccctgggatgggtcatcttgactttgttatctaacataatgaaagaacatgaaatgattcagacatggattcaaaactcagccccaccatgtaccacgtgctggggccacaaataagttacttaaaccctctgcaaccaatttcctcatctgtaaaatgttggctcaga

SEQ ID NO: 1336 - DNA, 345 bp, Homo sapiens
  source 1..345: mol_type = unassigned DNA; mol_type = unassigned DNA
gtctagatgttgatggaatatatcgagttagtggcaatctggcaacaatacagaagttaagatttattgtcaaccaagtcgtttctggaataccagcccttctatcagaactggatggagacctgtggacacccctagtaagctgcagatttttcacagtggtcatttgacctccagagcaagccaataatttgtcacttcattaaactgaagagaagctgaatttggacgacagccagtgggaggacatccacgttgtcaccggagcactgaagatgtttttccgggagctgcctgagccgctcttcccttacagtttctttgagcagtttgtggaagcgatca

SEQ ID NO: 1337 - DNA, 537 bp, Homo sapiens
  source 1..537: mol_type = unassigned DNA; mol_type = unassigned DNA
agtttgtttagtgagggtcagggaatgtaatgaagtgccaaaaattccacttgacctacgtactctacagtcaacagaaaagcactccatttttgcagagctctgagttaaatgcactcctcaaagcagatcagctatcaactgggaaagcttaatgcggcacagttggactagaaggatagtggccaaagcctccaagaacctcatgtccacgcaaagcttggggattgtatttggacctacccttctgcgagctgaaaatgaaacaggaaacatggcgatccacatggtctaccagaaccagatagctgagctcatgctgagtgagtacagtaagatcttcggctcagaggaagactgacagacaagacaagctactgaatacgttcacatctgtcttgatgcctaatatttttacatttctgtaaacatatttctgaaatattttttgcctttcaagcgacagatgcctcattttgtgaaaacttaatgatgattttgtgtttaagttccaaacatttgaataaaataattgac

SEQ ID NO: 1338 - DNA, 6189 bp, Homo sapiens
  source 1..6189: mol_type = unassigned DNA; mol_type = unassigned DNA
gaggcgcgtgtccgtgcactagaggcccccgtgcgtgacacaggccgatgagctcctgcgggctgcacccacgcggagtcacagaccgaaaagcccgcggtgtcgagcgcaggcggaggtacatggccccgacgggaggcgcgcggcgagcacccggagctcggctccctgcctgagcacggcagccgcgcctccgcccgcgcgtcctcgcccctccggccggcagcccgcggacatgatcgtgtagcctcctcctgggctgggatttgtttgaagattttcttcatggaagcgatgtccccccagcaggagactctagggggacagccggggcgctcctcttccctgacaggagtgtctcggctcgcgggaggcagctgcaccaagaagaaaatgaaaacactagcagaaaggaggaggagcgctccatctcttatcctggataaagccctacaaaaacggcctactaccagggacagtccttctgctagtgttgacacatgcacatttctgtcatcattagtgtgctccaataggactctgctgattgatggccgggcagaactcaaaagaggcctccagaggcaggagcggcatcttttcctattcaatgatctgtttgttgtggccaaaatcaaatataacaataactttaagataaaaaataaaattaaattaactgatatgtggacagcaagctgtgtggatgaagtgggagaaggcaacaccaatgccatgaaatcctttgttttgggctggcccacagtgaactttgtggccactttcagttctccagaacaaaaggacaaatggctctctctccttcagagatacatcaatctagagaaagaaaaggactacccgaagagcattcccctcaaaatcttcgccaaggacattgggaattgtgcctactctaaaactataacagtaatgaattcagatacagcgaatgaagttatcaacatgtcattaccaatgctagggataactggctctgagagagattaccagttgtgggtcaattctggcaaagaagaggctccatacccactcattgggcatgaatatccatatggaattaaaatgagccatcttcgagactctgcactcctgacaccgggatcaaaggactctaccacccctttcaacctccaggagcccttccttatggaacagctcccccgagagatgcagtgccagttcatcctgaagcccagccgcctggctgcagcccagcaactgagtgattcaggtcataagacatttaaaaggagaagatctatcataaactgggccttctggcgaggttctagcactcacctggacaacttgccctcatcgccaacatcacctatgccaggacagctctttggaatttctctgccaaatatttgtgagaatgacaatctgcccaaacctgtcttggatatgcttttctttcttaatcaaaaaggacctctcaccaaaggtatcttcaggcaatcagccaatgtgaaatcctgcagagaactaaaagagaaattgaattctggagtcgaagtacacctagactgtgaatctatttttgtgatagcatctgtcttaaaggattttctgcgaaatattccaggaagtattttttcatcagatctctatgatcactgggtctctgtaatggatcaaggaaatgatgaagagaaaataaatactgttcaaaggctattagaccagcttccgagagccaatgttgttctcctaaggtatctttttggggtgttacacaacattgagcaacattcctcatccaatcagatgactgcatttaatttagctgtgtgtgtcgctccaagtattctttggcctcctgcttcctccagcccagaactagaaaacgaatttacaaaaaaggtttccctgcttatacaatttctgattgagaattgccttaggatatttggagaagaaatcacttccctcttcagagaggtttcagtgagatgtgacactagagagaatgcctcagatatttcttgctttcaactgaatgactcctcctatgacagcttggaaaatgagctaaatgaggatgttgatgcaccatgcagtgacttggtaaagaaacttggccaggggagcagaagcatggactctgtcttaaccctcagtgactatgatcttgaccagcccgaggtggaaggccttttaaccctaagcgactttgacttggcccattctaaagatgaagatgttcaaatgaaacggcctcttgaatccaagccggtgaacattttagtgtacacaaagatcccactgcgggatcatgccagggccccatctgccatgtgcacacccagctacctgtccacagctgcagcaaatgctgcaaaaagcctgaggcgacaccggcgttgctcagagcccagcatcgactatctggattcaaagctttcctacctcagggagttttatcagaaaaagctacgcaagtccagctgtgatgcaattctttctcaaaaagatgaagactatctgaagcagaatcaacccctccaggaggaaggaaagacatgttttaaacagagtttagtcacaggcactgatgtcagcaagaaaaatgccactactcaaaacactaagaagaaaagcttgtctggtagtgaaggaaatcacgtgaaacttttccctaagtctaagccagtggccatttctgtggcatcttatagtcctatgtcctcacaggatcattccaagaaccagccctttgatgtgaatacatctggatactccccaccacacacagcagatgccctcaagggtccaaggacacatcggcgctgctcagagcccaacatagaagaccagaaccgcaagctgacctatctcaggggaatttattcaaagaaacaacataaaaccagctgtgaagctggtctcttgcatggagaggaggattatctcaaacggcataagtctttgcaaatggaggggcagaagctcattaatcagagtttagtcatggggattgaggtgggcaagagtagtgccacaaaccaaaacactgagaaggttttacccccaagattaaacctttgcccaaggaccagctattccagcttatcctccccaggcacttccccatccggctcatcagtaagctcccaagacagtgctttttctcagatttctgaacactctgtgtttacacccactgagacttcctctccaatagattgcacttttcaggctcagagaaaacgggaagacctttctcctgactttagcaatgccagccatgtttccggaatgcccggtccctcatcagggcaggcttgcagccgcccagcctatacaaagaaggacaccatggagtggcattcacaaatgcattctgtaactcttcatcccagcacatggttgagaaatggtgtggccagtttgaaaaactggtccctcaaaaagaaagcaaaggcagccagaccagaggaagagaaaatagcttctccaaaaggacccttagagccacccccacatgcttctggtgttccagaagccaactcactgcaagaggaacaaaaagacttgcccttaagggcagctgaaggactgtcccctgtgcagtcagcccaaaggtgtagttcttctcccttccaggactcagagagacactgtagctctccattcagcctggtggagagcagacttaagctgtgcatgaagtcacatgaggaaatagagcctggtagtcagagctcttctggttctctgccttgggaaagagcctcagccagctcttggactctagaggatgcgaccagcccagactcagggcctacagtggtctgcgacattgaggacaggtatttaaccaaagacatttaagcatagtaagaatctgatgtccacaagaacaggaactgggttaataataatagacaataattattatgacccctttgtataagatacctgggagaggtagcataaggattatcattgctaatacttaggacaacgaaataattctctttattgagactacttgacaaatactttatgctaaaaattttgtcacctaagtgtttgggaggctttttcttattaaaggttgggattggtcctgtcatgtggttttagagatactaacagagggctagagaaagcatcttctgcagaggaagcacttatgggaacagtctgtgagattgatgtcctgagaagaccaagatatcaggaatgaggaataggggcctgaggagagaggggaagggtacagagaaaccatctacattccatggaatgtttttaataagtaggcaagaaaaatgccactaatcaaagcattaagtgtgtccagtaatgaagaacatcatataaaatctttccctaaatctaagccagtggccatttttgtgggatcttactaatcacgtgtccttacagaatcattccaagaaccagcccattgctacagctagagtggagaaaaacagagtgactcaaaagccatgggtaccatgatatcagttttgttggttgtatttgtcggtttgttttttcattcatgttgaagtgctttgcaaggcttcaggaaacagagttgtgaggagaaagaagaaaatggctgcccatttcagtaccctttcaaaggtatctctgcctaggaacattcttcagaaatgcaacttcttctatttagaaggtgacctcctgacagcgttcactctcaatatggaggaaaagaccacaacaactgtcctttctcaattacacaaatgctgttaaaatgtgatcaaaccatggcatcactttgctgaaatgtttctgcacagtcctgcctcttagattacagtcagccagaaaaacatacttataaatcatcccttttctgatttttgtagtttggcaattgagagagcaatattgaggttggccggttataaggagtcccacaatagaatacccaacaaagtggctgccaggccttctcagacagccatttgctttgggttttgcttccagacgttgttccatatttttgccccaaatgtttcatggcttataccccattggtttattttatatccatggacctttctttctctgctttcttgacttaaaggttgcagcagtacatctcgtcacctaggaatagattatcaggccttgccaactagtatgcagggatggcactaaaaatggatgtgcatcttctttcacattaactactaacctataagaagttgctctgagcccatttatttaaactctttagttcaccatcagatggacctttctctcacaagctagcttattccaaattatttgtcttattaatcaccagaaaatggtcatatcaaatgttctttcttttttgttctaaaggttgcattttcagttataggggaaaaaatattttctctaagatagaagaagttatttcagtattagctataggtgctacctacctcttggggacatggccctgtttgcgctaaccattacaatgatcttttagaactctgtatccaaagagctacttcgtgacactggccatctgagtcacagatgtgaagtcgatttcactttataactaaccagtcctacatattaagacttctaagtgtccatatgcatcttttttggtataatatataaagtcagcagggactcccctttcccttagggcatactactgtcagtcagaactgcaagatgtgaatgaagctcttaacggcttggagtgtctttctggaagaaattgccttttttttttttttcatgttagcaggtaaaaaatcattcacccaatttgaagcatagaagaaaatagttgctgaggttttttaataaccattcctactatctgtgttcccttagatactcctgtaattcttaatgtgaatagtttgttaatattgctgtaaagtattatattgtatgatttgaagacagactatatgtcattttattatactccatcaatctataatatattagactgatgctttatctaaaatgctttgagtttgtataatatatcttgacaaattttactaccatatgttatgtaataaatgtgtatttttgtacttgcagaaactgctgctaacttttaaagttgtttggttttcaaggcactgataatggatatgtatgaagtccatgctgtctgttaaataaaatgccattctgcagaattaaccatcc

SEQ ID NO: 1339 - DNA, 2623 bp, Homo sapiens
  source 1..2623: mol_type = unassigned DNA; mol_type = unassigned DNA
gttttctgcccccacattcttggaaatgctctacatttttggaaacacctacagtcaaaatgagctttaagcagagcttttgaccttagcagtatcttctgcagacctgtgtcaggctctcacctcccaaaggattggaatgcaccagagctaggggtcgagacaaggccccagcctgtatctcaggctgaaacgtgaaaaccaagttaaggaaaatatggtgaagaagattcttgcatacccctactccagctgagtgcccaggattttctgcgaaatattccaggaagtattttttcatcagatctctatgatcactgggtctctgtaatggatcaaggaaatgatgaagagaaaataaatactgttcaaaggctattagaccagcttccgagagccaatgttgttctcctaaggtatctttttggggtgttacacaacattgagcaacattcctcatccaatcagatgactgcatttaatttagctgtgtgtgtcgctccaagtattctttggcctcctgcttcctccagcccagaactagaaaacgaatttacaaaaaaggtttccctgcttatacaatttctgattgagaattgccttaggatatttggagaagaaatcacttccctcttcagagaggtttcagtgagatgtgacactagagagaatgcctcagatatttcttgctttcaactgaatgactcctcctatgacagcttggaaaatgagctaaatgaggatgttgatgcaccatgcagtgacttggtaaagaaacttggccaggggagcagaagcatggactctgtcttaaccctcagtgactatgatcttgaccagcccgaggtggaaggccttttaaccctaagcgactttgacttggcccattctaaagatgaagatgttcaaatgaaacggcctcttgaatccaagccggtgaacattttagtgtacacaaagatcccactgcgggatcatgccagggccccatctgccatgtgcacacccagctacctgtccacagctgcagcaaatgctgcaaaaagcctgaggcgacaccggcgttgctcagagcccagcatcgactatctggattcaaagctttcctacctcagggagttttatcagaaaaagctacgcaagtccagctgtgatgcaattctttctcaaaaagatgaagactatctgaagcagaatcaacccctccaggaggaaggaaagacatgttttaaacagagtttagtcacaggcactgatgtcagcaagaaaaatgccactactcaaaacactaagaagaaaagcttgtctggtagtgaaggaaatcacgtgaaacttttccctaagtctaagccagtggccatttctgtggcatcttatagtcctatgtcctcacaggatcattccaagaaccagccctttgatgtgaatacatctggatactccccaccacacacagcagatgccctcaagggtccaaggacacatcggcgctgctcagagcccaacatagaagaccagaaccgcaagctgacctatctcaggggaatttattcaaagaaacaacataaaaccagctgtgaagctggtctcttgcatggagaggaggattatctcaaacggcataagtctttgcaaatggaggggcagaagctcattaatcagagtttagtcatggggattgaggtgggcaagagtagtgccacaaaccaaaacactgagaaggttttacccccaagattaaacctttgcccaaggaccagctattccagcttatcctccccaggcacttccccatccggctcatcagtaagctcccaagacagtgctttttctcagatttctgaacactctgtgtttacacccactgagacttcctctccaatagattgcacttttcaggctcagagaaaacgggaagacctttctcctgactttagcaatgccagccatgtttccggaatgcccggtccctcatcagggcaggcttgcagccgcccagcctatacaaagaaggacaccatggagtggcattcacaaatgcattctgtaactcttcatcccagcacatggttgagaaatggtgtggccagtttgaaaaactggtccctcaaaaagaaagcaaaggcagccagaccagaggaagagaaaatagcttctccaaaaggacccttagagccacccccacatgcttctggtgttccagaagccaactcactgcaagaggaacaaaaagacttgcccttaagggcagctgaaggactgtcccctgtgcagtcagcccaaaggtgtagttcttctcccttccaggactcagagagacactgtagctctccattcagcctggtggagagcagacttaagctgtgcatgaagtcacatgaggaaatagagcctggtagtcagagctcttctggttctctgccttgggaaagagcctcagccagctcttggactctagaggatgcgaccagcccagactcagggcctacagtggtctgcgacattgaggacagaaactgctgctaacttttaaagttgtttggttttcaaggcactgataatggatatgtatgaagtccatgctgtctgttaaataaaatgccattctgcagaattaaccatc

SEQ ID NO: 1340 - DNA, 6180 bp, Homo sapiens
  source 1..6180: mol_type = unassigned DNA; mol_type = unassigned DNA
acagcagcgcgctaggcggacgccgcgggaatttgacgctcgaggctcgcggcccctaatgagagtcccagaacacttcccgcccttgacggccagcggcagcgccgccgcctcccgcagagcgcccgcttctccgtttctagagccttagtctctcctcgagcgacctcgcagcctccctcccgtctccatccgccgccggttctgcagcccggctcctccctcagtctaggcgcgcgggctgtagtgggcgatcgcctttccccgacccctcgccgtgcccctgggcctcccgaagtggcctgggcgagcactgactgccctttggcggtgtcagccccaaagtcagggccggcgatgtctgcccgggagcggcagccggcgctgaagaagaaaatgaaaacactagcagaaaggaggaggagcgctccatctcttatcctggataaagccctacaaaaacggcctactaccagggacagtccttctgctagtgttgacacatgcacatttctgtcatcattagtgtgctccaataggactctgctgattgatggccgggcagaactcaaaagaggcctccagaggcaggagcggcatcttttcctattcaatgatctgtttgttgtggccaaaatcaaatataacaataactttaagataaaaaataaaattaaattaactgatatgtggacagcaagctgtgtggatgaagtgggagaaggcaacaccaatgccatgaaatcctttgttttgggctggcccacagtgaactttgtggccactttcagttctccagaacaaaaggacaaatggctctctctccttcagagatacatcaatctagagaaagaaaaggactacccgaagagcattcccctcaaaatcttcgccaaggacattgggaattgtgcctactctaaaactataacagtaatgaattcagatacagcgaatgaagttatcaacatgtcattaccaatgctagggataactggctctgagagagattaccagttgtgggtcaattctggcaaagaagaggctccatacccactcattgggcatgaatatccatatggaattaaaatgagccatcttcgagactctgcactcctgacaccgggatcaaaggactctaccacccctttcaacctccaggagcccttccttatggaacagctcccccgagagatgcagtgccagttcatcctgaagcccagccgcctggctgcagcccagcaactgagtgattcaggtcataagacatttaaaaggagaagatctatcataaactgggccttctggcgaggttctagcactcacctggacaacttgccctcatcgccaacatcacctatgccaggacagctctttggaatttctctgccaaatatttgtgagaatgacaatctgcccaaacctgtcttggatatgcttttctttcttaatcaaaaaggacctctcaccaaaggtatcttcaggcaatcagccaatgtgaaatcctgcagagaactaaaagagaaattgaattctggagtcgaagtacacctagactgtgaatctatttttgtgatagcatctgtcttaaaggattttctgcgaaatattccaggaagtattttttcatcagatctctatgatcactgggtctctgtaatggatcaaggaaatgatgaagagaaaataaatactgttcaaaggctattagaccagcttccgagagccaatgttgttctcctaaggtatctttttggggtgttacacaacattgagcaacattcctcatccaatcagatgactgcatttaatttagctgtgtgtgtcgctccaagtattctttggcctcctgcttcctccagcccagaactagaaaacgaatttacaaaaaaggtttccctgcttatacaatttctgattgagaattgccttaggatatttggagaagaaatcacttccctcttcagagaggtttcagtgagatgtgacactagagagaatgcctcagatatttcttgctttcaactgaatgactcctcctatgacagcttggaaaatgagctaaatgaggatgttgatgcaccatgcagtgacttggtaaagaaacttggccaggggagcagaagcatggactctgtcttaaccctcagtgactatgatcttgaccagcccgaggtggaaggccttttaaccctaagcgactttgacttggcccattctaaagatgaagatgttcaaatgaaacggcctcttgaatccaagccggtgaacattttagtgtacacaaagatcccactgcgggatcatgccagggccccatctgccatgtgcacacccagctacctgtccacagctgcagcaaatgctgcaaaaagcctgaggcgacaccggcgttgctcagagcccagcatcgactatctggattcaaagctttcctacctcagggagttttatcagaaaaagctacgcaagtccagctgtgatgcaattctttctcaaaaagatgaagactatctgaagcagaatcaacccctccaggaggaaggaaagacatgttttaaacagagtttagtcacaggcactgatgtcagcaagaaaaatgccactactcaaaacactaagaagaaaagcttgtctggtagtgaaggaaatcacgtgaaacttttccctaagtctaagccagtggccatttctgtggcatcttatagtcctatgtcctcacaggatcattccaagaaccagccctttgatgtgaatacatctggatactccccaccacacacagcagatgccctcaagggtccaaggacacatcggcgctgctcagagcccaacatagaagaccagaaccgcaagctgacctatctcaggggaatttattcaaagaaacaacataaaaccagctgtgaagctggtctcttgcatggagaggaggattatctcaaacggcataagtctttgcaaatggaggggcagaagctcattaatcagagtttagtcatggggattgaggtgggcaagagtagtgccacaaaccaaaacactgagaaggttttacccccaagattaaacctttgcccaaggaccagctattccagcttatcctccccaggcacttccccatccggctcatcagtaagctcccaagacagtgctttttctcagatttctgaacactctgtgtttacacccactgagacttcctctccaatagattgcacttttcaggctcagagaaaacgggaagacctttctcctgactttagcaatgccagccatgtttccggaatgcccggtccctcatcagggcaggcttgcagccgcccagcctatacaaagaaggacaccatggagtggcattcacaaatgcattctgtaactcttcatcccagcacatggttgagaaatggtgtggccagtttgaaaaactggtccctcaaaaagaaagcaaaggcagccagaccagaggaagagaaaatagcttctccaaaaggacccttagagccacccccacatgcttctggtgttccagaagccaactcactgcaagaggaacaaaaagacttgcccttaagggcagctgaaggactgtcccctgtgcagtcagcccaaaggtgtagttcttctcccttccaggactcagagagacactgtagctctccattcagcctggtggagagcagacttaagctgtgcatgaagtcacatgaggaaatagagcctggtagtcagagctcttctggttctctgccttgggaaagagcctcagccagctcttggactctagaggatgcgaccagcccagactcagggcctacagtggtctgcgacattgaggacaggtatttaaccaaagacatttaagcatagtaagaatctgatgtccacaagaacaggaactgggttaataataatagacaataattattatgacccctttgtataagatacctgggagaggtagcataaggattatcattgctaatacttaggacaacgaaataattctctttattgagactacttgacaaatactttatgctaaaaattttgtcacctaagtgtttgggaggctttttcttattaaaggttgggattggtcctgtcatgtggttttagagatactaacagagggctagagaaagcatcttctgcagaggaagcacttatgggaacagtctgtgagattgatgtcctgagaagaccaagatatcaggaatgaggaataggggcctgaggagagaggggaagggtacagagaaaccatctacattccatggaatgtttttaataagtaggcaagaaaaatgccactaatcaaagcattaagtgtgtccagtaatgaagaacatcatataaaatctttccctaaatctaagccagtggccatttttgtgggatcttactaatcacgtgtccttacagaatcattccaagaaccagcccattgctacagctagagtggagaaaaacagagtgactcaaaagccatgggtaccatgatatcagttttgttggttgtatttgtcggtttgttttttcattcatgttgaagtgctttgcaaggcttcaggaaacagagttgtgaggagaaagaagaaaatggctgcccatttcagtaccctttcaaaggtatctctgcctaggaacattcttcagaaatgcaacttcttctatttagaaggtgacctcctgacagcgttcactctcaatatggaggaaaagaccacaacaactgtcctttctcaattacacaaatgctgttaaaatgtgatcaaaccatggcatcactttgctgaaatgtttctgcacagtcctgcctcttagattacagtcagccagaaaaacatacttataaatcatcccttttctgatttttgtagtttggcaattgagagagcaatattgaggttggccggttataaggagtcccacaatagaatacccaacaaagtggctgccaggccttctcagacagccatttgctttgggttttgcttccagacgttgttccatatttttgccccaaatgtttcatggcttataccccattggtttattttatatccatggacctttctttctctgctttcttgacttaaaggttgcagcagtacatctcgtcacctaggaatagattatcaggccttgccaactagtatgcagggatggcactaaaaatggatgtgcatcttctttcacattaactactaacctataagaagttgctctgagcccatttatttaaactctttagttcaccatcagatggacctttctctcacaagctagcttattccaaattatttgtcttattaatcaccagaaaatggtcatatcaaatgttctttcttttttgttctaaaggttgcattttcagttataggggaaaaaatattttctctaagatagaagaagttatttcagtattagctataggtgctacctacctcttggggacatggccctgtttgcgctaaccattacaatgatcttttagaactctgtatccaaagagctacttcgtgacactggccatctgagtcacagatgtgaagtcgatttcactttataactaaccagtcctacatattaagacttctaagtgtccatatgcatcttttttggtataatatataaagtcagcagggactcccctttcccttagggcatactactgtcagtcagaactgcaagatgtgaatgaagctcttaacggcttggagtgtctttctggaagaaattgccttttttttttttttcatgttagcaggtaaaaaatcattcacccaatttgaagcatagaagaaaatagttgctgaggttttttaataaccattcctactatctgtgttcccttagatactcctgtaattcttaatgtgaatagtttgttaatattgctgtaaagtattatattgtatgatttgaagacagactatatgtcattttattatactccatcaatctataatatattagactgatgctttatctaaaatgctttgagtttgtataatatatcttgacaaattttactaccatatgttatgtaataaatgtgtatttttgtacttgcagaaactgctgctaacttttaaagttgtttggttttcaaggcactgataatggatatgtatgaagtccatgctgtctgttaaataaaatgccattctgcag

SEQ ID NO: 1341 - DNA, 5880 bp, Homo sapiens
  source 1..5880: mol_type = unassigned DNA; mol_type = unassigned DNA
gaggcgcgtgtccgtgcactagaggcccccgtgcgtgacacaggccgatgagctcctgcgggctgcacccacgcggagtcacagaccgaaaagaaaatgaaaacactagcagaaaggaggaggagcgctccatctcttatcctggataaagccctacaaaaacggcctactaccagggacagtccttctgctagtgttgacacatgcacatttctgtcatcattagtgtgctccaataggactctgctgattgatggccgggcagaactcaaaagaggcctccagaggcaggagcggcatcttttcctattcaatgatctgtttgttgtggccaaaatcaaatataacaataactttaagataaaaaataaaattaaattaactgatatgtggacagcaagctgtgtggatgaagtgggagaaggcaacaccaatgccatgaaatcctttgttttgggctggcccacagtgaactttgtggccactttcagttctccagaacaaaaggacaaatggctctctctccttcagagatacatcaatctagagaaagaaaaggactacccgaagagcattcccctcaaaatcttcgccaaggacattgggaattgtgcctactctaaaactataacagtaatgaattcagatacagcgaatgaagttatcaacatgtcattaccaatgctagggataactggctctgagagagattaccagttgtgggtcaattctggcaaagaagaggctccatacccactcattgggcatgaatatccatatggaattaaaatgagccatcttcgagactctgcactcctgacaccgggatcaaaggactctaccacccctttcaacctccaggagcccttccttatggaacagctcccccgagagatgcagtgccagttcatcctgaagcccagccgcctggctgcagcccagcaactgagtgattcaggtcataagacatttaaaaggagaagatctatcataaactgggccttctggcgaggttctagcactcacctggacaacttgccctcatcgccaacatcacctatgccaggacagctctttggaatttctctgccaaatatttgtgagaatgacaatctgcccaaacctgtcttggatatgcttttctttcttaatcaaaaaggacctctcaccaaaggtatcttcaggcaatcagccaatgtgaaatcctgcagagaactaaaagagaaattgaattctggagtcgaagtacacctagactgtgaatctatttttgtgatagcatctgtcttaaaggattttctgcgaaatattccaggaagtattttttcatcagatctctatgatcactgggtctctgtaatggatcaaggaaatgatgaagagaaaataaatactgttcaaaggctattagaccagcttccgagagccaatgttgttctcctaaggtatctttttggggtgttacacaacattgagcaacattcctcatccaatcagatgactgcatttaatttagctgtgtgtgtcgctccaagtattctttggcctcctgcttcctccagcccagaactagaaaacgaatttacaaaaaaggtttccctgcttatacaatttctgattgagaattgccttaggatatttggagaagaaatcacttccctcttcagagaggtttcagtgagatgtgacactagagagaatgcctcagatatttcttgctttcaactgaatgactcctcctatgacagcttggaaaatgagctaaatgaggatgttgatgcaccatgcagtgacttggtaaagaaacttggccaggggagcagaagcatggactctgtcttaaccctcagtgactatgatcttgaccagcccgaggtggaaggccttttaaccctaagcgactttgacttggcccattctaaagatgaagatgttcaaatgaaacggcctcttgaatccaagccggtgaacattttagtgtacacaaagatcccactgcgggatcatgccagggccccatctgccatgtgcacacccagctacctgtccacagctgcagcaaatgctgcaaaaagcctgaggcgacaccggcgttgctcagagcccagcatcgactatctggattcaaagctttcctacctcagggagttttatcagaaaaagctacgcaagtccagctgtgatgcaattctttctcaaaaagatgaagactatctgaagcagaatcaacccctccaggaggaaggaaagacatgttttaaacagagtttagtcacaggcactgatgtcagcaagaaaaatgccactactcaaaacactaagaagaaaagcttgtctggtagtgaaggaaatcacgtgaaacttttccctaagtctaagccagtggccatttctgtggcatcttatagtcctatgtcctcacaggatcattccaagaaccagccctttgatgtgaatacatctggatactccccaccacacacagcagatgccctcaagggtccaaggacacatcggcgctgctcagagcccaacatagaagaccagaaccgcaagctgacctatctcaggggaatttattcaaagaaacaacataaaaccagctgtgaagctggtctcttgcatggagaggaggattatctcaaacggcataagtctttgcaaatggaggggcagaagctcattaatcagagtttagtcatggggattgaggtgggcaagagtagtgccacaaaccaaaacactgagaaggttttacccccaagattaaacctttgcccaaggaccagctattccagcttatcctccccaggcacttccccatccggctcatcagtaagctcccaagacagtgctttttctcagatttctgaacactctgtgtttacacccactgagacttcctctccaatagattgcacttttcaggctcagagaaaacgggaagacctttctcctgactttagcaatgccagccatgtttccggaatgcccggtccctcatcagggcaggcttgcagccgcccagcctatacaaagaaggacaccatggagtggcattcacaaatgcattctgtaactcttcatcccagcacatggttgagaaatggtgtggccagtttgaaaaactggtccctcaaaaagaaagcaaaggcagccagaccagaggaagagaaaatagcttctccaaaaggacccttagagccacccccacatgcttctggtgttccagaagccaactcactgcaagaggaacaaaaagacttgcccttaagggcagctgaaggactgtcccctgtgcagtcagcccaaaggtgtagttcttctcccttccaggactcagagagacactgtagctctccattcagcctggtggagagcagacttaagctgtgcatgaagtcacatgaggaaatagagcctggtagtcagagctcttctggttctctgccttgggaaagagcctcagccagctcttggactctagaggatgcgaccagcccagactcagggcctacagtggtctgcgacattgaggacaggtatttaaccaaagacatttaagcatagtaagaatctgatgtccacaagaacaggaactgggttaataataatagacaataattattatgacccctttgtataagatacctgggagaggtagcataaggattatcattgctaatacttaggacaacgaaataattctctttattgagactacttgacaaatactttatgctaaaaattttgtcacctaagtgtttgggaggctttttcttattaaaggttgggattggtcctgtcatgtggttttagagatactaacagagggctagagaaagcatcttctgcagaggaagcacttatgggaacagtctgtgagattgatgtcctgagaagaccaagatatcaggaatgaggaataggggcctgaggagagaggggaagggtacagagaaaccatctacattccatggaatgtttttaataagtaggcaagaaaaatgccactaatcaaagcattaagtgtgtccagtaatgaagaacatcatataaaatctttccctaaatctaagccagtggccatttttgtgggatcttactaatcacgtgtccttacagaatcattccaagaaccagcccattgctacagctagagtggagaaaaacagagtgactcaaaagccatgggtaccatgatatcagttttgttggttgtatttgtcggtttgttttttcattcatgttgaagtgctttgcaaggcttcaggaaacagagttgtgaggagaaagaagaaaatggctgcccatttcagtaccctttcaaaggtatctctgcctaggaacattcttcagaaatgcaacttcttctatttagaaggtgacctcctgacagcgttcactctcaatatggaggaaaagaccacaacaactgtcctttctcaattacacaaatgctgttaaaatgtgatcaaaccatggcatcactttgctgaaatgtttctgcacagtcctgcctcttagattacagtcagccagaaaaacatacttataaatcatcccttttctgatttttgtagtttggcaattgagagagcaatattgaggttggccggttataaggagtcccacaatagaatacccaacaaagtggctgccaggccttctcagacagccatttgctttgggttttgcttccagacgttgttccatatttttgccccaaatgtttcatggcttataccccattggtttattttatatccatggacctttctttctctgctttcttgacttaaaggttgcagcagtacatctcgtcacctaggaatagattatcaggccttgccaactagtatgcagggatggcactaaaaatggatgtgcatcttctttcacattaactactaacctataagaagttgctctgagcccatttatttaaactctttagttcaccatcagatggacctttctctcacaagctagcttattccaaattatttgtcttattaatcaccagaaaatggtcatatcaaatgttctttcttttttgttctaaaggttgcattttcagttataggggaaaaaatattttctctaagatagaagaagttatttcagtattagctataggtgctacctacctcttggggacatggccctgtttgcgctaaccattacaatgatcttttagaactctgtatccaaagagctacttcgtgacactggccatctgagtcacagatgtgaagtcgatttcactttataactaaccagtcctacatattaagacttctaagtgtccatatgcatcttttttggtataatatataaagtcagcagggactcccctttcccttagggcatactactgtcagtcagaactgcaagatgtgaatgaagctcttaacggcttggagtgtctttctggaagaaattgccttttttttttttttcatgttagcaggtaaaaaatcattcacccaatttgaagcatagaagaaaatagttgctgaggttttttaataaccattcctactatctgtgttcccttagatactcctgtaattcttaatgtgaatagtttgttaatattgctgtaaagtattatattgtatgatttgaagacagactatatgtcattttattatactccatcaatctataatatattagactgatgctttatctaaaatgctttgagtttgtataatatatcttgacaaattttactaccatatgttatgtaataaatgtgtatttttgtacttgcagaaactgctgctaacttttaaagttgtttggttttcaaggcactgataatggatatgtatgaagtccatgctgtctgttaaataaaatgccattctgcag

SEQ ID NO: 1342 - DNA, 6066 bp, Homo sapiens
  source 1..6066: mol_type = unassigned DNA; mol_type = unassigned DNA
gtagccttctcaatagcttagccaaatttcggcgtcctcgctctgtctgcattttccttcattgctctttcacgtttggaatgcccccgtctctgcagcctgcagacagcggaaaccgcgggtgcaaatgtgcaggggccgctgacatgaccggctgcagaagcccactcagggttacccgaacaggctagcgttcgggattgcacaagagccaaatttgcctgtgaaataaagatagtagtatctacccggatgacattttggattataataaataagaaaatgaaaacactagcagaaaggaggaggagcgctccatctcttatcctggataaagccctacaaaaacggcctactaccagggacagtccttctgctagtgttgacacatgcacatttctgtcatcattagtgtgctccaataggactctgctgattgatggccgggcagaactcaaaagaggcctccagaggcaggagcggcatcttttcctattcaatgatctgtttgttgtggccaaaatcaaatataacaataactttaagataaaaaataaaattaaattaactgatatgtggacagcaagctgtgtggatgaagtgggagaaggcaacaccaatgccatgaaatcctttgttttgggctggcccacagtgaactttgtggccactttcagttctccagaacaaaaggacaaatggctctctctccttcagagatacatcaatctagagaaagaaaaggactacccgaagagcattcccctcaaaatcttcgccaaggacattgggaattgtgcctactctaaaactataacagtaatgaattcagatacagcgaatgaagttatcaacatgtcattaccaatgctagggataactggctctgagagagattaccagttgtgggtcaattctggcaaagaagaggctccatacccactcattgggcatgaatatccatatggaattaaaatgagccatcttcgagactctgcactcctgacaccgggatcaaaggactctaccacccctttcaacctccaggagcccttccttatggaacagctcccccgagagatgcagtgccagttcatcctgaagcccagccgcctggctgcagcccagcaactgagtgattcaggtcataagacatttaaaaggagaagatctatcataaactgggccttctggcgaggttctagcactcacctggacaacttgccctcatcgccaacatcacctatgccaggacagctctttggaatttctctgccaaatatttgtgagaatgacaatctgcccaaacctgtcttggatatgcttttctttcttaatcaaaaaggacctctcaccaaaggtatcttcaggcaatcagccaatgtgaaatcctgcagagaactaaaagagaaattgaattctggagtcgaagtacacctagactgtgaatctatttttgtgatagcatctgtcttaaaggattttctgcgaaatattccaggaagtattttttcatcagatctctatgatcactgggtctctgtaatggatcaaggaaatgatgaagagaaaataaatactgttcaaaggctattagaccagcttccgagagccaatgttgttctcctaaggtatctttttggggtgttacacaacattgagcaacattcctcatccaatcagatgactgcatttaatttagctgtgtgtgtcgctccaagtattctttggcctcctgcttcctccagcccagaactagaaaacgaatttacaaaaaaggtttccctgcttatacaatttctgattgagaattgccttaggatatttggagaagaaatcacttccctcttcagagaggtttcagtgagatgtgacactagagagaatgcctcagatatttcttgctttcaactgaatgactcctcctatgacagcttggaaaatgagctaaatgaggatgttgatgcaccatgcagtgacttggtaaagaaacttggccaggggagcagaagcatggactctgtcttaaccctcagtgactatgatcttgaccagcccgaggtggaaggccttttaaccctaagcgactttgacttggcccattctaaagatgaagatgttcaaatgaaacggcctcttgaatccaagccggtgaacattttagtgtacacaaagatcccactgcgggatcatgccagggccccatctgccatgtgcacacccagctacctgtccacagctgcagcaaatgctgcaaaaagcctgaggcgacaccggcgttgctcagagcccagcatcgactatctggattcaaagctttcctacctcagggagttttatcagaaaaagctacgcaagtccagctgtgatgcaattctttctcaaaaagatgaagactatctgaagcagaatcaacccctccaggaggaaggaaagacatgttttaaacagagtttagtcacaggcactgatgtcagcaagaaaaatgccactactcaaaacactaagaagaaaagcttgtctggtagtgaaggaaatcacgtgaaacttttccctaagtctaagccagtggccatttctgtggcatcttatagtcctatgtcctcacaggatcattccaagaaccagccctttgatgtgaatacatctggatactccccaccacacacagcagatgccctcaagggtccaaggacacatcggcgctgctcagagcccaacatagaagaccagaaccgcaagctgacctatctcaggggaatttattcaaagaaacaacataaaaccagctgtgaagctggtctcttgcatggagaggaggattatctcaaacggcataagtctttgcaaatggaggggcagaagctcattaatcagagtttagtcatggggattgaggtgggcaagagtagtgccacaaaccaaaacactgagaaggttttacccccaagattaaacctttgcccaaggaccagctattccagcttatcctccccaggcacttccccatccggctcatcagtaagctcccaagacagtgctttttctcagatttctgaacactctgtgtttacacccactgagacttcctctccaatagattgcacttttcaggctcagagaaaacgggaagacctttctcctgactttagcaatgccagccatgtttccggaatgcccggtccctcatcagggcaggcttgcagccgcccagcctatacaaagaaggacaccatggagtggcattcacaaatgcattctgtaactcttcatcccagcacatggttgagaaatggtgtggccagtttgaaaaactggtccctcaaaaagaaagcaaaggcagccagaccagaggaagagaaaatagcttctccaaaaggacccttagagccacccccacatgcttctggtgttccagaagccaactcactgcaagaggaacaaaaagacttgcccttaagggcagctgaaggactgtcccctgtgcagtcagcccaaaggtgtagttcttctcccttccaggactcagagagacactgtagctctccattcagcctggtggagagcagacttaagctgtgcatgaagtcacatgaggaaatagagcctggtagtcagagctcttctggttctctgccttgggaaagagcctcagccagctcttggactctagaggatgcgaccagcccagactcagggcctacagtggtctgcgacattgaggacaggtatttaaccaaagacatttaagcatagtaagaatctgatgtccacaagaacaggaactgggttaataataatagacaataattattatgacccctttgtataagatacctgggagaggtagcataaggattatcattgctaatacttaggacaacgaaataattctctttattgagactacttgacaaatactttatgctaaaaattttgtcacctaagtgtttgggaggctttttcttattaaaggttgggattggtcctgtcatgtggttttagagatactaacagagggctagagaaagcatcttctgcagaggaagcacttatgggaacagtctgtgagattgatgtcctgagaagaccaagatatcaggaatgaggaataggggcctgaggagagaggggaagggtacagagaaaccatctacattccatggaatgtttttaataagtaggcaagaaaaatgccactaatcaaagcattaagtgtgtccagtaatgaagaacatcatataaaatctttccctaaatctaagccagtggccatttttgtgggatcttactaatcacgtgtccttacagaatcattccaagaaccagcccattgctacagctagagtggagaaaaacagagtgactcaaaagccatgggtaccatgatatcagttttgttggttgtatttgtcggtttgttttttcattcatgttgaagtgctttgcaaggcttcaggaaacagagttgtgaggagaaagaagaaaatggctgcccatttcagtaccctttcaaaggtatctctgcctaggaacattcttcagaaatgcaacttcttctatttagaaggtgacctcctgacagcgttcactctcaatatggaggaaaagaccacaacaactgtcctttctcaattacacaaatgctgttaaaatgtgatcaaaccatggcatcactttgctgaaatgtttctgcacagtcctgcctcttagattacagtcagccagaaaaacatacttataaatcatcccttttctgatttttgtagtttggcaattgagagagcaatattgaggttggccggttataaggagtcccacaatagaatacccaacaaagtggctgccaggccttctcagacagccatttgctttgggttttgcttccagacgttgttccatatttttgccccaaatgtttcatggcttataccccattggtttattttatatccatggacctttctttctctgctttcttgacttaaaggttgcagcagtacatctcgtcacctaggaatagattatcaggccttgccaactagtatgcagggatggcactaaaaatggatgtgcatcttctttcacattaactactaacctataagaagttgctctgagcccatttatttaaactctttagttcaccatcagatggacctttctctcacaagctagcttattccaaattatttgtcttattaatcaccagaaaatggtcatatcaaatgttctttcttttttgttctaaaggttgcattttcagttataggggaaaaaatattttctctaagatagaagaagttatttcagtattagctataggtgctacctacctcttggggacatggccctgtttgcgctaaccattacaatgatcttttagaactctgtatccaaagagctacttcgtgacactggccatctgagtcacagatgtgaagtcgatttcactttataactaaccagtcctacatattaagacttctaagtgtccatatgcatcttttttggtataatatataaagtcagcagggactcccctttcccttagggcatactactgtcagtcagaactgcaagatgtgaatgaagctcttaacggcttggagtgtctttctggaagaaattgccttttttttttttttcatgttagcaggtaaaaaatcattcacccaatttgaagcatagaagaaaatagttgctgaggttttttaataaccattcctactatctgtgttcccttagatactcctgtaattcttaatgtgaatagtttgttaatattgctgtaaagtattatattgtatgatttgaagacagactatatgtcattttattatactccatcaatctataatatattagactgatgctttatctaaaatgctttgagtttgtataatatatcttgacaaattttactaccatatgttatgtaataaatgtgtatttttgtacttgcagaaactgctgctaacttttaaagttgtttggttttcaaggcactgataatggatatgtatgaagtccatgctgtctgttaaataaaatgccattctgcag

SEQ ID NO: 1343 - DNA, 5998 bp, Homo sapiens
  source 1..5998: mol_type = unassigned DNA; mol_type = unassigned DNA
gtagccttctcaatagcttagccaaatttcggcgtcctcgctctgtctgcattttccttcattgctctttcacgtttggaatgcccccgtctctgcagcctgcagacagcggaaaccgcgggtgcaaatgtgcaggggccgctgacatgaccggctgcagaagcccactcagggttacccgaacaggctagcgttcgggattgcacaagagaaaatgaaaacactagcagaaaggaggaggagcgctccatctcttatcctggataaagccctacaaaaacggcctactaccagggacagtccttctgctagtgttgacacatgcacatttctgtcatcattagtgtgctccaataggactctgctgattgatggccgggcagaactcaaaagaggcctccagaggcaggagcggcatcttttcctattcaatgatctgtttgttgtggccaaaatcaaatataacaataactttaagataaaaaataaaattaaattaactgatatgtggacagcaagctgtgtggatgaagtgggagaaggcaacaccaatgccatgaaatcctttgttttgggctggcccacagtgaactttgtggccactttcagttctccagaacaaaaggacaaatggctctctctccttcagagatacatcaatctagagaaagaaaaggactacccgaagagcattcccctcaaaatcttcgccaaggacattgggaattgtgcctactctaaaactataacagtaatgaattcagatacagcgaatgaagttatcaacatgtcattaccaatgctagggataactggctctgagagagattaccagttgtgggtcaattctggcaaagaagaggctccatacccactcattgggcatgaatatccatatggaattaaaatgagccatcttcgagactctgcactcctgacaccgggatcaaaggactctaccacccctttcaacctccaggagcccttccttatggaacagctcccccgagagatgcagtgccagttcatcctgaagcccagccgcctggctgcagcccagcaactgagtgattcaggtcataagacatttaaaaggagaagatctatcataaactgggccttctggcgaggttctagcactcacctggacaacttgccctcatcgccaacatcacctatgccaggacagctctttggaatttctctgccaaatatttgtgagaatgacaatctgcccaaacctgtcttggatatgcttttctttcttaatcaaaaaggacctctcaccaaaggtatcttcaggcaatcagccaatgtgaaatcctgcagagaactaaaagagaaattgaattctggagtcgaagtacacctagactgtgaatctatttttgtgatagcatctgtcttaaaggattttctgcgaaatattccaggaagtattttttcatcagatctctatgatcactgggtctctgtaatggatcaaggaaatgatgaagagaaaataaatactgttcaaaggctattagaccagcttccgagagccaatgttgttctcctaaggtatctttttggggtgttacacaacattgagcaacattcctcatccaatcagatgactgcatttaatttagctgtgtgtgtcgctccaagtattctttggcctcctgcttcctccagcccagaactagaaaacgaatttacaaaaaaggtttccctgcttatacaatttctgattgagaattgccttaggatatttggagaagaaatcacttccctcttcagagaggtttcagtgagatgtgacactagagagaatgcctcagatatttcttgctttcaactgaatgactcctcctatgacagcttggaaaatgagctaaatgaggatgttgatgcaccatgcagtgacttggtaaagaaacttggccaggggagcagaagcatggactctgtcttaaccctcagtgactatgatcttgaccagcccgaggtggaaggccttttaaccctaagcgactttgacttggcccattctaaagatgaagatgttcaaatgaaacggcctcttgaatccaagccggtgaacattttagtgtacacaaagatcccactgcgggatcatgccagggccccatctgccatgtgcacacccagctacctgtccacagctgcagcaaatgctgcaaaaagcctgaggcgacaccggcgttgctcagagcccagcatcgactatctggattcaaagctttcctacctcagggagttttatcagaaaaagctacgcaagtccagctgtgatgcaattctttctcaaaaagatgaagactatctgaagcagaatcaacccctccaggaggaaggaaagacatgttttaaacagagtttagtcacaggcactgatgtcagcaagaaaaatgccactactcaaaacactaagaagaaaagcttgtctggtagtgaaggaaatcacgtgaaacttttccctaagtctaagccagtggccatttctgtggcatcttatagtcctatgtcctcacaggatcattccaagaaccagccctttgatgtgaatacatctggatactccccaccacacacagcagatgccctcaagggtccaaggacacatcggcgctgctcagagcccaacatagaagaccagaaccgcaagctgacctatctcaggggaatttattcaaagaaacaacataaaaccagctgtgaagctggtctcttgcatggagaggaggattatctcaaacggcataagtctttgcaaatggaggggcagaagctcattaatcagagtttagtcatggggattgaggtgggcaagagtagtgccacaaaccaaaacactgagaaggttttacccccaagattaaacctttgcccaaggaccagctattccagcttatcctccccaggcacttccccatccggctcatcagtaagctcccaagacagtgctttttctcagatttctgaacactctgtgtttacacccactgagacttcctctccaatagattgcacttttcaggctcagagaaaacgggaagacctttctcctgactttagcaatgccagccatgtttccggaatgcccggtccctcatcagggcaggcttgcagccgcccagcctatacaaagaaggacaccatggagtggcattcacaaatgcattctgtaactcttcatcccagcacatggttgagaaatggtgtggccagtttgaaaaactggtccctcaaaaagaaagcaaaggcagccagaccagaggaagagaaaatagcttctccaaaaggacccttagagccacccccacatgcttctggtgttccagaagccaactcactgcaagaggaacaaaaagacttgcccttaagggcagctgaaggactgtcccctgtgcagtcagcccaaaggtgtagttcttctcccttccaggactcagagagacactgtagctctccattcagcctggtggagagcagacttaagctgtgcatgaagtcacatgaggaaatagagcctggtagtcagagctcttctggttctctgccttgggaaagagcctcagccagctcttggactctagaggatgcgaccagcccagactcagggcctacagtggtctgcgacattgaggacaggtatttaaccaaagacatttaagcatagtaagaatctgatgtccacaagaacaggaactgggttaataataatagacaataattattatgacccctttgtataagatacctgggagaggtagcataaggattatcattgctaatacttaggacaacgaaataattctctttattgagactacttgacaaatactttatgctaaaaattttgtcacctaagtgtttgggaggctttttcttattaaaggttgggattggtcctgtcatgtggttttagagatactaacagagggctagagaaagcatcttctgcagaggaagcacttatgggaacagtctgtgagattgatgtcctgagaagaccaagatatcaggaatgaggaataggggcctgaggagagaggggaagggtacagagaaaccatctacattccatggaatgtttttaataagtaggcaagaaaaatgccactaatcaaagcattaagtgtgtccagtaatgaagaacatcatataaaatctttccctaaatctaagccagtggccatttttgtgggatcttactaatcacgtgtccttacagaatcattccaagaaccagcccattgctacagctagagtggagaaaaacagagtgactcaaaagccatgggtaccatgatatcagttttgttggttgtatttgtcggtttgttttttcattcatgttgaagtgctttgcaaggcttcaggaaacagagttgtgaggagaaagaagaaaatggctgcccatttcagtaccctttcaaaggtatctctgcctaggaacattcttcagaaatgcaacttcttctatttagaaggtgacctcctgacagcgttcactctcaatatggaggaaaagaccacaacaactgtcctttctcaattacacaaatgctgttaaaatgtgatcaaaccatggcatcactttgctgaaatgtttctgcacagtcctgcctcttagattacagtcagccagaaaaacatacttataaatcatcccttttctgatttttgtagtttggcaattgagagagcaatattgaggttggccggttataaggagtcccacaatagaatacccaacaaagtggctgccaggccttctcagacagccatttgctttgggttttgcttccagacgttgttccatatttttgccccaaatgtttcatggcttataccccattggtttattttatatccatggacctttctttctctgctttcttgacttaaaggttgcagcagtacatctcgtcacctaggaatagattatcaggccttgccaactagtatgcagggatggcactaaaaatggatgtgcatcttctttcacattaactactaacctataagaagttgctctgagcccatttatttaaactctttagttcaccatcagatggacctttctctcacaagctagcttattccaaattatttgtcttattaatcaccagaaaatggtcatatcaaatgttctttcttttttgttctaaaggttgcattttcagttataggggaaaaaatattttctctaagatagaagaagttatttcagtattagctataggtgctacctacctcttggggacatggccctgtttgcgctaaccattacaatgatcttttagaactctgtatccaaagagctacttcgtgacactggccatctgagtcacagatgtgaagtcgatttcactttataactaaccagtcctacatattaagacttctaagtgtccatatgcatcttttttggtataatatataaagtcagcagggactcccctttcccttagggcatactactgtcagtcagaactgcaagatgtgaatgaagctcttaacggcttggagtgtctttctggaagaaattgccttttttttttttttcatgttagcaggtaaaaaatcattcacccaatttgaagcatagaagaaaatagttgctgaggttttttaataaccattcctactatctgtgttcccttagatactcctgtaattcttaatgtgaatagtttgttaatattgctgtaaagtattatattgtatgatttgaagacagactatatgtcattttattatactccatcaatctataatatattagactgatgctttatctaaaatgctttgagtttgtataatatatcttgacaaattttactaccatatgttatgtaataaatgtgtatttttgtacttgcagaaactgctgctaacttttaaagttgtttggttttcaaggcactgataatggatatgtatgaagtccatgctgtctgttaaataaaatgccattctgcag

SEQ ID NO: 1344 - DNA, 2751 bp, Homo sapiens
  source 1..2751: mol_type = unassigned DNA; mol_type = unassigned DNA
ggactgccccgccctggtccagtgattgatcagcagtgattactgaggctttaatggtccgcttggatgggaattaattctgggatggataaataatgcatcgaggtttatgtagtccaaggcgagccgtccgtccggagccaggagaggtagccgagggagcctgacgggtgacgccagcggccacggggccccgaacgagcaggacatgaggggcgactaggcgcgaggacgagcaaaagcaagtggatgacagcatgaacggccctgcggggctggccggacggctgcaagaacatgctgagcccaaagatcaggcaggccaggagggcccgctccaaaagcctagtgatgggggagcagagccggagccctgggcggatgccgtgccctcacaggctgggccccgtgctgaaggcgggctggctgaagaagcagaggagcatcatgaagaactggcagcagcgctggtttgtgctgcgtggggatcagcttttctactacaaggacaaagatgagatcaagccccagggatttatttctctacaagggacacaggtgactgaacttcctcctggccccgaggacccagggaagcacctctttgagatcagcccaggtggtgccggggagcgggagaaggtgccggccaaccccgaggcgctcctgctcatggccagctcccagcgtgacatggaggactgggtgcaggccatccgccgagtcatctgggccccgctgggcggagggatctttgggcagcgcctagaggaaacagtccaccacgagcggaagtatggcccccgcctggcgcccctgctggtggagcagtgtgtggacttcatccgggagcgcgggctcactgaggaggggctgttccgcatgccaggccaggccaacctggtgagggacctgcaggattccttcgactgtggggagaagccactgtttgacagcacaacagacgtgcacacggtggcctccctgctgaagctgtacctgcgggagctccccgagcccgtggtccccttcgccaggtacgaggacttcctcagctgcgcccagctgctcaccaaggacgagggggagggcactctggagttggctaaacaagtgagcaaccttcctcaggcaaattacaacctgctcagatacatctgcaagtttctggatgaagttcaggcatactcaaatgtcaacaagatgagtgtccagaatctggcaaccgtttttggacctaacattctgcggccacaggtagaggacccagtaaccatcatggaaggcacttccctcgtccagcacctgatgaccgtcctcatccgcaaacacagccagctcttcacggcaccggtcccggaagggcccacctccccgcgcgggggcctgcaatgcgcagtggggtggggctccgaggaggtcaccagggacagccaaggagagcccggcggccccggcctgcccgcgcacaggacctcttccctggacggggcggccgtggcggtgctctccagaacagcccccacggggccggggagccggtgcagccctgggaagaaggtgcagaccctgcccagttggaagtcctccttccggcagccgaggtccctatcgggaagcccgaaggggggcggctcatccctggaggtgcccatcatctcctccggcgggaactggcttatgaacgggctgtcctccctgcgcggacaccgccgggcctcgtcgggagaccggctcaaggactcgggctccgtgcagagactctccacctacgacaatgtgcccgcgccgggcctggtccccggcatacccagcgtggccagtatggcgtggtccggggcctcgtccagcgagtcgtcggtggggggctcactcagcagctgcacggcctgccgcgccagcgactcgtctgcccgcagttccctgcacaccgactgggccctggagccctccccgctccccagcagcagcgaggaccccaagtccctggacctggaccacagcatggacgaggcgggcgcgggtgccagcaacagcgagcccagcgagccggacagccccacccgggaacacgcgcgccgctccgaggccttacaggggctggtcactgagctcagggccgagctgtgccgccagcggactgagtacgagaggagtgtgaaaagaatcgaagaagggagtgctgacctgagaaaacgaatgtcccggttagaagaagaactggaccaggaaaagaaaaaatacatcatgctggaaataaagctgcggaactctgaacgggcgcgggaggatgcggagaggaggaaccagctgttgcagagggaaatggaggagtttttttcgaccctaggaagcttgactgttggggcaaaaggtgccagggccccaaagtaaaaggaatggcagagctcacttctgtaccacgtctgctggtctccagccttgtatggagttagaagcgtctgtatctctggagcagccaggcgctctggagccagctggagagagagagatcctgatacctctgtggggactgtggggacttttgggaccccacacactccaggtgggatcagatgctgctccaaccatgcagttcctggtgagggtcagaaggggacggtaccaagagtagcgcttagcccttacccaggaaatatccttcatggccacagaaatggagggcgcccaggatccaggcagccaccgggaacagtcagctttctttattaaatgtgctcacaaagcatg

SEQ ID NO: 1345 - DNA, 1951 bp, Homo sapiens
  source 1..1951: mol_type = unassigned DNA; mol_type = unassigned DNA
atgtgtgtgcccccacacaggaaagatggctctattccctgtcccagagccctatgctcccagagtgtggacattcaggcatggcagttgtcagcagcacagaggggtgacgtggggcagccgagagagttctggcatctcaggtcccaggttccagttccaacctgccacctgctcaccgtgcagccttggtgcctgcttcctcaccccaccccagctggagggcgtgagcgcaggcacagtgcttcctccctgcttgcggctctgtgcctgaggaaggcggttctgcggccccatcctgctgtcctgcctggagttggagggtgtgtggtcctttcctctgggcggatgaaggctcccttgaggggcggcctggctctggggacagggccagctcccacgaagctgcagcttctccatgactggcagagcgagcctgggccgagtggctggcagcaaggcccttctccgcctctcttcccggcaggcacttccctcgtccagcacctgatgaccgtcctcatccgcaaacacagccagctcttcacggcaccggtcccggaagggcccacctccccgcgcgggggcctgcaatgcgcagtggggtggggctccgaggaggtcaccagggacagccaaggagagcccggcggccccggcctgcccgcgcacaggacctcttccctggacggggcggccgtggcggtgctctccagaacagcccccacggggccggggagccggtgcagccctgggaagaaggtgcagaccctgcccagttggaagtcctccttccggcagccgaggtccctatcgggaagcccgaaggggggcggctcatccctggaggtgcccatcatctcctccggcgggaactggcttatgaacgggctgtcctccctgcgcggacaccgccgggcctcgtcgggagaccggctcaaggactcgggctccgtgcagagactctccacctacgacaatgtgcccgcgccgggcctggtccccggcatacccagcgtggccagtatggcgtggtccggggcctcgtccagcgagtcgtcggtggggggctcactcagcagctgcacggcctgccgcgccagcgactcgtctgcccgcagttccctgcacaccgactgggccctggagccctccccgctccccagcagcagcgaggaccccaagtccctggacctggaccacagcatggacgaggcgggcgcgggtgccagcaacagcgagcccagcgagccggacagccccacccgggaacacgcgcgccgctccgaggccttacaggggctggtcactgagctcagggccgagctgtgccgccagcggactgagtacgagaggagtgtgaaaagaatcgaagaagggagtgctgacctgagaaaacgaatgtcccggttagaagaagaactggaccaggaaaagaaaaaatacatcatgctggaaataaagctgcggaactctgaacgggcgcgggaggatgcggagaggaggaaccagctgttgcagagggaaatggaggagtttttttcgaccctaggaagcttgactgttggggcaaaaggtgccagggccccaaagtaaaaggaatggcagagctcacttctgtaccacgtctgctggtctccagccttgtatggagttagaagcgtctgtatctctggagcagccaggcgctctggagccagctggagagagagagatcctgatacctctgtggggactgtggggacttttgggaccccacacactccaggtgggatcagatgctgctccaaccatgcagttcctggtgagggtcagaaggggacggtaccaagagtagcgcttagcccttacccaggaaatatccttcatggccacagaaatggagggcgcccaggatccaggcagccaccgggaacagtcagctttctttattaaatgtgctcacaaagca

SEQ ID NO: 1346 - DNA, 2107 bp, Homo sapiens
  source 1..2107: mol_type = unassigned DNA; mol_type = unassigned DNA
cgcgggccggcggtcccgcgcaccctgcgcccagctgggcactgcccgtgggccggacctcggccgcgccgccccggggcgcaggcggcaggcggggagaggagccgagcggcggggccgcgggcggctgccatggggctgtgctgctgcaaggactggaggggacacctgcgagcgcccaaaggtggtgccggggagcgggagaaggtgccggccaaccccgaggcgctcctgctcatggccagctcccagcgtgacatggaggactgggtgcaggccatccgccgagtcatctgggccccgctgggcggagggatctttgggcagcgcctagaggaaacagtccaccacgagcggaagtatggcccccgcctggcgcccctgctggtggagcagtgtgtggacttcatccgggagcgcgggctcactgaggaggggctgttccgcatgccaggccaggccaacctggtgagggacctgcaggattccttcgactgtggggagaagccactgtttgacaggtttctggatgaagttcaggcatactcaaatgtcaacaagatgagtgtccagaatctggcaaccgtttttggacctaacattctgcggccacaggtagaggacccagtaaccatcatggaaggcacttccctcgtccagcacctgatgaccgtcctcatccgcaaacacagccagctcttcacggcaccggtcccggaagggcccacctccccgcgcgggggcctgcaatgcgcagtggggtggggctccgaggaggtcaccagggacagccaaggagagcccggcggccccggcctgcccgcgcacaggacctcttccctggacggggcggccgtggcggtgctctccagaacagcccccacggggccggggagccggtgcagccctgggaagaaggtgcagaccctgcccagttggaagtcctccttccggcagccgaggtccctatcgggaagcccgaaggggggcggctcatccctggaggtgcccatcatctcctccggcgggaactggcttatgaacgggctgtcctccctgcgcggacaccgccgggcctcgtcgggagaccggctcaaggactcgggctccgtgcagagactctccacctacgacaatgtgcccgcgccgggcctggtccccggcatacccagcgtggccagtatggcgtggtccggggcctcgtccagcgagtcgtcggtggggggctcactcagcagctgcacggcctgccgcgccagcgactcgtctgcccgcagttccctgcacaccgactgggccctggagccctccccgctccccagcagcagcgaggaccccaagtccctggacctggaccacagcatggacgaggcgggcgcgggtgccagcaacagcgagcccagcgagccggacagccccacccgggaacacgcgcgccgctccgaggccttacaggggctggtcactgagctcagggccgagctgtgccgccagcggactgagtacgagaggagtgtgaaaagaatcgaagaagggagtgctgacctgagaaaacgaatgtcccggttagaagaagaactggaccaggaaaagaaaaaatacatcatgctggaaataaagctgcggaactctgaacgggcgcgggaggatgcggagaggaggaaccagctgttgcagagggaaatggaggagtttttttcgaccctaggaagcttgactgttggggcaaaaggtgccagggccccaaagtaaaaggaatggcagagctcacttctgtaccacgtctgctggtctccagccttgtatggagttagaagcgtctgtatctctggagcagccaggcgctctggagccagctggagagagagagatcctgatacctctgtggggactgtggggacttttgggaccccacacactccaggtgggatcagatgctgctccaaccatgcagttcctggtgagggtcagaaggggacggtaccaagagtagcgcttagcccttacccaggaaatatccttcatggccacagaaatggagggcgcccaggatccaggcagccaccgggaacagtcagctttctttattaaatgtgctcacaaagca

SEQ ID NO: 1347 - DNA, 2380 bp, Homo sapiens
  source 1..2380: mol_type = unassigned DNA; mol_type = unassigned DNA
gatgctccaaatatccctacaaagtactttattattcctgtttcacagacaaggaaactggggcacagacaggttgaacaatgttcctgtagctgagccaggatttgaacccagggatttatttctctacaagggacacaggtgactgaacttcctcctggccccgaggacccagggaagcacctctttgagatcagcccaggtggtgccggggagcgggagaaggtgccggccaaccccgaggcgctcctgctcatggccagctcccagcgtgacatggaggactgggtgcaggccatccgccgagtcatctgggccccgctgggcggaggtactgcccgtagatcgcatgcccaccctctagaacccttgcctccagggatctttgggcagcgcctagaggaaacagtccaccacgagcggaagtatggcccccgcctggcgcccctgctggtggagcagtgtgtggacttcatccgggagcgcgggctcactgaggaggggctgttccgcatgccaggccaggccaacctggtgagggacctgcaggattccttcgactgtggggagaagccactgtttgacagcacaacagacgtgcacacggtggcctccctgctgaagctgtacctgcgggagctccccgagcccgtggtccccttcgccaggtacgaggacttcctcagctgcgcccagctgctcaccaaggacgagggggagggcactctggagttggctaaacaagtgagcaaccttcctcaggcaaattacaacctgctcagatacatctgcaagtttctggatgaagttcaggcatactcaaatgtcaacaagatgagtgtccagaatctggcaaccgtttttggacctaacattctgcggccacaggtagaggacccagtaaccatcatggaaggcacttccctcgtccagcacctgatgaccgtcctcatccgcaaacacagccagctcttcacggcaccggtcccggaagggcccacctccccgcgcgggggcctgcaatgcgcagtggggtggggctccgaggaggtcaccagggacagccaaggagagcccggcggccccggcctgcccgcgcacaggacctcttccctggacggggcggccgtggcggtgctctccagaacagcccccacggggccggggagccggtgcagccctgggaagaaggtgcagaccctgcccagttggaagtcctccttccggcagccgaggtccctatcgggaagcccgaaggggggcggctcatccctggaggtgcccatcatctcctccggcgggaactggcttatgaacgggctgtcctccctgcgcggacaccgccgggcctcgtcgggagaccggctcaaggactcgggctccgtgcagagactctccacctacgacaatgtgcccgcgccgggcctggtccccggcatacccagcgtggccagtatggcgtggtccggggcctcgtccagcgagtcgtcggtggggggctcactcagcagctgcacggcctgccgcgccagcgactcgtctgcccgcagttccctgcacaccgactgggccctggagccctccccgctccccagcagcagcgaggaccccaagtccctggacctggaccacagcatggacgaggcgggcgcgggtgccagcaacagcgagcccagcgagccggacagccccacccgggaacacgcgcgccgctccgaggccttacaggggctggtcactgagctcagggccgagctgtgccgccagcggactgagtacgagaggagtgtgaaaagaatcgaagaagggagtgctgacctgagaaaacgaatgtcccggttagaagaagaactggaccaggaaaagaaaaaatacatcatgctggaaataaagctgcggaactctgaacgggcgcgggaggatgcggagaggaggaaccagctgttgcagagggaaatggaggagtttttttcgaccctaggaagcttgactgttggggcaaaaggtgccagggccccaaagtaaaaggaatggcagagctcacttctgtaccacgtctgctggtctccagccttgtatggagttagaagcgtctgtatctctggagcagccaggcgctctggagccagctggagagagagagatcctgatacctctgtggggactgtggggacttttgggaccccacacactccaggtgggatcagatgctgctccaaccatgcagttcctggtgagggtcagaaggggacggtaccaagagtagcgcttagcccttacccaggaaatatccttcatggccacagaaatggagggcgcccaggatccaggcagccaccgggaacagtcagctttctttattaaatgtgctcacaaagca

SEQ ID NO: 1348 - DNA, 2340 bp, Homo sapiens
  source 1..2340: mol_type = unassigned DNA; mol_type = unassigned DNA
aaaaggcctcagcctgatgcccacaggcagagcacacaggcagccgagtggccgcagccctgcagtggaggagtgcctcgtgcacctggtggttttctgcaccccaacaggtgtgtctggccactgctcctctcactgcagcccccgctgctccacaccatgcccttctggcccatcaggtgtctgaagaggagcaggcgtatgcccaggggtggtgccggggagcgggagaaggtgccggccaaccccgaggcgctcctgctcatggccagctcccagcgtgacatggaggactgggtgcaggccatccgccgagtcatctgggccccgctgggcggagggatctttgggcagcgcctagaggaaacagtccaccacgagcggaagtatggcccccgcctggcgcccctgctggtggagcagtgtgtggacttcatccgggagcgcgggctcactgaggaggggctgttccgcatgccaggccaggccaacctggtgagggacctgcaggattccttcgactgtggggagaagccactgtttgacagcacaacagacgtgcacacggtggcctccctgctgaagctgtacctgcgggagctccccgagcccgtggtccccttcgccaggtacgaggacttcctcagctgcgcccagctgctcaccaaggacgagggggagggcactctggagttggctaaacaagtgagcaaccttcctcaggcaaattacaacctgctcagatacatctgcaagtttctggatgaagttcaggcatactcaaatgtcaacaagatgagtgtccagaatctggcaaccgtttttggacctaacattctgcggccacaggtagaggacccagtaaccatcatggaaggcacttccctcgtccagcacctgatgaccgtcctcatccgcaaacacagccagctcttcacggcaccggtcccggaagggcccacctccccgcgcgggggcctgcaatgcgcagtggggtggggctccgaggaggtcaccagggacagccaaggagagcccggcggccccggcctgcccgcgcacaggacctcttccctggacggggcggccgtggcggtgctctccagaacagcccccacggggccggggagccggtgcagccctgggaagaaggtgcagaccctgcccagttggaagtcctccttccggcagccgaggtccctatcgggaagcccgaaggggggcggctcatccctggaggtgcccatcatctcctccggcgggaactggcttatgaacgggctgtcctccctgcgcggacaccgccgggcctcgtcgggagaccggctcaaggactcgggctccgtgcagagactctccacctacgacaatgtgcccgcgccgggcctggtccccggcatacccagcgtggccagtatggcgtggtccggggcctcgtccagcgagtcgtcggtggggggctcactcagcagctgcacggcctgccgcgccagcgactcgtctgcccgcagttccctgcacaccgactgggccctggagccctccccgctccccagcagcagcgaggaccccaagtccctggacctggaccacagcatggacgaggcgggcgcgggtgccagcaacagcgagcccagcgagccggacagccccacccgggaacacgcgcgccgctccgaggccttacaggggctggtcactgagctcagggccgagctgtgccgccagcggactgagtacgagaggagtgtgaaaagaatcgaagaagggagtgctgacctgagaaaacgaatgtcccggttagaagaagaactggaccaggaaaagaaaaaatacatcatgctggaaataaagctgcggaactctgaacgggcgcgggaggatgcggagaggaggaaccagctgttgcagagggaaatggaggagtttttttcgaccctaggaagcttgactgttggggcaaaaggtgccagggccccaaagtaaaaggaatggcagagctcacttctgtaccacgtctgctggtctccagccttgtatggagttagaagcgtctgtatctctggagcagccaggcgctctggagccagctggagagagagagatcctgatacctctgtggggactgtggggacttttgggaccccacacactccaggtgggatcagatgctgctccaaccatgcagttcctggtgagggtcagaaggggacggtaccaagagtagcgcttagcccttacccaggaaatatccttcatggccacagaaatggagggcgcccaggatccaggcagccaccgggaacagtcagctttctttattaaatgtgctcacaaagc

SEQ ID NO: 1349 - DNA, 2595 bp, Homo sapiens
  source 1..2595: mol_type = unassigned DNA; mol_type = unassigned DNA
acttctcaattctttgttctgtgaagtggttgtcactattgttcccattttacagatttgaggaactgataccccaagaccccgtgactttctcaaggccattccaagatccctagatgcacttacgcttaatgaactaattcttcacagcgaggcttcttgcttaaaatccaagaaaataccagataaagggcattctaaatatatttcttttctatagatgtggatctcctgttactggaaaacaggaattagcttgtctgcttgaggatgtggttggttctttataaaaaggatacagaagaaatttgcacagactgccagcttcattatgctgccgacagcttccagcaaaaggaggacgtttgcagccagatatttcacccgctccaaaagcctagtgatgggggagcagagccggagccctgggcggatgccgtgccctcacaggctgggccccgtgctgaaggcgggctggctgaagaagcagaggagcatcatgaagaactggcagcagcgctggtttgtgctgcgtggggatcagcttttctactacaaggacaaagatgagatcaagccccagggatttatttctctacaagggacacaggtgactgaacttcctcctggccccgaggacccagggaagcacctctttgagatcagcccaggtggtgccggggagcgggagaaggtgccggccaaccccgaggcgctcctgctcatggccagctcccagcgtgacatggaggactgggtgcaggccatccgccgagtcatctgggccccgctgggcggagggatctttgggcagcgcctagaggaaacagtccaccacgagcggaagtatggcccccgcctggcgcccctgctggtggagcagtgtgtggacttcatccgggagcgcgggctcactgaggaggggctgttccgcatgccaggccaggccaacctggtgagggacctgcaggattccttcgactgtggggagaagccactgtttgacagcacaacagacgtgcacacggtggcctccctgctgaagctgtacctgcgggagctccccgagcccgtggtccccttcgccaggtacgaggacttcctcagctgcgcccagctgctcaccaaggacgagggggagggcactctggagttggctaaacaagtgagcaaccttcctcaggcaaattacaacctgctcagatacatctgcaagtttctggatgaagttcaggcatactcaaatgtcaacaagatgagtgtccagaatctggcaaccgtttttggacctaacattctgcggccacaggtagaggacccagtaaccatcatggaaggcacttccctcgtccagcacctgatgaccgtcctcatccgcaaacacagccagctcttcacggcaccggtcccggaagggcccacctccccgcgcgggggcctgcaatgcgcagtggggtggggctccgaggaggtcaccagggacagccaaggagagcccggcggccccggcctgcccgcgcacaggacctcttccctggacggggcggccgtggcggtgctctccagaacagcccccacggggccggggagccggtgcagccctgggaagaaggtgcagaccctgcccagttggaagtcctccttccggcagccgaggtccctatcgggaagcccgaaggggggcggctcatccctggaggtgcccatcatctcctccggcgggaactggcttatgaacgggctgtcctccctgcgcggacaccgccgggcctcgtcgggagaccggctcaaggactcgggctccgtgcagagactctccacctacgacaatgtgcccgcgccgggcctggtccccggcatacccagcgtggccagtatggcgtggtccggggcctcgtccagcgagtcgtcggtggggggctcactcagcagctgcacggcctgccgcgccagcgactcgtctgcccgcagttccctgcacaccgactgggccctggagccctccccgctccccagcagcagcgaggaccccaagtccctggacctggaccacagcatggacgaggcgggcgcgggtgccagcaacagcgagcccagcgagccggacagccccacccgggaacacgcgcgccgctccgaggccttacaggggctggtcactgagctcagggccgagctgtgccgccagcggactgagtacgagaggagtgtgaaaagaatcgaagaagggagtgctgacctgagaaaacgaatgtcccggttagaagaagaactggaccaggaaaagaaaaaatacatcatgctggaaataaagctgcggaactctgaacgggcgcgggaggatgcggagaggaggaaccagctgttgcagagggaaatggaggagtttttttcgaccctaggaagcttgactgttggggcaaaaggtgccagggccccaaagtaaaaggaatggcagagctcacttctgtaccacgtctgctggtctccagccttgtatggagttagaagcgtctgtatctctggagcagccaggcgctctggagccagctggagagagagagatcctgatacctctgtggggactgtggggac

SEQ ID NO: 1350 - DNA, 2352 bp, Homo sapiens
  source 1..2352: mol_type = unassigned DNA; mol_type = unassigned DNA
caggagaggtagccgagggagcctgacgggtgacgccagcggccacggggccccgaacgagcaggacatgaggggcgactaggcgcgaggacgagcaaaagcaagtggatgacagcatgaacggccctgcggggctggccggacggctgcaagaacatgctgagcccaaagatcaggcaggccaggagggcccgctccaaaagcctagtgatgggggagcagagccggagccctgggcggatgccgtgccctcacaggctgggccccgtgctgaaggcgggctggctgaagaagcagaggagcatcatgaagaactggcagcagcgctggtttgtgctgcgtggggatcagcttttctactacaaggacaaagatgagatcaagccccagggatttatttctctacaagggacacaggtgactgaacttcctcctggccccgaggacccagggaagcacctctttgagatcagcccaggtggtgccggggagcgggagaaggtgccggccaaccccgaggcgctcctgctcatggccagctcccagcgtgacatggaggactgggtgcaggccatccgccgagtcatctgggccccgctgggcggaggtactgcccgtagatcgcatgcccaccctctagaacccttgcctccagggatctttgggcagcgcctagaggaaacagtccaccacgagcggaagtatggcccccgcctggcgcccctgctggtggagcagtgtgtggacttcatccgggagcgcgggctcactgaggaggggctgttccgcatgccaggccaggccaacctggtgagggacctgcaggattccttcgactgtggggagaagccactgtttgacagcacaacagacgtgcacacggtggcctccctgctgaagctgtacctgcgggagctccccgagcccgtggtccccttcgccaggtacgaggacttcctcagctgcgcccagctgctcaccaaggacgagggggagggcactctggagttggctaaacaagtgagcaaccttcctcaggcaaattacaacctgctcagatacatctgcaagtttctggatgaagttcaggcatactcaaatgtcaacaagatgagtgtccagaatctggcaaccgtttttggacctaacattctgcggccacaggtagaggacccagtaaccatcatggaaggcacttccctcgtccagcacctgatgaccgtcctcatccgcaaacacagccagctcttcacggcaccggtcccggaagggcccacctccccgcgcgggggcctgcaatgcgcagtggggtggggctccgaggaggtcaccagggacagccaaggagagcccggcggccccggcctgcccgcgcacaggacctcttccctggacggggcggccgtggcggtgctctccagaacagcccccacggggccggggagccggtgcagccctgggaagaaggtgcagaccctgcccagttggaagtcctccttccggcagccgaggtccctatcgggaagcccgaaggggggcggctcatccctggaggtgcccatcatctcctccggcgggaactggcttatgaacgggctgtcctccctgcgcggacaccgccgggcctcgtcgggagaccggctcaaggactcgggctccgtgcagagactctccacctacgacaatgtgcccgcgccgggcctggtccccggcatacccagcgtggccagtatggcgtggtccggggcctcgtccagcgagtcgtcggtggggggctcactcagcagctgcacggcctgccgcgccagcgactcgtctgcccgcagttccctgcacaccgactgggccctggagccctccccgctccccagcagcagcgaggaccccaagtccctggacctggaccacagcatggacgaggcgggcgcgggtgccagcaacagcgagcccagcgagccggacagccccacccgggaacacgcgcgccgctccgaggccttacaggggctggtcactgagctcagggccgagctgtgccgccagcggactgagtacgagaggagtgtgaaaagaatcgaagaagggagtgctgacctgagaaaacgaatgtcccggttagaagaagaactggaccaggaaaagaaaaaatacatcatgctggaaataaagctgcggaactctgaacgggcgcgggaggatgcggagaggaggaaccagctgttgcagagggaaatggaggagtttttttcgaccctaggaagcttgactgttggggcaaaaggtgccagggccccaaagtaaaaggaatggcagagctcacttctgtaccacgtctgctggtctccagccttg

SEQ ID NO: 1351 - DNA, 2764 bp, Homo sapiens
  source 1..2764: mol_type = unassigned DNA; mol_type = unassigned DNA
agaggcgccgagcagccgggagctccgtcctgcctgaggatgcggggcccaggctgcatccccccggccctgctcgcctgctcatcacacggaggccggggacagggtcacggccagggagcctgcggggctaaaggagcgggccgggagctcaagagctgccgccgggcggcgaggaaggagccccaggcaggccccgggcggccgaggcaggggaggagacggctggccctggttccaggtgagcagccccgcccgctctgctggaggccccgcttaccaccggcgggagatgcgggtgcaagccctggggcgcacgtggccaggccactgccacgcccgagggacgggttttcgtcgccacctcggccctggtgaaccctgtgactggagtgcctcccaatcccaccgtgatgcccacctcggggcgctgccaggtgccaggctaatgcgtgtgatccacagtgtgctgagaagtgctgactgtcattgtgaatgtccgtggtggggtgacgcccgggcagggtgcactggcctggttccagaagacctggcctctccagctcccacggcgcgcccgtttgctgcgtggcccatgctgctggcggctgctcctggctgagtcattccaagacgagcgtccagtccgcgctctctgccgcccttcccagcgctgcccggcaggccccgggaactgtgcccagctgtgcccgcttagctggtgtatgacctgcctttgaacttgctgcaaagaaagatgtggatctcctgttactggaaaacaggaattagcttgtctgcttgaggatgtggttggttctttataaaaaggatacagaagaaatttgcacagactgccagcttcattatgctgccgacagcttccagcaaaaggaggacgtttgcagccagatatttcacccgctccaaaagcctagtgatgggggagcagagccggagccctgggcggatgccgtgccctcacaggctgggccccgtgctgaaggcgggctggctgaagaagcagaggagcatcatgaagaactggcagcagcgctggtttgtgctgcgtggggatcagcttttctactacaaggacaaagatgagatcaagccccagggatttatttctctacaagggacacaggtgactgaacttcctcctggccccgaggacccagggaagcacctctttgagatcagcccaggtggtgccggggagcgggagaaggtgccggccaaccccgaggcgctcctgctcatggccagctcccagcgtgacatggaggactgggtgcaggccatccgccgagtcatctgggccccgctgggcggagggatctttgggcagcgcctagaggaaacagtccaccacgagcggaagtatggcccccgcctggcgcccctgctggtggagcagtgtgtggacttcatccgggagcgcgggctcactgaggaggggctgttccgcatgccaggccaggccaacctggtgagggacctgcaggattccttcgactgtggggagaagccactgtttgacagcacaacagacgtgcacacggtggcctccctgctgaagctgtacctgcgggagctccccgagcccgtggtccccttcgccagggcactctggagttggctaaacaagtgagcaaccttcctcaggcaaattacaacctgctcagatacatctgcaagtttctggatgaagttcaggcatactcaaatgtcaacaagatgagtgtccagaatctggcaaccgtttttggacctaacattctgcggccacaggtagaggacccagtaaccatcatggaaggcacttccctcgtccagcacctgatgaccgtcctcatccgcaaacacagccagctcttcacggcaccggtcccggaagggcccacctccccgcgcgggggcctgcaatgcgcagtggggtggggctccgaggaggtcaccagggacagccaaggagagcccggcggccccggcctgcccgcgcacaggacctcttccctggacggggcggccgtggcggtgctctccagaacagcccccacggggccggggagccggtgcagccctgggaagaaggtgcagaccctgcccagttggaagtcctccttccggcagccgaggtccctatcgggaagcccgaaggggggcggctcatccctggaggtgcccatcatctcctccggcgggaactggcttatgaacgggctgtcctccctgcgcggacaccgccgggcctcgtcgggagaccggctcaaggactcgggctccgtgcagagactctccacctacgacaatgtgcccgcgccgggcctggtccccggcatacccagcgtggccagtatggcgtggtccggggcctcgtccagcgagtcgtcggtggggggctcactcagcagctgcacggcctgccgcgccagcgactcgtctgcccgcagttccctgcacaccgactgggccctggagccctccccgctccccagcagcagcgaggaccccaagtccctggacctggaccacagcatggacgaggcgggcgcgggtgccagcaacagcgagcccagcgagccggacagccccacccgggaacacgcgcgccgctccgaggccttacaggggctggtcactgagctcagggccgagctgtgccgccagcggactgagtacgagaggagtgtgaaaagaatcgaagaagggagtgctgacctgagaaaacgaatgtcccggttagaagaagaactggacc

SEQ ID NO: 1352 - DNA, 496 bp, Homo sapiens
  source 1..496: mol_type = unassigned DNA; mol_type = unassigned DNA
aatgcagcaacggggagccaggggcatgctggggaagagcattccagcagagacatggacacgtgcgaaggccccgaggtagggacgagctttgggaacacgaggcatgtcaggaaggccggggccccgagggagtgaagaccaggcgagtgggagggcctgagcacaacagacgtgcacacggtggcctccctgctgaagctgtacctgcgggagctccccgagcccgtggtccccttcgccaggtacgaggacttcctcagctgcgcccagctgctcaccaaggacgagggggagggcactctggagttggctaaacaagtgagcaaccttcctcaggcaaattacaacctgctcagatacatctgcaagtttctggatgaagttcaggcatactcaaatgtcaacaagatgagtgtccagaatctggcaaccgtttttggacctaacattctgcggccacaggtagaggacccagtaaccatcatggaaggta

SEQ ID NO: 1353 - DNA, 690 bp, Homo sapiens
  source 1..690: mol_type = unassigned DNA; mol_type = unassigned DNA
gccccgccctggtccagtgattgatcagcagtgattactgaggctttaatggtccgcttggatgggaattaattctgggatggataaataatgcatcgaggtttatgtagtccaaggcgagccgtccgtccggagccaggagaggtagccgagggagcctgacgggtgacgccagcggccacggggccccgaacgagcaggacatgaggggcgactaggcgcgaggacgagcaaaagcaagtggatgacagcatgaacggccctgcggggctggccggacggctgcaagaacatgctgagcccaaagatcaggcaggccaggagggggatttatttctctacaagggacacaggtgactgaacttcctcctggccccgaggacccagggaagcacctctttgagatcagcccagcacaacagacgtgcacacggtggcctccctgctgaagctgtacctgcgggagctccccgagcccgtggtccccttcgccaggtacgaggacttcctcagctgcgcccagctgctcaccaaggacgagggggagggcactctggagttggctaaacaagtgagcaaccttcctcaggcaaattacaacctgctcagatacatctgcaagtttctggatgaagttcaggcatactcaaatgtcaacaagatgagtgtccagaatctggcaaccgtttt

SEQ ID NO: 1354 - DNA, 467 bp, Homo sapiens
  source 1..467: mol_type = unassigned DNA; mol_type = unassigned DNA
cgcgccgccgcgataggcgcgccatgggcctgatgccggccgcgcgggcctactccgggatgcagcgcttgcccgcggccgccttgccgcttgcccgcttgttgcgcgcccgccgccccagggatctttgggcagcgcctagaggaaacagtccaccacgagcggaagtatggcccccgcctggcgcccctgctggtggagcagtgtgtggacttcatccgggagcgcgggctcactgaggaggggctgttccgcatgccaggccaggccaacctggtgagggacctgcaggattccttcgactgtggggagaagccactgtttgacagcacaacagacgtgcacacggtggcctccctgctgaagctgtacctgcgggagctccccgagcccgtggtccccttcgccaggtacgaggacttcctcagctgcgcccagctgctcaccaaggacgagggggagggcac

SEQ ID NO: 1355 - DNA, 733 bp, Homo sapiens
  source 1..733: mol_type = unassigned DNA; mol_type = unassigned DNA
agcagagccggagccctgggcggatgccgtgccctcacaggctgggccccgtgctgaaggcgggctggctgaagaagcagaggagcatcatgaagaactggcagcagcgctggtttgtgctgcgtggggatcagcttttctactacaaggacaaagatgagatcaagccccagggatttatttctctacaagggacacaggtgactgaacttcctcctggccccgaggacccagggaagcacctctttgagatcagcccagagcaaaaactggagttcaataaggacaggcccaacttgtcactaactcaccttacagtgcctggcgcaaagtaggccctcaagagattgctcgtgaacatatacaccatggaatactatgcagccataaaaaaggataagttcatgtcctttgtagggacatggatgaagctggaaaccatcattctcagcaaactatcacaaggacaaaaaaaccaaacactgcatgttctcactcataggtgggaattgaacaaagagaacacttggacacaggaaggggaacatcacacactggggcctgtcatggggtggggggttgggggagggatagcattaggagatatacctaatgtaaatgaagagttaatgggtgcagcacaccaacatgacacatgtatacatacgtaacaaacctgcatgttgtgcacatgtaccctagaacttaaagtataataaaaaaagaaaaaaaa

SEQ ID NO: 1356 - DNA, 912 bp, Homo sapiens
  source 1..912: mol_type = unassigned DNA; mol_type = unassigned DNA
agccaggagaggtagccgagggagcctgacgggtgacgccagcggccacggggccccgaacgagcaggacatgaggggcgactaggcgcgaggacgagcaaaagcaagtggatgacagcatgaacggccctgcggggctggccggacggctgcaagaacatgctgagcccaaagatcaggcaggccaggagggcccgctccaaaagcctagtgatgggggagcagagccggagccctgggcggatgccgtgccctcacaggctgggccccgtgctgaaggcgggctggctgaagaagcagaggagcatcatgaagaactggcagcagcgctggtttgtgctgcgtggggatcagcttttctactacaaggacaaagatgagatcaagccccaggaagcatgatgctgacctctgctcagcttctggagatgcctcaggaaacttagaatcatggcggaaggcaaagagggagcagtcatgtcacatggccagagcaggagcaaaagagagagcagggaggtgccacacacacttttaaaccaccagatttcgtgagaattcactctattttgaggacagcaccaagaagatggtgctaaccactcaagagaaaccgcccccatgatccaaataccttccgccaggccccacctccaacactggggattacaattaaacatgagatttggatggagacacagagccaaaccatatcacgctccttccctgagtccttgacctggagtagatgcctgggttgtctccatttctcaaatgaggaaactgaaggactgacatcaggccaagactaacaggtactcactctcagatagcgcctgaaagctgacacaagttcagtgagactgctaggacaaccccctgccgtgccattaatgtctgcccacaaaaacc

SEQ ID NO: 1357 - DNA, 432 bp, Homo sapiens
  source 1..432: mol_type = unassigned DNA; mol_type = unassigned DNA
agaggagcatcatgaagaactggcagcagcgctggtttgtgctgcgtggggatcagcttttctactacaaggacaaagatgagatcaagccccaggagaataagtgagggaagctcagcaataaggagccatagaagattgatttaaagtttgatgtgattgagtaaaagcttgagactggtggggagaaagtcaagatggatgggaaagcacatgcacttctaggagtggaacattaatattggacagtcggaaaccagaaatctttaagaaagaggaaacctcaggggaagaaagagaggccatcctatcccataacttgaaagtcacaggaatatttcagcctgcagggaatcttcatttcccaccccattgtttaccaaacttgcacgtcaaaaacaaaaacaaaaaataaaatgttgctttcatgaa

SEQ ID NO: 1358 - DNA, 520 bp, Homo sapiens
  source 1..520: mol_type = unassigned DNA; mol_type = unassigned DNA
atacagaagaaatttgcacagactgccagcttcattatgctgccgacagcttccagcaaaaggaggacgtttgcagccagatatttcacccgctccaaaagcctagtgatgggggagcagagccggagccctgggcggatgccgtgccctcacaggctgggccccgtgctgaaggcgggctggctgaagaagcagaggagcatcatgaagaactggcagcagcgctggtttgtgctgcgtggggatcagcttttctactacaaggacaaagatgagatcaagccccaggtgagaagtgcatgtccggtgtgccgtgggcatcgtggcagggctccacaagagggaagaccatgcccaggagaagggaggaaggcacagagccactgactccatcacagtgatgttttgccaggatttccaaagtaattttcattcttatcccccatgttcctggtatcacagcctgttttactggaacatgtccacaacttctgcaatgaaaatgtttccttaaaatgtt

SEQ ID NO: 1359 - DNA, 471 bp, Homo sapiens
  source 1..471: mol_type = unassigned DNA; mol_type = unassigned DNA
ttgcgcttggcggtcgccgggtgcagctgcccggacagggcgcatggaggggccgcctccccctgcgccccccggggccggcgcggcgaggacggcatagcagggcccagcatggagcagctgccactgggcccaagagatgggtgctctcctaggcgccccttcccctggcaggggccgaggacgctgctgctgtacaaaagtccccaggacggctttggcttcactctgcgccacttcatcgtgtacccacccgagtcggccgtgcactgcagcctgaaggaggaagagaatggaggccgtggaggaggaccctccccccggtaccgcctggagcccatggacaccatctttgtcaagaatgtgaaggaagacggccctgcccatagggcggggcttcgcacaggagaccggctggtaaaggtgaatggggaaagcgtcattgggaagacctactctcaggtcatagct

SEQ ID NO: 1360 - DNA, 5964 bp, Homo sapiens
  source 1..5964: mol_type = unassigned DNA; mol_type = unassigned DNA
ccgcccctcccgggtccctgccggcgcccccagccgtgccccggccgcagagccgccgctgccacccgatgaatggagtcgccttctgcctggtcgggatcccgccccgcccggagccccggcccccacagctgccactgggcccaagagatgggtgctctcctaggcgccccttcccctggcaggggccgaggacgctgctgctgtacaaaagtccccaggacggctttggcttcactctgcgccacttcatcgtgtacccacccgagtcggccgtgcactgcagcctgaaggaggaagagaatggaggccgtggaggaggaccctccccccggtaccgcctggagcccatggacaccatctttgtcaagaatgtgaaggaagacggccctgcccatagggcggggcttcgcacaggagaccggctggtaaaggtgaatggggaaagcgtcattgggaagacctactctcaggtcatagctctgatccagaatagtgatgacactctggagctgtctatcatgcccaaggacgaggacatcctccagctggcctactcccaggatgcctacctgaaagggaacgagccgtattctggagaggcccgcagcatcccagagccacccccgatctgctacccccgcaagacctacgcccctcctgcccgggcctccaccagggccactatggtgcctgagcccacctcagcactgcccagtgacccccggagtcctgctgcctggagtgacccggggctccgtgtgccacctgctgcccgtgcccacctggacaactcttccttggggatgagccagccccgccccagccctggtgccttcccccacctctcctcggagccccggacgccccgtgccttcccagagcctggcagccgggtgccccccagcagactggagtgccagcaggccttgtcacactggctgtcaaaccaggtaccccgccgggcgggggagagacggtgcccagccatggccccccgggcccgcagcgcctcccaggaccggttggaggaggtggctgccccccgcccgtggccctgctccacctcccaggatgctttgagccagctgggccaggagggctggcaccgagctcgctcagatgactacttgagccgggccacccgttctgccgaggcactggggccaggggcactggtgtcaccccgctttgagcggtgtggctgggcttcccagcgttcgtctgcccgcacccccgcctgcccaactcgggacctgccagggccccaggccccacccccgtctggcctgcagggcctggatgacctcgggtacatcggctaccggagctacagcccatcattccagcgccggaccggcctcctccatgcgctctccttccgggactcaccctttggggggctgcctaccttcaacctggcccagtcccctgcgtcattcccaccagaggcctccgagccacccagggttgtacggccggaacccagcacccgggccctggagcctcctgcggaggatcgcggcgatgaggtggtcctgaggcagaagcccccgacgggccgcaaggttcagctgacccccgcaagacagatgaaccttggatttggtgacgagtccccagagccagaggccagtgggcgaggggaacgcctgggcaggaaggtggcccctttggccaccaccgaagactctctggcttccatcccctttattgatgagcccaccagccccagcattgacctccaagccaagcacgtccctgcctctgctgtggtctccagtgccatgaactcagcccctgtcctgggcaccagcccatcttccccgaccttcactttcaccctcggacgccattactcgcaggactgcagcagcatcaaggctggccgccgctcctcctacctgctggccatcaccacggagcgctccaagtcctgcgatgatggactcaacaccttccgcgacgagggccgggttctgcggcgcctgccaaaccgcatacccagcctgcggatgctccggagcttcttcaccgacgggtccttggatagctggggcacctctgaagatgctgacgctccttctaagcgacactcaacctctgacctctcagatgcgaccttcagcgatatcaggagagaaggctggttgtattataagcagattctcaccaagaaggggaagaaagcgggcagcggcctgcgccagtggaagcgggtgtacgccgcgctgcgggcgcgctcgctctcgctgagcaaggagcggcgggagcccgggccggcggcggcgggggctgcggcggccggcgcaggtgaggacgaggcggcgcccgtctgcatcggctcctgcctcgtggacatctcctacagcgagaccaagaggaggcacgtgttccggctgaccaccgctgacttctgtgaatatctctttcaggctgaggaccgggatgacatgctgggctggatcagagcgatccgggagaacagcagggccgagggcgaggaccccggctgtgccaaccaagctctgatcagcaagaagcttaacgattatcgcaaagtgagccatagctctgggcccaaagctgattcctcccccaaaggctctcgcggcctggggggcctcaagtctgagttcctcaagcagagtgcggcacgtggcctcaggactcaggacctgcccgcagggagcaaggatgacagtgctgcagcccccaaaaccccctggggcatcaacatcatcaagaaaaataagaaggccgctccgagggcgtttggggtcaggctggaggagtgccagccagccacggagaaccagcgcgtccccttaatcgtggctgcatgctgtcgcattgtggaggcacgagggctggagtccacaggcatttaccgagtgcccggcaacaatgcagtggtgtccagcctacaggagcagctcaaccgcgggcctggtgacatcaacctgcaggatgagcgctggcaagacctcaatgtgatcagcagcctgctcaagtccttcttccgaaagctgcccgagcctcttttcactgatgacaaatacaacgacttcatcgaggccaaccgcattgaggacgcgcgggagcgaatgaggacgctgcggaagctgatccgggatctcccaggacactactatgaaacgctcaaattccttgtgggccatctcaagaccatcgctgaccactctgagaaaaacaagatggaaccccggaacctggccctggtctttgggccgacactggtgaggacgtctgaggacaacatgacagacatggtgacccacatgcctgaccgctacaagatcgtggagacactgatccagcactcagactggttcttcagtgacgaagaggacaagggagagagaacccctgtgggcgacaaggagcctcaggcagtgcccaacattgagtacctcctgcccaacattggcaggacagtgccccctggcgacccggggtcagattctaccacctgtagttcagccaagtccaagggttcgtgggcccccaagaaggagccgtacgcccgggagatgctggcgatctccttcatctcggccgtcaaccgcaagcgcaagaagcggcgggaggcgcgggggctgggcagcagcaccgacgacgactcggagcaggaggcgcacaagcctggggcgggggccacagcgccggggactcaggagcggccgcaggggccgctgcctggcgccgtcgcccccgaggcccccggacgcctcagtcccccggcggcgccggaggagcggccggccgcggacacgcgctccattgtgtcgggctactccaccctgtccaccatggaccgcagcgtgtgctcgggcgctagcggtcggcgggcaggggcgggggatgaggcggacgacgagcgtagcgagctgagccacgtggagacggacactgagggcgcggcgggcgcggggcctggggggcgcctgacacgccggccgtccttcagctcgcaccacctcatgccctgcgacactctggcgcgccgccgcctggcccggggccgcccagacggcgagggcgcgggccggggcggtccccgcgccccggagccgcccggctcggcgtcgtccagcagccaggagtcgctgcggcccccggcggcggcgctggcctcccggccctcgcgcatggaggcgctgcgtctaaggctccgcggcacggcggacgacatgctcgccgtgcgcctgcggcggccgctgtcgcccgagacccggcggcgccggagcagctggcgccgccacaccgtggtggtgcagagcccgctgactgacctcaacttcaacgagtggaaggagctgggcggagggggccccccggagcctgcgggcgcgcgggcgcacagtgacaacaaggactccggactcagcagcctggagtccaccaaggcgcgggccccgtcgtccgctgcctcgcagccgcccgcgcccggggacacggggtccctgcagagccagcccccgcgccgctcggccgcctcccgcctgcatcagtgtctgtgatccccacctcccgcgccgctcgggcgccacccctccctagagcccctttggaaccaggaggcttcaccagcctgcacctcctcttctgtggcccctgggtgcatggtgtgggtggagggcgcagcaggcagtgtctctagttggtgtgctggaactggcagggcagaggagaaggctggggccggactaattgaatggaagggggttccagaggtgatgagcagaagaggagggggcgtgggctgctggggtctgtgtccctgcacacatgcgcccgataggtccttctgagcctttctgtggctgcacttggggacccttgtggaccatggggtgtggctagggaacccctaagtttcagactaaaggaaagatcctgggtgatgctggctttttgcttctttcttctgccctcccacctcagcttgtaagcggggatgtgtgtatgtctggggagaggaggtgtagggtgcgtatgtccatggggggaggggcttgtgtgtgcagtcattgtcccaaggtgtttccagtagcgacttctgtccccctatccccaccctggtccccactttgcgcccccgggctccctgcctttggtgcacacaggatcctgcccgccccccttgccagagccagagaagggggttggggccattccaaggaggcaggactgaaaccctcaccagggttactccccaacatccttttgcctgagtcaccctctaagcgctttaaccacgggcagctgcctgttccccagacagtttttggtggggggggtccagggtcccccttgctggtacctccctcacccctctttttgtttttccatctgtgcctgttccttccacagcccaggcacacagaagcccaccttcttccccttaggaggagggatagtcaacacccctgctgtctctctgtcactcacacactgatttatggggtctgagctgggctgttcctgcaggatggacaggacccagcgccctcttctccccacaggctgtaaatagacttccaatcaccaggccagcccccacacaccctcactcattccagggaagcccaggtaggtggtgaacccgctgccacgtctatcagtcctcttgttttatgcaaagatttactgtaaagtagatttctttccctccctcccccattcttttattgtaaatattgtctctaaatgtgtaacatattataaagaatttataaggatttttaaagatgttttgctcatttacaaaagtgttgtaacagtgttggacaaagccttccaccccatgtccgcatggctcctttcactgtgtccttgacacacctctctggcaacaactaaaatttcctgcttctgaaaagtcctgtcttaaaagtacagtctatatcttggaaataaatagctttcctcaaggcatga

SEQ ID NO: 1361 - DNA, 3663 bp, Homo sapiens
  source 1..3663: mol_type = unassigned DNA; mol_type = unassigned DNA
atgaatggagtcgccttctgcctggtcgggatcccgccccgcccggagccccggcccccacagctgccactgggcccaagagatgggtgctctcctaggcgccccttcccctggcaggggccgaggacgctgctgctgtacaaaagtccccaggacggctttggcttcactctgcgccacttcatcgtgtacccacccgagtcggccgtgcactgcagcctgaaggaggaagagaatggaggccgtggaggaggaccctccccccggtaccgcctggagcccatggacaccatctttgtcaagaatgtgaaggaagacggccctgcccatagggcggggcttcgcacaggagaccggctggtaaaggtgaatggggaaagcgtcattgggaagacctactctcaggtcatagctctgatccagaatagtgatgacactctggagctgtctatcatgcccaaggacgaggacatcctccagctggcctactcccaggatgcctacctgaaagggaacgagccgtattctggagaggcccgcagcatcccagagccacccccgatctgctacccccgcaagacctacgcccctcctgcccgggcctccaccagggccactatggtgcctgagcccacctcagcactgcccagtgacccccggagtcctgctgcctggagtgacccggggctccgtgtgccacctgctgcccgtgcccacctggacaactcttccttggggatgagccagccccgccccagccctggtgccttcccccacctctcctcggagccccggacgccccgtgccttcccagagcctggcagccgggtgccccccagcagactggagtgccagcaggccttgtcacactggctgtcaaaccaggtaccccgccgggcgggggagagacggtgcccagccatggccccccgggcccgcagcgcctcccaggaccggttggaggaggtggctgccccccgcccgtggccctgctccacctcccaggatgctttgagccagctgggccaggagggctggcaccgagctcgctcagatgactacttgagccgggccacccgttctgccgaggcactggggccaggggcactggtgtcaccccgctttgagcggtgtggctgggcttcccagcgttcgtctgcccgcacccccgcctgcccaactcgggacctgccagggccccaggccccacccccgtctggcctgcagggcctggatgacctcgggtacatcggctaccggagctacagcccatcattccagcgccggaccggcctcctccatgcgctctccttccgggactcaccctttggggggctgcctaccttcaacctggcccagtcccctgcgtcattcccaccagaggcctccgagccacccagggttgtacggccggaacccagcacccgggccctggagcctcctgcggaggatcgcggcgatgaggtggtcctgaggcagaagcccccgacgggccgcaaggttcagctgacccccgcaagacagatgaaccttggatttggtgacgagtccccagagccagaggccagtgggcgaggggaacgcctgggcaggaaggtggcccctttggccaccaccgaagactctctggcttccatcccctttattgatgagcccaccagccccagcattgacctccaagccaagcacgtccctgcctctgctgtggtctccagtgccatgaactcagcccctgtcctgggcaccagcccatcttccccgaccttcactttcaccctcggacgccattactcgcaggactgcagcagcatcaaggctggccgccgctcctcctacctgctggccatcaccacggagcgctccaagtcctgcgatgatggactcaacaccttccgcgacgagggccgggttctgcggcgcctgccaaaccgcatacccagcctgcggatgctccggagcttcttcaccgacgggtccttggatagctggggcacctctgaagatgctgacgctccttctaagcgacactcaacctctgacctctcagatgcgaccttcagcgatatcaggagagaaggctggttgtattataagcagattctcaccaagaaggggaagaaagcgggcagcggcctgcgccagtggaagcgggtgtacgccgcgctgcgggcgcgctcgctctcgctgagcaaggagcggcgggagcccgggccggcggcggcgggggctgcggcggccggcgcaggtgaggacgaggcggcgcccgtctgcatcggctcctgcctcgtggacatctcctacagcgagaccaagaggaggcacgtgttccggctgaccaccgctgacttctgtgaatatctctttcaggctgaggaccgggatgacatgctgggctggatcagagcgatccgggagaacagcagggccgagggcgaggaccccggctgtgccaaccaagctctgatcagcaagaagcttaacgattatcgcaaagtgagccatagctctgggcccaaagctgattcctcccccaaaggctctcgcggcctggggggcctcaagtctgagttcctcaagcagagtgcggcacgtggcctcaggactcaggacctgcccgcagggagcaaggatgacagtgctgcagcccccaaaaccccctggggcatcaacatcatcaagaaaaataagaaggccgctccgagggcgtttggggtcaggctggaggagtgccagccagccacggagaaccagcgcgtccccttaatcgtggctgcatgctgtcgcattgtggaggcacgagggctggagtccacaggcatttaccgagtgcccggcaacaatgcagtggtgtccagcctacaggagcagctcaaccgcgggcctggtgacatcaacctgcaggatgagcgctggcaagacctcaatgtgatcagcagcctgctcaagtccttcttccgaaagctgcccgagcctcttttcactgatgacaaatacaacgacttcatcgaggccaaccgcattgaggacgcgcgggagcgaatgaggacgctgcggaagctgatccgggatctcccaggacactactatgaaacgctcaaattccttgtgggccatctcaagaccatcgctgaccactctgagaaaaacaagatggaaccccggaacctggccctggtctttgggccgacactggtgaggacgtctgaggacaacatgacagacatggtgacccacatgcctgaccgctacaagatcgtggagacactgatccagcactcagactggttcttcagtgacgaagaggacaagggagagagaacccctgtgggcgacaaggagcctcaggcagtgcccaacattgagtacctcctgcccaacattggcaggacagtgccccctggcgacccggggtcagcggacctgttggagatttaaaggattctaccacctgtagttcagccaagtccaagggttcgtgggcccccaagaaggagccgtacgcccgggagatgctggcgatctccttcatctcggccgtcaaccgcaagcgcaagaagcggcgggaggcgcgggggctgggcagcagcaccgacgacgactcggagcaggaggcgcacaagcctggggcgggggccacagcgccggggactcaggagcggccgc

SEQ ID NO: 1362 - DNA, 546 bp, Homo sapiens
  source 1..546: mol_type = unassigned DNA; mol_type = unassigned DNA
gccttcagccgggaggcgcaggaggcgcggagccaatccagccgtcctgccgccgtccgcgcgggccgtccgtcccttcggggcccccgggccccgggcccgcggctccggggggcgggcggggacccccggggcccgccggccgcccggggggtcgaggacgccgtctgccgggcgcctagcagcggccccgggcccccgcgcggcgcgcgcgtctccggaagcccggcctggggcgtactggggccggggcagtggccgggcccgggagcccccgccggccgcggagctggtgggcagcgccgtgtggcgcgtggagcgcgcgggggccgggggctggcgctgggagcgcgccgtcggcgtggactgcagcgccccggaaccgcgctgcctctggctgccctgcctcagccacagcgaccgccgcgcgcccgggccgcgccgggccaggctgccactgggcccaagagatgggtgctctcctaggcgccccttcccctggcaggggccgaggacgctgctgctgtacaaaagtccccaggacgg

SEQ ID NO: 1363 - DNA, 969 bp, Homo sapiens
  source 1..969: mol_type = unassigned DNA; mol_type = unassigned DNA
gaaggatgcgtgtgtgccggtctgctgtgcatgtgtgtatctgcatgtctgtgatgcatgcgcatgcgtctgtatgtgcattgtgtgtgcaggactttgattctgtgcaactctgtgcatatctatgtgtctacaaaagtgtgcacatgtgtactcatttgtgtgtgtgtatctgtgtgtctgcatatttgcacatgcttgtctgtatgtttgtggtatgttccgtctacatgagtgtatgtggctggggctgtgtctgcataagtatgtgtctatctgggagtgcatatatgtgtgcatgtgtgtgtgtgagattgtgcatgagctaagacaacgacaggcacttcctgggcaggaaggctgtatccagggtcctgcacatagtaggtgctcagtgaacatttgctgaactcagctgaactgaactgaatgaacttgcttcactgccactgggcccaagagatgggtgctctcctaggcgccccttcccctggcaggggccgaggacgctgctgctgtacaaaagtccccaggacggctttggcttcactctgcgccacttcatcgtgtacccacccgagtcggccgtgcactgcagcctgaaggaggaagagaatggaggccgtggaggaggaccctccccccggtaccgcctggagcccatggacaccatctttgtcaagaatgtgaaggaagacggccctgcccatagggcggggcttcgcacaggagaccggctggtaaaggtgaatggggaaagcgtcattgggaagacctactctcaggtcatagctctgatccagaatagtgatgacactctggagctgtctatcatgcccaaggacgaggacatcctccagctggcctactcccaggatgcctacctgaaagggaacgagccgtattctggagaggcccgcagcatcccagagccacccccgatctgctacccccgcaagacctacgccc

SEQ ID NO: 1364 - DNA, 769 bp, Homo sapiens
  source 1..769: mol_type = unassigned DNA; mol_type = unassigned DNA
tccaagtcctgcgatgatggactcaacaccttccgcgacgagggccgggttctgcggcgcctgccaaaccgcatacccagcctgcggatgctccggagcttcttcaccgacgggtccttggatagctggggcacctctgaagatgctgacgctccttctaagcgacactcaacctctgacctctcagatgcgaccttcagcgatatcaggagagaaggctggttgtattataagcagattctcaccaagaaggggaagaaagcgggcagcggcctgcgccagtggaagcgggtgtacgccgcgctgcgggcgcgctcgctctcgctgagcaaggagcggcgggagcccgggccggcggcggcgggggctgcggcggccggcgcaggctgaggaccgggatgacatgctgggctggatcagagcgatccgggagaacagcagggccgagggcgaggaccccggctgtgccaaccaagctctgatcagcaagaagcttaacgattatcgcaaagtgagccatagctctgggcccaaagctgattcctcccccaaaggctctcgcggcctggggggcctcaagtctgagttcctcaagcagagtgcggcacgtggcctcaggactcaggacctgcccgcagggagcaaggatgacagtgctgcagcccccaaaaccccctggggcatcaacatcatcaagaaaaataagaaggccgctccgagggcgtttggggtcaggctggaggagtgccagccagccacggagaaccag

SEQ ID NO: 1365 - DNA, 488 bp, Homo sapiens
  source 1..488: mol_type = unassigned DNA; mol_type = unassigned DNA
cgaccttcagcgatatcaggagagaaggctggttgtattataagcagattctcaccaagaaggggaaggctgaggaccgggatgacatgctgggctggatcagagcgatccgggagaacagcagggccgagggcgaggaccccggctgtgccaaccaagctctgatcagcaagaagcttaacgattatcgcaaagtgagccatagctctgggcccaaagctgattcctcccccaaaggctctcgcggcctggggggcctcaagtctgagttcctcaagcagagtgcggcacgtggcctcaggactcaggacctgcccgcagggagcaaggatgacagtgctgcagcccccaaaaccccctggggcatcaacatcatcaagaaaaataagaaggccgctccgagggcgtttggggtcaggctggaggagtgccagccagccacggagaaccagcgcgtccccttaatcgtggctgcatgctgtcgcatt

SEQ ID NO: 1366 - DNA, 438 bp, Homo sapiens
  source 1..438: mol_type = unassigned DNA; mol_type = unassigned DNA
cgcgtccccttaatcgtggctgcatgctgtcgcattgtggaggcacgagggctggagtccacaggcatttaccgagtgcccggcaacaatgcagtggtgtccagcctacaggagcagctcaaccgcgggcctggtgacatcaacctgcaggatgagcgctggcaagacctcaatgtgatcagcagcctgctcaagtccttcttccgaaagctgcccgagcctcttttcactgatggtgcccttctcttctgacctgctgaaccttggtgtccatgtcctggagacgggggcagggaccccttttctgggatcagcatgcagctcagatggtattgcctcccaaatgaacacagctgggctaccccaggtcaggtgcacacccgagtgtagctgtgacaaatacaacgacttcatcgaggccaaccgcattgaggacgc

SEQ ID NO: 1367 - DNA, 407 bp, Homo sapiens
  source 1..407: mol_type = unassigned DNA; mol_type = unassigned DNA
atccgggatctcccaggacactactatgaaacgctcaaattccttgtgggccatctcaagaccatcgctgaccactctgagaaaaacaagatggaaccccggaacctggccctggtctttgggccgacactggtgaggacgtctgaggacaacatgacagacatggtgacccacatgcctgaccgctacaagatcgtggagacactgatccagcactcagactggttcttcagtgacgaagaggacaagggagagagaattctaccacctgtagttcagccaagtccaagggttcgtgggcccccaagaaggagccgtacgcccgggagatgctggcgatctccttcatctcggccgtcaaccgcaagcgcaagaagcggcgggaggcgcgggggctgggcagcagc

SEQ ID NO: 1368 - DNA, 405 bp, Homo sapiens
  source 1..405: mol_type = unassigned DNA; mol_type = unassigned DNA
ctatgaaacgctcaaattccttgtgggccatctcaagaccatcgctgaccactctgagaaaaacaagatggaaccccggaacctggccctggtctttgggccgacactggtgaggacgtctgaggacaacatgacagacatggtgacccacatgcctgaccgctacaagatcgtggagacactgatccagcacgtaagcccctgttccggggggcgcccggcagcccctggggcccaggccatgttcctctgagcccctcgctcttgctccgcctggcggagtgtgccccaggaagggctcggcagctttagagcatgctgctagggtggtatatactcctccaaagccatgggctgcatttcaaggcaaggcaggaatggatcctggaatccctgctgccctgg

SEQ ID NO: 1369 - DNA, 659 bp, Homo sapiens
  source 1..659: mol_type = unassigned DNA; mol_type = unassigned DNA
gttcttcagtgacgaagaggacaagggagagagaacccctgtgggcgacaaggagcctcaggcagtgcccaacattgagtacctcctgcccaacattggcaggacagtgccccctggcgacccggggtcagattctaccacctgtagttcagccaagtccaaggtacgtatgaaggcaattctgaaggcttgatccctgtacaaggcagcccactttggtttttgttcaagggaattgagggaatggcagttggaccatggggaaagttgatggtccctgggagggaaggcaggaggtaccgagtgcccaaggtaagctgagaaattgcttaccttggcagtgtttggtgaggcatctgctgtagtagaaggacctggcctgggagttatgtggctaggaggcaatgtcactcagtagttagaagcacagactctgcagtcagacagtcctgggtttgagttctggctccaccatttagtagtttgggacattgggcaagttacttaaccactttctgatccttagcttcctcatctataaaatgggaatatcagtaaatctgtggggtgctataataaataaaacagatatcctttaaggtctttggagagcctaaagcaagcagaaggaaataaagagaggagcagaaatccatgaa

SEQ ID NO: 1370 - DNA, 471 bp, Homo sapiens
  source 1..471: mol_type = unassigned DNA; mol_type = unassigned DNA
atcggtaaatgaggggccagtggctggcagcctgatgtcacttcctgcctctagaggaagtggcagttaacatcattttctcctccatccctctcccatagatggacatcagatgtccatcatactcctagggcctggggagatctcatgtttcagaattccctggtttctgaagcctttgaggagagggaattgtgtgcataagactcagctttcttttttcctgatgcaactttcatttttttttctgtctttcaccaacagattctaccacctgtagttcagccaagtccaagggttcgtgggcccccaagaaggagccgtacgcccgggagatgctggcgatctccttcatctcggccgtcaaccgcaagcgcaagaagcggcgggaggcgcgggggctgggcagcagcaccgacgacgactcggagcaggaggcgcacaagcctggggcgggggccacagcgccgg

SEQ ID NO: 1371 - DNA, 5964 bp, Homo sapiens
  source 1..5964: mol_type = unassigned DNA; mol_type = unassigned DNA
ccgcccctcccgggtccctgccggcgcccccagccgtgccccggccgcagagccgccgctgccacccgatgaatggagtcgccttctgcctggtcgggatcccgccccgcccggagccccggcccccacagctgccactgggcccaagagatgggtgctctcctaggcgccccttcccctggcaggggccgaggacgctgctgctgtacaaaagtccccaggacggctttggcttcactctgcgccacttcatcgtgtacccacccgagtcggccgtgcactgcagcctgaaggaggaagagaatggaggccgtggaggaggaccctccccccggtaccgcctggagcccatggacaccatctttgtcaagaatgtgaaggaagacggccctgcccatagggcggggcttcgcacaggagaccggctggtaaaggtgaatggggaaagcgtcattgggaagacctactctcaggtcatagctctgatccagaatagtgatgacactctggagctgtctatcatgcccaaggacgaggacatcctccagctggcctactcccaggatgcctacctgaaagggaacgagccgtattctggagaggcccgcagcatcccagagccaccgccgatctgctacccccgcaagacctacgcccctcctgcccgggcctccaccagggccactatggtgcctgagcccacctcagcactgcccagtgacccccggagtcctgctgcctggagtgacccggggctccgtgtgccacctgctgcccgtgcccacctggacaactcttccttggggatgagccagccccgccccagccctggtgccttcccccacctctcctcggagccccggacgccccgtgccttcccagagcctggcagccgggtgccccccagcagactggagtgccagcaggccttgtcacactggctgtcaaaccaggtaccccgccgggcgggggagagacggtgcccagccatggccccccgggcccgcagcgcctcccaggaccggttggaggaggtggctgccccccgcccgtggccctgctccacctcccaggatgctttgagccagctgggccaggagggctggcaccgagctcgctcagatgactacttgagccgggccacccgttctgccgaggcactggggccaggggcactggtgtcaccccgctttgagcggtgtggctgggcttcccagcgttcgtctgcccgcacccccgcctgcccaactcgggacctgccagggccccaggccccacccccgtctggcctgcagggcctggatgacctcgggtacatcggctaccggagctacagcccatcattccagcgccggaccggcctcctccatgcgctctccttccgggactcaccctttggggggctgcctaccttcaacctggcccagtcccctgcgtcattcccaccagaggcctccgagccacccagggttgtacggccggaacccagcacccgggccctggagcctcctgcggaggatcgcggcgatgaggtggtcctgaggcagaagcccccgacgggccgcaaggttcagctgacccccgcaagacagatgaaccttggatttggtgacgagtccccagagccagaggccagtgggcgaggggaacgcctgggcaggaaggtggcccctttggccaccaccgaagactctctggcttccatcccctttattgatgagcccaccagccccagcattgacctccaagccaagcacgtccctgcctctgctgtggtctccagtgccatgaactcagcccctgtcctgggcaccagcccatcttccccgaccttcactttcaccctcggacgccattactcgcaggactgcagcagcatcaaggctggccgccgctcctcctacctgctggccatcaccacggagcgctccaagtcctgcgatgatggactcaacaccttccgcgacgagggccgggttctgcggcgcctgccaaaccgcatacccagcctgcggatgctccggagcttcttcaccgacgggtccttggatagctggggcacctctgaagatgctgacgctccttctaagcgacactcaacctctgacctctcagatgcgaccttcagcgatatcaggagagaaggctggttgtattataagcagattctcaccaagaaggggaagaaagcgggcagcggcctgcgccagtggaagcgggtgtacgccgcgctgcgggcgcgctcgctctcgctgagcaaggagcggcgggagcccgggccggcggcggcgggggctgcggcggccggcgcaggtgaggacgaggcggcgcccgtctgcatcggctcctgcctcgtggacatctcctacagcgagaccaagaggaggcacgtgttccggctgaccaccgctgacttctgtgaatatctctttcaggctgaggaccgggatgacatgctgggctggatcagagcgatccgggagaacagcagggccgagggcgaggaccccggctgtgccaaccaagctctgatcagcaagaagcttaacgattatcgcaaagtgagccatagctctgggcccaaagctgattcctcccccaaaggctctcgcggcctggggggcctcaagtctgagttcctcaagcagagtgcggcacgtggcctcaggactcaggacctgcccgcagggagcaaggatgacagtgctgcagcccccaaaaccccctggggcatcaacatcatcaagaaaaataagaaggccgctccgagggcgtttggggtcaggctggaggagtgccagccagccacggagaaccagcgcgtccccttaatcgtggctgcatgctgtcgcattgtggaggcacgagggctggagtccacaggcatttaccgagtgcccggcaacaatgcagtggtgtccagcctacaggagcagctcaaccgcgggcctggtgacatcaacctgcaggatgagcgctggcaagacctcaatgtgatcagcagcctgctcaagtccttcttccgaaagctgcccgagcctcttttcactgatgacaaatacaacgacttcatcgaggccaaccgcattgaggacgcacgggagcgaatgaggacgctgcggaagctgatccgggatctcccaggacactactatgaaacgctcaaattccttgtgggccatctcaagaccatcgctgaccactctgagaaaaacaagatggaaccccggaacctggccctggtctttgggccgacactggtgaggacgtctgaggacaacatgacagacatggtgacccacatgcctgaccgctacaagatcgtggagacactgatccagcactcagactggttcttcagtgacgaagaggacaagggagagagaacccctgtgggcgacaaggagcctcaggcagtgcccaacattgagtacctcctgcccaacattggcaggacagtgccccctggcgacccggggtcagattctaccacctgtagttcagccaagtccaagggttcgtgggcccccaagaaggagccgtacgcccgggagatgctggcgatctccttcatctcggccgtcaaccgcaagcgcaagaagcggcgggaggcgcgggggctgggcagcagcaccgacgacgactcggagcaggaggcgcacaagcctggggcgggggccacagcgccggggactcaggagcggccgcaggggccgctgcctggcgccgtcgcccccgaggcccccggacgcctcagtcccccggcggcgccggaggagcggccggccgcggacacgcgctccattgtgtcgggctactccaccctgtccaccatggaccgcagcgtgtgctcgggcgctagcggtcggcgggcaggggcgggggatgaggcggacgacgagcgtagcgagctgagccacgtggagacggacactgagggcgcggcgggcgcggggcctggggggcgcctgacacgccggccgtccttcagctcgcaccacctcatgccctgcgacactctggcgcgccgccgcctggcccggggccgcccagacggcgagggcgcgggccggggcggtccccgcgccccggagccgcccggctcggcgtcgtccagcagccaggagtcgctgcggcccccggcggcggcgctggcctcccggccctcgcgcatggaggcgctgcgtctaaggctccgcggcacggcggacgacatgctcgccgtgcgcctgcggcggccgctgtcgcccgagacccggcggcgccggagcagctggcgccgccacaccgtggtggtgcagagcccgctgactgacctcaacttcaacgagtggaaggagctgggcggagggggccccccggagcctgcgggcgcgcgggcgcacagtgacaacaaggactccggactcagcagcctggagtccaccaaggcgcgggccccgtcgtccgctgcctcgcagccgcccgcgcccggggacacggggtccctgcagagccagcccccgcgccgctcggccgcctcccgcctgcatcagtgtctgtgatccccacctcccgcgccgctcgggcgccacccctccctagagcccctttggaaccaggaggcttcaccagcctgcacctcctcttctgtggcccctgggtgcatggtgtgggtggagggcgcagcaggcagtgtctctagttggtgtgctggaactggcagggcagaggagaaggctggggccggactaattgaatggaagggggttccagaggtgatgagcagaagaggagggggcgtgggctgctggggtctgtgtccctgcacacatgcgcccgataggtccttctgagcctttctgtggctgcacttggggacccttgtggaccatggggtgtggctagggaacccctaagtttcagactaaaggaaagatcctgggtgatgctggctttttgcttctttcttctgccctcccacctcagcttgtaagcggggatgtgtgtatgtctggggagaggaggtgtagggtgcgtatgtccatggggggaggggcttgtgtgtgcagtcattgtcccaaggtgtttccagtagcgacttctgtccccctatccccaccctggtccccactttgcgcccccgggctccctgcctttggtgcacacaggatcctgcccgccccccttgccagagccagagaagggggttggggccattccaaggaggcaggactgaaaccctcaccagggttactccccaacatccttttgcctgagtcaccctctaagcgctttaaccacgggcagctgcctgttccccagacagtttttggtggggggggtccagggtcccccttgctggtacctccctcacccctctttttgtttttccatctgtgcctgttccttccacagcccaggcacacagaagcccaccttcttccccttaggaggagggatagtcaacacccctgctgtctctctgtcactcacacactgatttatggggtctgagctgggctgttcctgcaggatggacaggacccagcgccctcttctccccacaggctgtaaatagacttccaatcaccaggccagcccccacacaccctcactcattccagggaagcccaggtaggtggtgaacccgctgccacgtctatcagtcctcttgttttatgcaaagatttactgtaaagtagatttctttccctccctcccccattcttttattgtaaatattgtctctaaatgtgtaacatattataaagaatttataaggatttttaaagatgttttgctcatttacaaaagtgttgtaacagtgttggacaaagccttccaccccatgtccgcatggctcctttcactgtgtccttgacacacctctctggcaacaactaaaatttcctgcttctgaaaagtcctgtcttaaaagtacagtctatatcttggaaataaatagctttcctcaaggcatga

SEQ ID NO: 1372 - DNA, 3663 bp, Homo sapiens
  source 1..3663: mol_type = unassigned DNA; mol_type = unassigned DNA
atgaatggagtcgccttctgcctggtcgggatcccgccccgcccggagccccggcccccacagctgccactgggcccaagagatgggtgctctcctaggcgccccttcccctggcaggggccgaggacgctgctgctgtacaaaagtccccaggacggctttggcttcactctgcgccacttcatcgtgtacccacccgagtcggccgtgcactgcagcctgaaggaggaagagaatggaggccgtggaggaggaccctccccccggtaccgcctggagcccatggacaccatctttgtcaagaatgtgaaggaagacggccctgcccatagggcggggcttcgcacaggagaccggctggtaaaggtgaatggggaaagcgtcattgggaagacctactctcaggtcatagctctgatccagaatagtgatgacactctggagctgtctatcatgcccaaggacgaggacatcctccagctggcctactcccaggatgcctacctgaaagggaacgagccgtattctggagaggcccgcagcatcccagagccaccgccgatctgctacccccgcaagacctacgcccctcctgcccgggcctccaccagggccactatggtgcctgagcccacctcagcactgcccagtgacccccggagtcctgctgcctggagtgacccggggctccgtgtgccacctgctgcccgtgcccacctggacaactcttccttggggatgagccagccccgccccagccctggtgccttcccccacctctcctcggagccccggacgccccgtgccttcccagagcctggcagccgggtgccccccagcagactggagtgccagcaggccttgtcacactggctgtcaaaccaggtaccccgccgggcgggggagagacggtgcccagccatggccccccgggcccgcagcgcctcccaggaccggttggaggaggtggctgccccccgcccgtggccctgctccacctcccaggatgctttgagccagctgggccaggagggctggcaccgagctcgctcagatgactacttgagccgggccacccgttctgccgaggcactggggccaggggcactggtgtcaccccgctttgagcggtgtggctgggcttcccagcgttcgtctgcccgcacccccgcctgcccaactcgggacctgccagggccccaggccccacccccgtctggcctgcagggcctggatgacctcgggtacatcggctaccggagctacagcccatcattccagcgccggaccggcctcctccatgcgctctccttccgggactcaccctttggggggctgcctaccttcaacctggcccagtcccctgcgtcattcccaccagaggcctccgagccacccagggttgtacggccggaacccagcacccgggccctggagcctcctgcggaggatcgcggcgatgaggtggtcctgaggcagaagcccccgacgggccgcaaggttcagctgacccccgcaagacagatgaaccttggatttggtgacgagtccccagagccagaggccagtgggcgaggggaacgcctgggcaggaaggtggcccctttggccaccaccgaagactctctggcttccatcccctttattgatgagcccaccagccccagcattgacctccaagccaagcacgtccctgcctctgctgtggtctccagtgccatgaactcagcccctgtcctgggcaccagcccatcttccccgaccttcactttcaccctcggacgccattactcgcaggactgcagcagcatcaaggctggccgccgctcctcctacctgctggccatcaccacggagcgctccaagtcctgcgatgatggactcaacaccttccgcgacgagggccgggttctgcggcgcctgccaaaccgcatacccagcctgcggatgctccggagcttcttcaccgacgggtccttggatagctggggcacctctgaagatgctgacgctccttctaagcgacactcaacctctgacctctcagatgcgaccttcagcgatatcaggagagaaggctggttgtattataagcagattctcaccaagaaggggaagaaagcgggcagcggcctgcgccagtggaagcgggtgtacgccgcgctgcgggcgcgctcgctctcgctgagcaaggagcggcgggagcccgggccggcggcggcgggggctgcggcggccggcgcaggtgaggacgaggcggcgcccgtctgcatcggctcctgcctcgtggacatctcctacagcgagaccaagaggaggcacgtgttccggctgaccaccgctgacttctgtgaatatctctttcaggctgaggaccgggatgacatgctgggctggatcagagcgatccgggagaacagcagggccgagggcgaggaccccggctgtgccaaccaagctctgatcagcaagaagcttaacgattatcgcaaagtgagccatagctctgggcccaaagctgattcctcccccaaaggctctcgcggcctggggggcctcaagtctgagttcctcaagcagagtgcggcacgtggcctcaggactcaggacctgcccgcagggagcaaggatgacagtgctgcagcccccaaaaccccctggggcatcaacatcatcaagaaaaataagaaggccgctccgagggcgtttggggtcaggctggaggagtgccagccagccacggagaaccagcgcgtccccttaatcgtggctgcatgctgtcgcattgtggaggcacgagggctggagtccacaggcatttaccgagtgcccggcaacaatgcagtggtgtccagcctacaggagcagctcaaccgcgggcctggtgacatcaacctgcaggatgagcgctggcaagacctcaatgtgatcagcagcctgctcaagtccttcttccgaaagctgcccgagcctcttttcactgatgacaaatacaacgacttcatcgaggccaaccgcattgaggacgcacgggagcgaatgaggacgctgcggaagctgatccgggatctcccaggacactactatgaaacgctcaaattccttgtgggccatctcaagaccatcgctgaccactctgagaaaaacaagatggaaccccggaacctggccctggtctttgggccgacactggtgaggacgtctgaggacaacatgacagacatggtgacccacatgcctgaccgctacaagatcgtggagacactgatccagcactcagactggttcttcagtgacgaagaggacaagggagagagaacccctgtgggcgacaaggagcctcaggcagtgcccaacattgagtacctcctgcccaacattggcaggacagtgccccctggcgacccggggtcagcggacctgttggagatttaaaggattctaccacctgtagttcagccaagtccaagggttcgtgggcccccaagaaggagccgtacgcccgggagatgctggcgatctccttcatctcggccgtcaaccgcaagcgcaagaagcggcgggaggcgcgggggctgggcagcagcaccgacgacgactcggagcaggaggcgcacaagcctggggcgggggccacagcgccggggactcaggagcggccgc

SEQ ID NO: 1373 - DNA, 546 bp, Homo sapiens; identical to SEQ ID NO: 1362
  source 1..546: mol_type = unassigned DNA; mol_type = unassigned DNA

SEQ ID NO: 1374 - DNA, 969 bp, Homo sapiens
  source 1..969: mol_type = unassigned DNA; mol_type = unassigned DNA
gaaggatgcgtgtgtgccggtctgctgtgcatgtgtgtatctgcatgtctgtgatgcatgcgcatgcgtctgtatgtgcattgtgtgtgcaggactttgattctgtgcaactctgtgcatatctatgtgtctacaaaagtgtgcacatgtgtactcatttgtgtgtgtgtatctgtgtgtctgcatatttgcacatgcttgtctgtatgtttgtggtatgttccgtctacatgagtgtatgtggctggggctgtgtctgcataagtatgtgtctatctgggagtgcatatatgtgtgcatgtgtgtgtgtgagattgtgcatgagctaagacaacgacaggcacttcctgggcaggaaggctgtatccagggtcctgcacatagtaggtgctcagtgaacatttgctgaactcagctgaactgaactgaatgaacttgcttcactgccactgggcccaagagatgggtgctctcctaggcgccccttcccctggcaggggccgaggacgctgctgctgtacaaaagtccccaggacggctttggcttcactctgcgccacttcatcgtgtacccacccgagtcggccgtgcactgcagcctgaaggaggaagagaatggaggccgtggaggaggaccctccccccggtaccgcctggagcccatggacaccatctttgtcaagaatgtgaaggaagacggccctgcccatagggcggggcttcgcacaggagaccggctggtaaaggtgaatggggaaagcgtcattgggaagacctactctcaggtcatagctctgatccagaatagtgatgacactctggagctgtctatcatgcccaaggacgaggacatcctccagctggcctactcccaggatgcctacctgaaagggaacgagccgtattctggagaggcccgcagcatcccagagccaccgccgatctgctacccccgcaagacctacgccc

SEQ ID NO: 1375 - DNA, 769 bp, Homo sapiens; identical to SEQ ID NO: 1364
  source 1..769: mol_type = unassigned DNA; mol_type = unassigned DNA

SEQ ID NO: 1376 - DNA, 488 bp, Homo sapiens; identical to SEQ ID NO: 1365
  source 1..488: mol_type = unassigned DNA; mol_type = unassigned DNA

SEQ ID NO: 1377 - DNA, 438 bp, Homo sapiens; identical to SEQ ID NO: 1366
  source 1..438: mol_type = unassigned DNA; mol_type = unassigned DNA

SEQ ID NO: 1378 - DNA, 407 bp, Homo sapiens; identical to SEQ ID NO: 1367
  source 1..407: mol_type = unassigned DNA; mol_type = unassigned DNA

SEQ ID NO: 1379 - DNA, 405 bp, Homo sapiens; identical to SEQ ID NO: 1368
  source 1..405: mol_type = unassigned DNA; mol_type = unassigned DNA

SEQ ID NO: 1380 - DNA, 659 bp, Homo sapiens; identical to SEQ ID NO: 1369
  source 1..659: mol_type = unassigned DNA; mol_type = unassigned DNA

SEQ ID NO: 1381 - DNA, 471 bp, Homo sapiens; identical to SEQ ID NO: 1370
  source 1..471: mol_type = unassigned DNA; mol_type = unassigned DNA

SEQ ID NO: 1382 - DNA, 4661 bp, Homo sapiens
  source 1..4661: mol_type = unassigned DNA; mol_type = unassigned DNA
ttgtactgtatatttacacattcacacacaatcaccctttctaacttctgggactctttgcgcaactgctaggatttctcaagtgcatgtggcaacacagcccagctccgggtggaaaccagcagggctctggaggggctcggagaccaggggagctgtcaaggctgcggcggggaccagagaggagcctggcgggggtggctgggtggctgggggaatccccccaacttcccatcgcaggcgcagctctctcggccgcctatttcctccgaaacccgcgctgcggagcagcccagtgcatagagttcaacacttccccttgttgtggaaagtaaaggagcctcactaccacctttttttctttgcgttttcttactgctggtcctgggagccttttccttcggagcagcagccctgtccggcatctgtcttgagctcccagcaaggaaagtccatcagcttgataatggaggagaacaatgactccacggagaacccccaacaaggccaagggcggcagaatgccatcaagtgtgggtggctgaggaagcaaggaggctttgtcaagacttggcatactcgctggtttgtgctcaagggggatcagctctattatttcaaagatgaagatgaaaccaagcccttgggtactatttttctgcctggaaataaagtttctgagcatccctgcaatgaagagaacccagggaagttcctttttgaagtagttccaggaggcgatcgagatcggatgacagcaaatcatgaaagctacctcctcatggcaagcacccagaatgatatggaagactgggtgaagtcaatccgccgagtcatatggggacctttcggaggaggcatttttggacagaaactggaggatactgttcgttatgagaagagatatgggaaccgtctggctccgatgttggtggagcagtgcgtggactttatccgacaaagggggctgaaagaagagggtctctttcgactgccaggccaggctaatcttgttaaggagctccaagatgcctttgactgtggggagaagccatcatttgacagcaacacagatgtacacacggtggcatcacttcttaagctgtacctccgagaacttccagaaccagttattccttatgcgaagtatgaagattttttgtcatgtgccaaactgctcagcaaggaagaggaagcaggtgttaaggaattagcaaagcaggtgaagagtttgccagtggtaaattacaacctcctcaagtatatttgcagattcttggatgaagtacagtcctactcgggagttaacaaaatgagtgtgcagaacttggcaacggtctttggtcctaatatcctgcgccccaaagtggaagatcctttgactatcatggagggcactgtggtggtccagcagttgatgtcagtgatgattagcaaacatgattgcctctttcccaaagatgcagaactacaaagcaagccccaagatggagtgagcaacaacaatgaaattcagaagaaagccaccatggggcagttacagaacaaggagaacaataacaccaaggacagccctagtaggcagtgctcctgggacaagtctgagtcaccccagagaagcagcatgaacaatggatcccccacagctctatcaggcagcaaaaccaacagcccaaagaacagtgttcacaagctagatgtgtctagaagcccccctctcatggtcaaaaagaacccagcctttaataagggtagtgggatagttaccaatgggtccttcagcagcagtaatgcagaaggtcttgagaaaacccaaaccacccccaatgggagcctacaggccagaaggagctcttcactgaaggtatctggtaccaaaatgggcacgcacagtgtacagaatggaacggtgcgcatgggcattttgaacagcgacacactcgggaaccccacaaatgttcgaaacatgagctggctgccaaatggctatgtgaccctgagggataacaagcagaaagaacaagctggagagttaggccagcacaacagactgtccacctatgataatgtccatcaacagttctccatgatgaaccttgatgacaagcagagcattgacagtgctacctggtccacttcctcctgtgaaatctccctccctgagaactccaactcctgtcgctcttctaccaccacctgcccagagcaagacttttttggggggaactttgaggaccctgttttggatgggcccccgcaggacgacctttcccaccccagggactatgaaagcaaaagtgaccacaggagtgtgggaggtcgaagtagtcgtgccaccagtagcagtgacaacagtgagacatttgtgggcaacagcagcagcaaccacagtgcactgcacagtttagtttccagcctgaaacaggaaatgaccaaacagaagatagagtatgagtccaggataaagagcttagaacagcgaaacttgactttggaaacagaaatgatgagcctccatgatgaactggatcaggagaggaaaaagttcacaatgatagaaataaaaatgcgaaatgccgagcgagcaaaagaagatgccgagaaaagaaatgacatgctacagaaagaaatggagcagtttttttccacgtttggagaactgacagtggaacccaggagaaccgagagaggaaacacaatatggattcagtgagcctgctttcgcctgctgtctctgatggctctggcaaggactccagggattctggtgggatatgacttagaaccaggtggctggtcacctggatgtacagaagtctaactggtgaaggaatatcatttacagacattaaacatccatatctgcaatgtgtaccaaagttatatcatgccccataatgctactgtcaagtgttacaactggatatgtgtatatagagtagtttttcaaaagtaaactaaaaatgagaagcatatttcaagaattattttattgcaagtcttgtatttaaatgttaaatcaatatgttgttgcaatttagcttgctttcaagcttcaccccttgcacttaacataagctatttttggcattgtgttatcatcggcttattttatagatcaatatttttatttcccttttttgctgaggaaatgaagataagcaaaaatataaatatatatataaatatatgagttattaaaatcagaagaatactttgtggctgtgctgtttgtgccaatagactttgtcatgaccaaaaagagaaatgtaaatagttttataaaatacagtcgaatcaccaggaacctttgagctgcttttaaaattcttcccctggcaccactcagttttgcttttgcgaggcgatttgacataggaactttgagactccatgagaaagtccctttctgaggcccactgtctaccttgccagatcctcagtgcgtatcgccaatgcaggatgctccttagaaaagaaaaaatggtaaagaatggcatttaacgattcaggctttgaattactctgtccctctggaccgaatctctttaactgctggatagttttagaggaattctcctgctacttaggtactgggaaacaatgcttgctaaaccatgcccacgtgagcacctgtctcccactcaaacctctcccatctcccaacaactgcactttagaataccagcagtgaaatggtattactgtttccctctgagtgaaactgctagagtatatgtcacgtagtgacatttttttctcactcaggctattgccatctgggattctctccctactacagctggcaaagttggtttgcagcaagaagatagtgggagggggccaggctgcaggagaaggagaaaagtttagaagaaacaaaccattttgcttctaattttgacagtatcactttcctgttaaaacatacaataattttaaaaggtgaatgcctaaagttccaattttagcaaatatgggaacctcagcaatgctaattttctagaaaaacccagggctctttggagctagagttttgggagaacagttcttcacaataaggcaatggttttgagaggccaggcaaataatctttctcaccgtagaacaaaaagttacaaaaggcataatcggaaatagagactacatacttgagtttatggggtttgtgttgtttgaaggttcaatgcttgcatgtgtttatttattttcaagagggaaagtggtctgtactgctttcatccttgccactgtcttgcttttattttttactctcccactgagcaagcgtctgtggtcctatggtatcaaccagtatctttatagcaataatttctttaattcccttttctctctctttccaattatttaaccagttacttccacctggacatacgataggaaattcaaactcaaaatatgaaaattgatcttaataactctcccttcatatcttttcacctatttccagtccttatcatagttgataaaaacctcagactcatccagaaagctatatgatgcactagtaaaaaaaacaaagatattcaaactgcttgggttcaaatggtatacaatttgccagctgttactgaaccttctatgcataactttttttttcctctgtgcaattggaataataaaaatactactcccataga

SEQ ID NO: 1383 - DNA, 1273 bp, Homo sapiens
  source 1..1273: mol_type = unassigned DNA; mol_type = unassigned DNA
gggctctggaggggctcggagaccaggggagctgtcaaggctgcggcggggaccagagaggagcctggcgggggtggctgggtggctgggggaatccccccaacttcccatcgcaggcgcagctctctcggccgcctatttcctccgaaacccgcgctgcggagcagcccagtgcatagagttcaacacttccccttgttgtggaaagtaaaggagcctcactaccacctttttttctttgcgttttcttactgctggtcctgggagccttttccttcggagcagcagccctgtccggcatctgtcttgagctcccagcaaggaaagtccatcagcttgataatggaggagaacaatgactccacggagaacccccaacaaggccaagggcggcagaatgccatcaagtgtgggtggctgaggaagcaaggaggctttgtcaagacttggcatactcgctggtttgtgctcaagggggatcagctctattatttcaaagatgaagatgaaaccaagcccttgggtactatttttctgcctggaaataaagtttctgagcatccctgcaatgaagagaacccagggaagttcctttttgaagtagttccaggaggcgatcgagatcggatgacagcaaatcatgaaagctacctcctcatggcaagcacccagaatgatatggaagactgggtgaagtcaatccgccgagtcatatggggacctttcggaggaggcatttttggacagaaactggaggatactgttcgttatgagaagagatatgggaaccgtctggctccgatgttggtggagcagtgcgtggactttatccgacaaagggggctgaaagaagagggtctctttcgactgccaggccaggctaatcttgttaaggagctccaagatgcctttgactgtggggagaagccatcatttgacagcaacacagatgtacacacggtggcatcacttcttaagctgtacctccgagaacttccagaaccagttattccttatgcgaagtatgaagattttttgtcatgtgccaaactgctcagcaaggaagaggaagcagtaagttgatgcatttatttccaaataagcttttgtttggaatttttttctgtgttcttagtcttaaatctgtaaatttccattgccctatcccggtgttactctccactatcctttgaattgacctcacacacactgagactttccgtatacagctcaagcaccatttccgatcccctctctgatcaaaaaaaaagaa

SEQ ID NO: 1384 - DNA, 857 bp, Homo sapiens
  source 1..857: mol_type = unassigned DNA; mol_type = unassigned DNA
aagtaaaggagcctcactaccacctttttttctttgcgttttcttactgctggtcctgggagccttttccttcggagcagcagccctgtccggcatctgtcttgagctcccagcaaggaaagtccatcagcttgataatggaggagaacaatgactccacggagaacccccaacaaggccaagggcggcagaatgccatcaagtgtgggtggctgaggaagcaaggaggctttgtcaagacttggcatactcgctggtttgtgctcaagggggatcagctctattatttcaaagatgaagatgaaaccaagcccttgggtactatttttctgcctggaaataaagtttctgagcatccctgcaatgaagagaacccagggaagttcctttttgaagtagttccagaggtctacttttccattcagtctgctagctgcaaggaggtttcatcttttggtgaagaagttctcaagtaatatagacggatattttcaatactgttttagagagagccatgtcttcaagaccaggaagtaacagataaaacctcttctccaacattgctattctaaatcatctgtttcacatgcagtgcgtatgacataatggcttttgatgaacaaagcctaagaagtttaagactgtgtaatatggaatatgaaggttgtcctttcaaacaaatttataggaaattcaagcttgcttctgtaattatggacttaaatatagtatgtgagtagatcatttgaaaagatgcttcctgaattattaatacagtatgtaatagctgctaaattaggttttataattctaaatcatcttacggagtgtgaagagaagtgttccaaatgtatctt

SEQ ID NO: 1385 - DNA, 485 bp, Homo sapiens
  source 1..485: mol_type = unassigned DNA; mol_type = unassigned DNA
ttactgctggtcctgggagccttttccttcggagcagcagccctgtccggcatctgtcttgagctcccagcaaggaaagtccatcagcttgataatggaggagaacaatgactccacggagaacccccaacaaggccaagggcggcagaatgccatcaagtgtgggtggctgaggaagcaaggaggctttgtcaagacttggcatactcgctggtttgtgctcaagggggatcagctctattatttcaaagatgaagatgaaaccaagcccttggtgagtaggagaaaatgtaaagcattaagggcctaagaaagccaagaaatagagggatttgctagaaaccgattgggactgagaccacccaaagctccctggtctccttcagttcattgtcatctttcacccttttacccattgcttgctttgagttggagataataaaatcgctaattgaggccaagaggcaaattatacttgtctaata

SEQ ID NO: 1386 - DNA, 631 bp, Homo sapiens
  source 1..631: mol_type = unassigned DNA; mol_type = unassigned DNA
cagaatgccatcaagtgtgggtggctgaggaagcaaggaggctttgtcaagacttggcatactcgctggtttgtgctcaagggggatcagctctattatttcaaagatgaagatgaaaccaagcccttgggtactatttttctgcctggaaataaagtttctgagcatccctgcaatgaagagaacccagggaagttcctttttgaagtagttccaggtaagatattttcctagtctgattaaattattgtcatcctgtgttggtaaaggtgaagatgggtcagacaggtttcattcttttttgaatcatgactgagaaccttaatttgaggcttggttagtgttgacgcagataatgactgcaggtttatatactagtacaaatgaatgcactcacacacacatactctgaccacataactactggattttcatttgtccatgagactccatagttgaccacaagtcatgatacagtatttgttcaggactattggagatgaatttgattttacagcgctcttgtgatgtgaaatttgacaaggggttataggttgaatgctttgcccagtggaatcactgacatatttcctcacaaaattgtatcttcaaggaggttttgcaaaaaaca

SEQ ID NO: 1387 - DNA, 567 bp, Homo sapiens
  source 1..567: mol_type = unassigned DNA; mol_type = unassigned DNA
ataactcattaggcttgaatgagatgctttgaactgtggtgactacagtaatgttcccctctgcatgttgaagtgacaagtgcctccttggcctattgctgatcctgcctgctgtagaaatctccagctgtccaatatttggaagaaaactggctgtgcgtgtagtagagatgctctctctttgtgaagaaggccctgcatacattaaacaagtccggtactatttttctgcctggaaataaagtttctgagcatccctgcaatgaagagaacccagggaagttcctttttgaagtagttccaggaggcgatcgagatcggatgacagcaaatcatgaaagctacctcctcatggcaagcacccagaatgatatggaagactgggtgaagtcaatccgccgagtcatatggggacctttcggaggaggcatttttggacagaaactggaggatactgttcgttatgagaagagatatgggaaccgtctggctccgatgttggtggagcagtgcgtggactttatccgacaaagggggctgaaagaagagggtctctttcgactgcca

SEQ ID NO: 1388 - DNA, 2740 bp, Homo sapiens
  source 1..2740: mol_type = unassigned DNA; mol_type = unassigned DNA
ggatgggaggatactgactaagtctgagaaggaggagaaagaaaattagctacaggaagagtttatatccccttctacaagaaaacttaaatatagctaccaccgctttgaaaggaatggtttgtgtccaaacagcattttccagacaagctctgtacttttttgccaaaagaattaactttaaactgaaggcagtggacagttaaacaagagtcggcactgggaacagctgtgcgtagaccagaccagtgacttataaggaggcgatcgagatcggatgacagcaaatcatgaaagctacctcctcatggcaagcacccagaatgatatggaagactgggtgaagtcaatccgccgagtcatatggggacctttcggaggaggcatttttggacagaaactggaggatactgttcgttatgagaagagatatgggaaccgtctggctccgatgttggtggagcagtgcgtggactttatccgacaaagggggctgaaagaagagggtctctttcgactgccaggccaggctaatcttgttaaggagctccaagatgcctttgactgtggggagaagccatcatttgacagcaacacagatgtacacacggtggcatcacttcttaagctgtacctccgagaacttccagaaccagttattccttatgcgaagtatgaagattttttgtcatgtgccaaactgctcagcaaggaagaggaagcaggtgttaaggaattagcaaagcaggtgaagagtttgccagtggtaaattacaacctcctcaagtatatttgcagattcttggatgaagtacagtcctactcgggagttaacaaaatgagtgtgcagaacttggcaacggtctttggtcctaatatcctgcgccccaaagtggaagatcctttgactatcatggagggcactgtggtggtccagcagttgatgtcagtgatgattagcaaacatgattgcctctttcccaaagatgcagaactacaaagcaagccccaagatggagtgagcaacaacaatgaaattcagaagaaagccaccatggggcagttacagaacaaggagaacaataacaccaaggacagccctagtaggcagtgctcctgggacaagtctgagtcaccccagagaagcagcatgaacaatggatcccccacagctctatcaggcagcaaaaccaacagcccaaagaacagtgttcacaagctagatgtgtctagaagcccccctctcatggtcaaaaagaacccagcctttaataagggtagtgggatagttaccaatgggtccttcagcagcagtaatgcagaaggtcttgagaaaacccaaaccacccccaatgggagcctacaggccagaaggagctcttcactgaaggtatctggtaccaaaatgggcacgcacagtgtacagaatggaacggtgcgcatgggcattttgaacagcgacacactcgggaaccccacaaatgttcgaaacatgagctggctgccaaatggctatgtgaccctgagggataacaagcagaaagaacaagctggagagttaggccagcacaacagactgtccacctatgataatgtccatcaacagttctccatgatgaaccttgatgacaagcagagcattgacagtgctacctggtccacttcctcctgtgaaatctccctccctgagaactccaactcctgtcgctcttctaccaccacctgcccagagcaagacttttttggggggaactttgaggaccctgttttggatgggcccccgcaggacgacctttcccaccccagggactatgaaagcaaaagtgaccacaggagtgtgggaggtcgaagtagtcgtgccaccagtagcagtgacaacagtgagacatttgtgggcaacagcagcagcaaccacagtgcactgcacagtttagtttccagcctgaaacaggaaatgaccaaacagaagatagagtatgagtccaggataaagagcttagaacagcgaaacttgactttggaaacagaaatgatgagcctccatgatgaactggatcaggagaggaaaaagttcacaatgatagaaataaaaatgcgaaatgccgagcgagcaaaagaagatgccgagaaaagaaatgacatgctacagaaagaaatggagcagtttttttccacgtttggagaactgacagtggaacccaggagaaccgagagaggaaacacaatatggattcagtgagcctgctttcgcctgctgtctctgatggctctggcaaggactccagggattctggtgggatatgacttagaaccaggtggctggtcacctggatgtacagaagtctaactggtgaaggaatatcatttacagacattaaacatccatatctgcaatgtgtaccaaagttatatcatgccccataatgctactgtcaagtgttacaactggatatgtgtatatagagtagtttttcaaaagtaaactaaaaatgagaagcatatttcaagaattattttattgcaagtcttgtatttaaatgttaaatcaatatgttgttgcaatttagcttgctttcaagcttcaccccttgcacttaacataagctatttttggcattgtgttatcatcggcttattttatagatcaatatttttatttcccttttttgctgaggaaatgaagataagcaaaaatataaatatatatataaatatatgagttattaaaatcagaagaata

SEQ ID NO: 1389 - DNA, 572 bp, Homo sapiens
  source 1..572: mol_type = unassigned DNA; mol_type = unassigned DNA
tttttacctgagctcagtagctggggagcccactagtgctggggagcgagccgtggtttccattcctgggtgatggagtcatgggagaaactgcagtgagcaaacacagtaggacctgagttgggctcgaatgtgctttaagcgactcaggacagagcagctgctctgtctcccagcttgcaagtgcagcctgcatttgtcactgaccactgaagtgtatgtttgtgcaaggcatttttggacagaaactggaggatactgttcgttatgagaagagatatgggaaccgtctggctccgatgttggtggagcagtgcgtggactttatccgacaaagggggctgaaagaagagggtctctttcgactgccaggccaggctaatcttgttaaggagctccaagatgcctttgactgtggggagaagccatcatttgacagcaacacagatgtacacacggtggcatcacttcttaagctgtacctccgagaacttccagaaccagttattccttatgcgaagtatgaagattttttgtcatgtgccaaactgctcagcaaggaagaggaagca

SEQ ID NO: 1390 - DNA, 1936 bp, Homo sapiens
  source 1..1936: mol_type = unassigned DNA; mol_type = unassigned DNA
aggacagagcagctgctctgtctcccagcttgcaagtgcagcctgcatttgtcactgaccactgaagtgtatgtttgtgcaaggaggcgatcgagatcggatgacagcaaatcatgaaagctacctcctcatggcaagcacccagaatgatatggaagactgggtgaagtcaatccgccgagtcatatggggacctttcggaggaggcatttttggacagaaactggaggatactgttcgttatgagaagagatatgggaaccgtctggctccgatgttggtggagcagtgcgtggactttatccgacaaagggggctgaaagaagagggtctctttcgactgccaggccaggctaatcttgttaaggagctccaagatgcctttgactgtggggagaagccatcatttgacagcaacacagatgtacacacggtggcatcacttcttaagctgtacctccgagaacttccagaaccagttattccttatgcgaagtatgaagattttttgtcatgtgccaaactgctcagcaaggaagaggaagcaggtgttaaggaattagcaaagcaggtgaagagtttgccagtggtaaattacaacctcctcaagtatatttgcagattcttggatgaagtacagtcctactcgggagttaacaaaatgagtgtgcagaacttggcaacggtctttggtcctaatatcctgcgccccaaagtggaagatcctttgactatcatggagggcactgtggtggtccagcagttgatgtcagtgatgattagcaaacatgattgcctctttcccaaagatgcagaactacaaagcaagccccaagatggagtgagcaacaacaatgaaattcagaagaaagccaccatggggcagttacagaacaaggagaacaataacaccaaggacagccctagtaggcagtgctcctgggacaagtctgagtcaccccagagaagcagcatgaacaatggatcccccacagctctatcaggcagcaaaaccaacagcccaaagaacagtgttcacaagctagatgtgtctagaagcccccctctcatggtcaaaaagaacccagcctttaataagggtagtgggatagttaccaatgggtccttcagcagcagtaatgcagaaggtcttgagaaaacccaaaccacccccaatgggagcctacaggccagaaggagctcttcactgaaggtatctggtaccaaaatgggcacgcacagtgtacagaatggaacggtgcgcatgggcattttgaacagcgacacactcgggaaccccacaaatgttcgaaacatgagctggctgccaaatggctatgtgaccctgagggataacaagcagaaagaacaagctggagagttaggccagcacaacagactgtccacctatgataatgtccatcaacagttctccatgatgaaccttgatgacaagcagagcattgacagtgctacctggtccacttcctcctgtgaaatctccctccctgagaactccaactcctgtcgctcttctaccaccacctgcccagagcaagacttttttggggggaactttgaggaccctgttttggatgggcccccgcaggacgacctttcccaccccagggactatgaaagcaaaagtgaccacaggagtgtgggaggtcgaagtagtcgtgccaccagtagcagtgacaacagtgagacatttgtgggcaacagcagcagcaaccacagtgcactgcacagtttagtttccagcctgaaacaggaaatgaccaaacagaagatagagtatgagtccaggataaagagcttagaacagcgaaacttgactttggaaacagaaatgatgagcctccatgatgaactggatcaggagaggaaaaagttcacaatgatagaaataaaaatgcgaaatgccgagcgagca

SEQ ID NO: 1391 - DNA, 725 bp, Homo sapiens
  source 1..725: mol_type = unassigned DNA; mol_type = unassigned DNA
tcaatccgccgagtcatatggggacctttcggaggaggcatttttggacagaaactggaggatactgttcgttatgagaagagatatgggaaccgtctggctccgatgttggtggagcagtgcgtggactttatccgacaaagggggctgaaagaagagggtctctttcgactgccaggccaggctaatcttgttaaggagctccaagatgcctttgactgtggggagaagccatcatttgacagcaacacagatgtacacacggtggcatcacttcttaagctgtacctccgagaacttccagaaccagttattccttatgcgaagtatgaagattttttgtcatgtgccaaactgctcagcaaggaagaggaagcaggtgttaaggaattagcaaagcaggtgaagagtttgccagtggtaaattacaacctcctcaagtatatttgcaggtttcatcaaagacatttgtaactgaattctgttagaaaaataattgtgccagaaaaataattgtgcctggaaaatatacctctcaatgtataactcaagacctgggatgggatatgccatatatgtgctcctgtttaagaaaccaaatatgcaaaattgaaacagaataaatttaaatagagagtgatgattggcactacaagtcactgcagggtgtcttacatgatagcttcccagtccattttaaaataaaattcaaagttttaattgag

SEQ ID NO: 1392 - DNA, 429 bp, Homo sapiens
  source 1..429: mol_type = unassigned DNA; mol_type = unassigned DNA
ttttatattttagaataacttcaaaagcttagttttaaaagttggcatttttggacagaaactggaggatactgttcgttatgagaagagatatgggaaccgtctggctccgatgttggtggagcagtgcgtggactttatccgacaaagggggctgaaagaagagggtctctttcgactgccaggccaggctaatcttgttaaggagctccaagatgcctttgactgtggggagaagccatcatttgacaggtagatgtcacaattttactagccatcttcactgagaaattcagactcaactgacaggatgcagtgagctgaggaggcataaccttgattgatgtggtaacagtttacaacatagattatttggccacaggagtttgcattgtttctattaagttacaaagtcaaaaattgggcacc

SEQ ID NO: 1393 - DNA, 4572 bp, Homo sapiens
  source 1..4572: mol_type = unassigned DNA; mol_type = unassigned DNA
gggagtttgaagacagaaaggaaaggggagaaacctgcagagagcatcaaaggatggggggtgctataaaagaagcaggggggtcctttgaaagaaatctatcatgcactgaaatgctttctggagaaggtgccattattttcctcccctcttgctcagatgaaaggagccagcaaggacagtcctgaaatattcctcaggggactttttgtcattgttcctctttcctcttgcacagagctatttgctgacctttccagaggaatctcagtccagctgagaagacagttcttaataaaaacaaaaaaatgcaaaaaccaattcctgctgtttgaatgggaatggtagcttgcttgctgcagttcttttcctgtgacattttggaatgtctgcagaaacttaaaaaaaagaaaaaaaaaaccttaaaaactccctggattaggcaagagaaaaggaagtttttttttgctaaacaggagtaaatgagaggtggtaacttatccctaagccaggacctggatgatcaaaaccttcaaattctagggatcagcacttcaaaaataacaagtaaacaagcatgaggagtggctgttgggtttcgctcagaggcaggttttaaaggaagccaaaaccgggttcagaacttcaggcctgtacgatgcctgaagaccggaattctggggggtgcccggctggtgccttagcctcaactcctttcatccctaaaactacatacagaagaatcaaacggtgttttagttttcggaaaggcatttttggacagaaactggaggatactgttcgttatgagaagagatatgggaaccgtctggctccgatgttggtggagcagtgcgtggactttatccgacaaagggggctgaaagaagagggtctctttcgactgccaggccaggctaatcttgttaaggagctccaagatgcctttgactgtggggagaagccatcatttgacagcaacacagatgtacacacggtggcatcacttcttaagctgtacctccgagaacttccagaaccagttattccttatgcgaagtatgaagattttttgtcatgtgccaaactgctcagcaaggaagaggaagcaggtgttaaggaattagcaaagcaggtgaagagtttgccagtggtaaattacaacctcctcaagtatatttgcagattcttggatgaagtacagtcctactcgggagttaacaaaatgagtgtgcagaacttggcaacggtctttggtcctaatatcctgcgccccaaagtggaagatcctttgactatcatggagggcactgtggtggtccagcagttgatgtcagtgatgattagcaaacatgattgcctctttcccaaagatgcagaactacaaagcaagccccaagatggagtgagcaacaacaatgaaattcagaagaaagccaccatggggcagttacagaacaaggagaacaataacaccaaggacagccctagtaggcagtgctcctgggacaagtctgagtcaccccagagaagcagcatgaacaatggatcccccacagctctatcaggcagcaaaaccaacagcccaaagaacagtgttcacaagctagatgtgtctagaagcccccctctcatggtcaaaaagaacccagcctttaataagggtagtgggatagttaccaatgggtccttcagcagcagtaatgcagaaggtcttgagaaaacccaaaccacccccaatgggagcctacaggccagaaggagctcttcactgaaggtatctggtaccaaaatgggcacgcacagtgtacagaatggaacggtgcgcatgggcattttgaacagcgacacactcgggaaccccacaaatgttcgaaacatgagctggctgccaaatggctatgtgaccctgagggataacaagcagaaagaacaagctggagagttaggccagcacaacagactgtccacctatgataatgtccatcaacagttctccatgatgaaccttgatgacaagcagagcattgacagtgctacctggtccacttcctcctgtgaaatctccctccctgagaactccaactcctgtcgctcttctaccaccacctgcccagagcaagacttttttggggggaactttgaggaccctgttttggatgggcccccgcaggacgacctttcccaccccagggactatgaaagcaaaagtgaccacaggagtgtgggaggtcgaagtagtcgtgccaccagtagcagtgacaacagtgagacatttgtgggcaacagcagcagcaaccacagtgcactgcacagtttagtttccagcctgaaacaggaaatgaccaaacagaagatagagtatgagtccaggataaagagcttagaacagcgaaacttgactttggaaacagaaatgatgagcctccatgatgaactggatcaggagaggaaaaagttcacaatgatagaaataaaaatgcgaaatgccgagcgagcaaaagaagatgccgagaaaagaaatgacatgctacagaaagaaatggagcagtttttttccacgtttggagaactgacagtggaacccaggagaaccgagagaggaaacacaatatggattcagtgagcctgctttcgcctgctgtctctgatggctctggcaaggactccagggattctggtgggatatgacttagaaccaggtggctggtcacctggatgtacagaagtctaactggtgaaggaatatcatttacagacattaaacatccatatctgcaatgtgtaccaaagttatatcatgccccataatgctactgtcaagtgttacaactggatatgtgtatatagagtagtttttcaaaagtaaactaaaaatgagaagcatatttcaagaattattttattgcaagtcttgtatttaaatgttaaatcaatatgttgttgcaatttagcttgctttcaagcttcaccccttgcacttaacataagctatttttggcattgtgttatcatcggcttattttatagatcaatatttttatttcccttttttgctgaggaaatgaagataagcaaaaatataaatatatatataaatatatgagttattaaaatcagaagaatactttgtggctgtgctgtttgtgccaatagactttgtcatgaccaaaaagagaaatgtaaatagttttataaaatacagtcgaatcaccaggaacctttgagctgcttttaaaattcttcccctggcaccactcagttttgcttttgcgaggcgatttgacataggaactttgagactccatgagaaagtccctttctgaggcccactgtctaccttgccagatcctcagtgcgtatcgccaatgcaggatgctccttagaaaagaaaaaatggtaaagaatggcatttaacgattcaggctttgaattactctgtccctctggaccgaatctctttaactgctggatagttttagaggaattctcctgctacttaggtactgggaaacaatgcttgctaaaccatgcccacgtgagcacctgtctcccactcaaacctctcccatctcccaacaactgcactttagaataccagcagtgaaatggtattactgtttccctctgagtgaaactgctagagtatatgtcacgtagtgacatttttttctcactcaggctattgccatctgggattctctccctactacagctggcaaagttggtttgcagcaagaagatagtgggagggggccaggctgcaggagaaggagaaaagtttagaagaaacaaaccattttgcttctaattttgacagtatcactttcctgttaaaacatacaataattttaaaaggtgaatgcctaaagttccaattttagcaaatatgggaacctcagcaatgctaattttctagaaaaacccagggctctttggagctagagttttgggagaacagttcttcacaataaggcaatggttttgagaggccaggcaaataatctttctcaccgtagaacaaaaagttacaaaaggcataatcggaaatagagactacatacttgagtttatggggtttgtgttgtttgaaggttcaatgcttgcatgtgtttatttattttcaagagggaaagtggtctgtactgctttcatccttgccactgtcttgcttttattttttactctcccactgagcaagcgtctgtggtcctatggtatcaaccagtatctttatagcaataatttctttaattcccttttctctctctttccaattatttaaccagttacttccacctggacatacgataggaaattcaaactcaaaatatgaaaattgatcttaataactctcccttcatatcttttcacctatttccagtccttatcatagttgataaaaacctcagactcatccagaaagctatatgatgcactagtaaaaaaaacaaagatattcaaactgcttgggttcaaatggtatacaatttgccagctgttactgaaccttctatgcataactttttttttcctctgtgcaattggaataataaaaatactactcccata

SEQ ID NO: 1394 - DNA, 1227 bp, Homo sapiens
  source 1..1227: mol_type = unassigned DNA; mol_type = unassigned DNA
gtttacctaagctagcctgggcaatggcgggcgcccctcccccagcttctctgcggccttgcagtttgatctcagactgctgtgctagcaatcagcgagactccgcgggcgtaggaccctccgagccagagtctcctgcaatgattcagacttggctttactggcttcttccatagataagcaccagcctaggagctctcaaagttgttccagctaaaggacacactcagcttttggtctacagtgacttccagcctaagtggctctggacactgctggaaccccccgctccatctccctccataaatatgtctctgcagcagctcggtcaaggagtgtgatgactggcgagcagatggctgccttccatccatcgtccacccccaacccgctggagaggcccatcaagatgggctggctgaagaagcagaggtccatcgtgaagaactggcagcagaggtactttgtgctgagggcgcagcagctctactactacaaggatgaagaggacacgaagccccagggctgcatgtatctaccaggatgtacaatcaaggagatcgccacaaacccagaagaagctgggaagtttgtctttgaaatcattccagcctcatgggaccagaatcgcatgggacaggactcctatgtcctcatggccagctctcaggcggagatggaggagtgggttaaattcctcaggagagttgctggcacaccctgtggagcagtgtttggccagcgcttggatgagactgtggcctatgaacagaaattcggcccccatctggtgcccatcctggtggagaaatgtgcagagttcatcctggagcacggccggaatgaagagggcatcttccgtctgcctgggcaggacaacctggtgaagcagctgagagacgcttttgatgctggggagcggccctcctttgacagagacacagatgtgcacactgtggcttccctgttaaagctctacctccgagacctcccagagcccgtggttccctggagccagtacgaagggttcctgctctgtgggcagctcacgaatgcggatgaggcaaagaactacaggaacaggaatgactgccaaagtgttgtttctgcacagatacaccaattctgtcccagggtctccttgctggcacatgggcaggctcatttactggtaaatgatttacttgtgtaaatctcttcccaggctcagcaggagttgatgaagca

SEQ ID NO: 1395 - DNA, 908 bp, Homo sapiens
  source 1..908: mol_type = unassigned DNA; mol_type = unassigned DNA
aaagggaactccctgaccccttgcgcttcccaagtgaggcaatgcctcgccctgctttggctcgcgcacagtgcgcgcacccactgacctgcgcccactgtctggcactccctagtgagatgaacccggtacctcagatggaaatgcagaaatcacccatcttctgcgtcgctcacgctggtagctgtagaccggagctgttcctattcggccatcttggctcctcctcaatttttgtatatagtgaaagagtctcctgcaatgattcagacttggctttactggcttcttccatagataagcaccagcctaggagctctcaaagttgttccagctaaaggacacactcagcttttggtctacagtgacttccagcctaagtggctctggacactgctggaaccccccgctccatctccctccataaatatgtctctgcagcagtaaatgctaaagggagtccttcctgcaggttgatataaaaggacactaaacaataacttgatgccatatgaagaaaaaaagatctcagcaaagctcggtcaaggagtgtgatgactggcgagcagatggctgccttccatccatcgtccacccccaacccgctggagaggcccatcaagatgggctggctgaagaagcagaggtccatcgtgaagaactggcagcagaggtactttgtgctgagggcgcagcagctctactactacaaggatgaagaggacacgaagccccagggctgcatgtatctaccaggatgtacaatcaaggagatcgccacaaacccagaagaagctgggaagtttgtctttgaaatcattccagcctcatgggaccagaatcgcatgggacaggactcctatgtcctcatggccagctctcaggcggagatggaggagtgggttaaa

SEQ ID NO: 1396 - DNA, 582 bp, Homo sapiens
  source 1..582: mol_type = unassigned DNA; mol_type = unassigned DNA
gagatgaacccggtacctcagatggaaatgcagaaatcacccatcttctgcgtcgctcacgctggtagctgtagaccggagctgttcctattcggccatcttggctcctcctcaatttttgtatatagtgaaagagtctcctgcaatgattcagacttggctttactggcttcttccatagataagcaccagcctaggagctctcaaagttgttccagctaaaggacacactcagcttttggtctacagtgacttccagcctaagtggctctggacactgctggaaccccccgctccatctccctccataaatatgtctctgcagcagctcggtcaaggagtgtgatgactggcgagcagatggctgccttccatccatcgtccacccccaacccgctggagaggcccatcaagatgggctggctgaagaagcagaggtccatcgtgaagaactggcagcagaggtactttgtgctgagggcgcagcagctctactactacaaggatgaagaggacacgaagccccagggctgcatgtatctaccaggatgtacaatcaaggagatcgccacaaacccagaa

SEQ ID NO: 1397 - DNA, 2945 bp, Homo sapiens
  source 1..2945: mol_type = unassigned DNA; mol_type = unassigned DNA
agtaaggcctgagattctttcgaaaaggagctttgcttcccatgacgcagagggaagtgtcaactgggatatttctggtaaaactgaaagcaagaaaagcagggtgctagcccctgtgggactgagggtggaggctgggggagtttgggtgccatcctccagtgacagatggatggacctttcatctaagagaaaggaggagacacgttggcaaatcagcctcaagcctaagattgcttgtgaagcaatcataaggaggaacaaaaacagacacaaaaacagagggaaagagtgaaaagacaagaagggcgcaaactgtgacagactcaccgcttcactaactactcacttaaactggaagcaaaatgtccctaaaattgccaaggaactgggatttcaacctgaaagtggaggctgcgaaaatagctcggtcaaggagtgtgatgactggcgagcagatggctgccttccatccatcgtccacccccaacccgctggagaggcccatcaagatgggctggctgaagaagcagaggtccatcgtgaagaactggcagcagaggtactttgtgctgagggcgcagcagctctactactacaaggatgaagaggacacgaagccccagggctgcatgtatctaccaggatgtacaatcaaggagatcgccacaaacccagaagaagctgggaagtttgtctttgaaatcattccagcctcatgggaccagaatcgcatgggacaggactcctatgtcctcatggccagctctcaggcggagatggaggagtgggttaaattcctcaggagagttgctggcacaccctgtggagcagtgtttggccagcgcttggatgagactgtggcctatgaacagaaattcggcccccatctggtgcccatcctggtggagaaatgtgcagagttcatcctggagcacggccggaatgaagagggcatcttccgtctgcctgggcaggacaacctggtgaagcagctgagagacgcttttgatgctggggagcggccctcctttgacagagacacagatgtgcacactgtggcttccctgttaaagctctacctccgagacctcccagagcccgtggttccctggagccagtacgaagggttcctgctctgtgggcagctcacgaatgcggatgaggcaaaggctcagcaggagttgatgaagcagctctccatccttcctcgtgacaactatagtctcctgagctacatctgcaggttcctacatgaaatacagctgaactgtgctgttaacaagatgagtgtggacaacctggctactgtgattggtgtgaatctcatcaggtcgaaggtcgaagaccctgccgtgatcatgagagggactcctcagatccaaagagtgatgactatgatgatcagagaccatgaagtcctcttccccaagtccaaggatatacccctgtcaccccctgcccagaaaaatgaccccaagaaagctccagtggcccgaagctctgtaggctgggatgccactgaagacctccgaatttctaggacagacagcttcagtagcatgacaagcgactctgatacaaccagccccaccggacagcagccgagcgatgcgtttccggaggacagcagcaaagtacccagggaaaagccaggagactggaaaatgcaatctcgtaaaaggactcaaacactccctaaccggaaatgtttcttgacatcagcttttcagggtgccaacagcagcaaaatggagatctttaaaaatgaattctggtcgccttcctcagaggctaaggcaggggaagggcacaggagaacgatgtctcaagacttgcgccaactttctgactcccaacggacttccacctacgataacgtcccttccctgccagggtcccctggggaggaagccagtgcactctcttcccaagcctgtgactccaagggagatactcttgccagtccaaactctgaaactgggcctggaaaaaagaactctggagaagaggaaattgattctttgcagaggatggtccaagagctacgaaaggaaatagaaacacagaagcaaatgtatgaggaacagattaaaaaccttgagaaggaaaattatgacgtttgggctaaagtggtgaggctcaatgaagaactggagaaggaaaagaagaagtctgcagccctagagatcagcctccgcaacatggagcgctcccgggaggatgttgagaagaggaacaaggccttggaagaagaagtcaaggaatttgtcaaatccatgaaggaacccaagaccgaggcttaagggtcccaggagtactgcagggacagccccagagaggcccaactctggcccctttctcagtgctatctgatgacggggaaacaaaattattctctgagagggaaaggacatttgagggaaacatcaaatttccccataaataaatgaatggagtttgcaggaaggtgagggtgagcagagatgtgtgtggacatctctgaccatccatcgctgtattcaaatggattgttttattccattctggtctcaggcatgaccacgtccagtgaagacatttgaggcagcacatctcaggacccaggcaatagactggccccaactcaggctggactaaggtgtgattaattctttgttttttgtgtggaacagctcaccttgtcagacagcctcagggcatctctgagacacaggggcagaaaatgacattcatcttttgagtcctcatccatggagtgctgtgtttggggggctgcatctgctgaagcgagaaccccattctgccaccccaccaggatgcccattctccaggacttctccaacttactattagactaaaccagaacaagcaacaaactgtatttatgcaagcaaaattgatgagaaaattatattcaaataaagcaaaaattaaaaaaaaaa

SEQ ID NO: 1398 - DNA, 1000 bp, Homo sapiens
  source 1..1000: mol_type = unassigned DNA; mol_type = unassigned DNA
ctttgcttcccatgacgcagagggaagtgtcaactgggatatttctggtaaaactgaaagcaagaaaagcagggtgctagcccctgtgggactgagggtggaggctgggggagtttgggtgccatcctccagtgacagatggatggacctttcatctaagagaaaggaggagacacgttggcaaatcagcctcaagcctaagattgcttgtgaagcaatcataaggaggaacaaaaacagacacaaaaacagagggaaagagtgaaaagacaagaagggcgcaaactgtgacagactcaccgcttcactaactactcacttaaactggaagcaaaatgtccctaaaattgccaaggaactgggatttcaacctgaaagtggaggctgcgaaaatagctcggtcaaggagtgtgatgactggcgagcagatggctgccttccatccatcgtccacccccaacccgctggagaggcccatcaagatgggctggctgaagaagcagaggtccatcgtgaagaactggcagcagaggtactttgtgctgagggcgcagcagctctactactacaaggatgaagaggacacgaagccccagggctgcatgtatctaccaggatgtacaatcaaggagatcgccacaaacccagaagaagctgggaagtttgtctttgaaatcattccagcagtgtttggccagcgcttggatgagactgtggcctatgaacagaaattcggcccccatctggtgcccatcctggtggagaaatgtgcagagttcatcctggagcacggccggaatgaagagggcatcttccgtctgcctgggcaggacaacctggtgaagcagctgagagacgcttttgatgctggggagcggccctcctttgacagagacacagatgtgcacactgtggcttccctgttaaagctctacctccgagacctcccagagcccgtggttccctggagccagtacgaagggttcctgctctgtgggca

SEQ ID NO: 1399 - DNA, 2247 bp, Homo sapiens
  source 1..2247: mol_type = unassigned DNA; mol_type = unassigned DNA
cagagggaagtgtcaactgggatatttctggtaaaactgaaagcaagaaaagcagggtgctagcccctgtgggactgagggtggaggctgggggagtttgggtgccatcctccagtgacagatggatggacctttcatctaagagaaaggaggagacacgttggcaaatcagcctcaagcctaagattgcttgtgaagcaatcataaggaggaacaaaaacagacacaaaaacagagggaaagagtgaaaagacaagaagggcgcaaactgtgacagactcaccgcttcactaactactcacttaaactggaagcaaaatgtccctaaaattgccaaggaactgggatttcaacctgaaagtggaggctgcgaaaatagctcggtcaaggagtgtgatgactggcgagcagatggctgccttccatccatcgtccacccccaacccgctggagaggcccatcaagatgggctggctgaagaagcagaggtccatcgtgaagaactggcagcagaggtactttgtgctgagggcgcagcagctctactactacaaggatgaagaggacacgaagccccagggctgcatgtatctaccaggatgtacaatcaaggagatcgccacaaacccagaagaagctgggaagtttgtctttgaaatcattccagtgtttggccagcgcttggatgagactgtggcctatgaacagaaattcggcccccatctggtgcccatcctggtggagaaatgtgcagagttcatcctggagcacggccggaatgaagagggcatcttccgtctgcctgggcaggacaacctggtgaagcagctgagagacgcttttgatgctggggagcggccctcctttgacagagacacagatgtgcacactgtggcttccctgttaaagctctacctccgagacctcccagagcccgtggttccctggagccagtacgaagggttcctgctctgtgggcagctcacgaatgcggatgaggcaaaggctcagcaggagttgatgaagcagctctccatccttcctcgtgacaactatagtctcctgagctacatctgcaggttcctacatgaaatacagctgaactgtgctgttaacaagatgagtgtggacaacctggctactgtgattggtgtgaatctcatcaggtcgaaggtcgaagaccctgccgtgatcatgagagggactcctcagatccaaagagtgatgactatgatgatcagagaccatgaagtcctcttccccaagtccaaggatatacccctgtcaccccctgcccagaaaaatgaccccaagaaagctccagtggcccgaagctctgtaggctgggatgccactgaagacctccgaatttctaggacagacagcttcagtagcatgacaagcgactctgatacaaccagccccaccggacagcagccgagcgatgcgtttccggaggacagcagcaaagtacccagggaaaagccaggagactggaaaatgcaatctcgtaaaaggactcaaacactccctaaccggaaatgtttcttgacatcagcttttcagggtgccaacagcagcaaaatggagatctttaaaaatgaattctggtcgccttcctcagaggctaaggcaggggaagggcacaggagaacgatgtctcaagacttgcgccaactttctgactcccaacggacttccacctacgataacgtcccttccctgccagggtcccctggggaggaagccagtgcactctcttcccaagcctgtgactccaagggagatactcttgccagtccaaactctgaaactgggcctggaaaaaagaactctggagaagaggaaattgattctttgcagaggatggtccaagagctacgaaaggaaatagaaacacagaagcaaatgtatgaggaacagattaaaaaccttgagaaggaaaattatgacgtttgggctaaagtggtgaggctcaatgaagaactggagaaggaaaagaagaagtctgcagccctagagatcagcctccgcaacatggagcgctcccgggaggatgttgagaagaggaacaaggccttggaagaagaagtcaaggaatttgtcaaatccatgaaggaacccaagaccgaggcttaagggtcccaggagtactgcagggacagccccagagaggcccaactctggcccctttctcagtgctatctgatgacggggaaacaaaattattctctgagagggaaagga

SEQ ID NO: 1400 - DNA, 599 bp, Homo sapiens
  source 1..599: mol_type = unassigned DNA; mol_type = unassigned DNA
gggactgagggtggaggctgggggagtttgggtgccatcctccagtgacagatggatggacctttcatctaagagaaaggaggagacacgttggcaaatcagcctcaagcctaagattgcttgtgaagcaatcataaggaggaacaaaaacagacacaaaaacagagggaaagagtgaaaagacaagaagggcgcaaactgtgacagactcaccgcttcactaactactcacttaaactggaagcaaaatgtccctaaaattgccaaggaactgggatttcaacctgaaagtggaggctgcgaaaatagtaaatgctaaagggagtccttcctgcaggttgatataaaaggacactaaacaataacttgatgccatatgaagaaaaaaagatctcagcaaagctcggtcaaggagtgtgatgactggcgagcagatggctgccttccatccatcgtccacccccaacccgctggagaggcccatcaagatgggctggctgaagaagcagaggtccatcgtgaagaactggcagcagaggtactttgtgctgagggcgcagcagctctactactacaaggatgaagaggacacgaagccc

SEQ ID NO: 1401 - DNA, 990 bp, Homo sapiens
  source 1..990: mol_type = unassigned DNA; mol_type = unassigned DNA
gaagcaatcataaggaggaacaaaaacagacacaaaaacagagggaaagagtgaaaagacaagaagggcgcaaactgtgacagactcaccgcttcactaactactcacttaaactggaagcaaaatgtccctaaaattgccaaggaactgggatttcaacctgaaagtggaggctgcgaaaatagctcggtcaaggagtgtgatgactggcgagcagatggctgccttccatccatcgtccacccccaacccgctggagaggcccatcaagatgggctggctgaagaagcagaggtccatcgtgaagaactggcagcagaggtactttgtgctgagggcgcagcagctctactactacaaggatgaagaggacacgaagccccagcagtgtttggccagcgcttggatgagactgtggcctatgaacagaaattcggcccccatctggtgcccatcctggtggagaaatgtgcagagttcatcctggagcacggccggaatgaagagggcatcttccgtctgcctgggcaggacaacctggtgaagcagctgagagacgcttttgatgctggggagcggccctcctttgacagagacacagatgtgcacactgtggcttccctgttaaagctctacctccgagacctcccagagcccgtggttccctggagccagtacgaagggttcctgctctgtgggcagctcacgaatgcggatgaggcaaaggctcagcaggagttgatgaagcagctctccatccttcctcgtgacaactatagtctcctgagctacatctgcaggtgagaggcccctggtatcaactctgcagttttcaaccccatcagaaagaagctcctagttagaagaggagggaccacgtctgtgaacagagagattctggtctagcactttggaagatcagctgtattcacatagcactgaagtagcttcctgtataatttcaaggattctgaaaacctggttgaacca

SEQ ID NO: 1402 - DNA, 538 bp, Homo sapiens
  source 1..538: mol_type = unassigned DNA; mol_type = unassigned DNA
aaaaacagagggaaagagtgaaaagacaagaagggcgcaaactgtgacagactcaccgcttcactaactactcacttaaactggaagcaaaatgtccctaaaattgccaaggaactgggatttcaacctgaaagtggaggctgcgaaaatagtaaatgctaaagggagtccttcctgcaggttgatataaaaggacactaaacaataacttgatgccatatgaagaaaaaaagatctcagcaaagatactgactcccacgcaggaaaaaggaagcaccttttgtcagatgctgtggccacttcctcttcagaaggctccagccaacctttcggtttgcagaatgacggggcccgccgcggtgccggactgcctgtgcacggggccaccgactgcagcctgggttttattcttggcctggccctgaccgggagctggcccctcggctgcttctctggctcgggggggactttctctggctcagatccggacccctgaactggacctggttgtcgtccccccgcttctcagccccctctg

SEQ ID NO: 1403 - DNA, 841 bp, Homo sapiens
  source 1..841: mol_type = unassigned DNA; mol_type = unassigned DNA
accatttgcatgttggtctgcagggagcatagtctacttaaaaatggatctcgcagcaaatctgagtttgagggaccatttgcatttaagttggcatgccaggtccaagttctaaaatgctgggagggggttctctttcatttggacaaaacagtgggatggcactccttggtgtgcaggatctggggtacttcggatgatttaaggctacagactacacacaaaactctcggtcaaggagtgtgatgactggcgagcagatggctgccttccatccatcgtccacccccaacccgctggagaggcccatcaagatgggctggctgaagaagcagaggtccatcgtgaagaactggcagcagaggtactttgtgctgagggcgcagcagctctactactacaaggatgaagaggacacgaagccccagggctgcatgtatctaccaggatgtacaatcaaggagatcgccacaaacccagaagaagctgggaagtttgtctttgaaatcattccagcctcatgggaccagaatcgcatgggacaggactcctatgtcctcatggccagctctcaggcggagatggaggagtgggttaaattcctcaggagagttgctggcacaccctgtggagcagtgtttggccagcgcttggatgagactgtggcctatgaacagaaattcggcccccatctggtgcccatcctggtggagaaatgtgcagagttcatcctggagcacggccggaatgaagagggcatcttccgtctgcctgggcaggacaacctggtgaagcagctgagagacgcttttgatgctggggagcggccctcctttgacag

SEQ ID NO: 1404 - DNA, 557 bp, Homo sapiens
  source 1..557: mol_type = unassigned DNA; mol_type = unassigned DNA
gtttgagggaccatttgcatttaagttggcatgccaggtccaagttctaaaatgctgggagggggttctctttcatttggacaaaacagtgggatggcactccttggtgtgcaggatctggggtacttcggatgatttaaggctacagactacacacaaaactatactgactcccacgcaggaaaaaggaagcaccttttgtcagatgctgtggccacttcctcttcagaaggctccagccaacctttcggtttgcagaatgacggggcccgccgcggtgccggactgcctgtgcacggggccaccgactgcagcctgggttttattcttggcctggccctgaccgggagctggcccctcggctgcttctctggctcgggggggactttctctggctcagatccggacccctgaactggacctggttgtcgtccccccgcttctcagccccctctggggttcctctctcctctccgcccactctttgctcactgccccatgtccctcggtcagtcggcctgtctgttcctctctatagctcggtcaaggagtgtgat

SEQ ID NO: 1405 - DNA, 2936 bp, Homo sapiens
  source 1..2936: mol_type = unassigned DNA; mol_type = unassigned DNA
ccgagccttcagagtgaggcattattttctcctctctcttgtcagatactgactcccacgcaggaaaaaggaagcaccttttgtcagatgctgtggccacttcctcttcagaaggctccagccaacctttcggtttgcagaatgacggggcccgccgcggtgccggactgcctgtgcacggggccaccgactgcagcctgggttttattcttggcctggccctgaccgggagctggcccctcggctgcttctctggctcgggggggactttctctggctcagatccggacccctgaactggacctggttgtcgtccccccgcttctcagccccctctggggttcctctctcctctccgcccactctttgctcactgccccatgtccctcggtcagtcggcctgtctgttcctctctatagctcggtcaaggagtgtgatgactggcgagcagatggctgccttccatccatcgtccacccccaacccgctggagaggcccatcaagatgggctggctgaagaagcagaggtccatcgtgaagaactggcagcagaggtactttgtgctgagggcgcagcagctctactactacaaggatgaagaggacacgaagccccagggctgcatgtatctaccaggatgtacaatcaaggagatcgccacaaacccagaagaagctgggaagtttgtctttgaaatcattccagcctcatgggaccagaatcgcatgggacaggactcctatgtcctcatggccagctctcaggcggagatggaggagtgggttaaattcctcaggagagttgctggcacaccctgtggagtgtttggccagcgcttggatgagactgtggcctatgaacagaaattcggcccccatctggtgcccatcctggtggagaaatgtgcagagttcatcctggagcacggccggaatgaagagggcatcttccgtctgcctgggcaggacaacctggtgaagcagctgagagacgcttttgatgctggggagcggccctcctttgacagagacacagatgtgcacactgtggcttccctgttaaagctctacctccgagacctcccagagcccgtggttccctggagccagtacgaagggttcctgctctgtgggcagctcacgaatgcggatgaggcaaaggctcagcaggagttgatgaagcagctctccatccttcctcgtgacaactatagtctcctgagctacatctgcaggttcctacatgaaatacagctgaactgtgctgttaacaagatgagtgtggacaacctggctactgtgattggtgtgaatctcatcaggtcgaaggtcgaagaccctgccgtgatcatgagagggactcctcagatccaaagagtgatgactatgatgatcagagaccatgaagtcctcttccccaagtccaaggatatacccctgtcaccccctgcccagaaaaatgaccccaagaaagctccagtggcccgaagctctgtaggctgggatgccactgaagacctccgaatttctaggacagacagcttcagtagcatgacaagcgactctgatacaaccagccccaccggacagcagccgagcgatgcgtttccggaggacagcagcaaagtacccagggaaaagccaggagactggaaaatgcaatctcgtaaaaggactcaaacactccctaaccggaaatgtttcttgacatcagcttttcagggtgccaacagcagcaaaatggagatctttaaaaatgaattctggtcgccttcctcagaggctaaggcaggggaagggcacaggagaacgatgtctcaagacttgcgccaactttctgactcccaacggacttccacctacgataacgtcccttccctgccagggtcccctggggaggaagccagtgcactctcttcccaagcctgtgactccaagggagatactcttgccagtccaaactctgaaactgggcctggaaaaaagaactctggagaagaggaaattgattctttgcagaggatggtccaagagctacgaaaggaaatagaaacacagaagcaaatgtatgaggaacagattaaaaaccttgagaaggaaaattatgacgtttgggctaaagtggtgaggctcaatgaagaactggagaaggaaaagaagaagtctgcagccctagagatcagcctccgcaacatggagcgctcccgggaggatgttgagaagaggaacaaggccttggaagaagaagtcaaggaatttgtcaaatccatgaaggaacccaagaccgaggcttaagggtcccaggagtactgcagggacagccccagagaggcccaactctggcccctttctcagtgctatctgatgacggggaaacaaaattattctctgagagggaaaggacatttgagggaaacatcaaatttccccataaataaatgaatggagtttgcaggaaggtgagggtgagcagagatgtgtgtggacatctctgaccatccatcgctgtattcaaatggattgttttattccattctggtctcaggcatgaccacgtccagtgaagacatttgaggcagcacatctcaggacccaggcaatagactggccccaactcaggctggactaaggtgtgattaattctttgttttttgtgtggaacagctcaccttgtcagacagcctcagggcatctctgagacacaggggcagaaaatgacattcatcttttgagtcctcatccatggagtgctgtgtttggggggctgcatctgctgaagcgagaaccccattctgccaccccaccaggatgcccattctccaggacttctccaacttactattagactaaaccagaacaagcaacaaactgtatttatgcaagcaaaattgatgagaaaattatattcaaataaagcaaaaattaaaaaaaaaa

SEQ ID NO: 1406 - DNA, 2939 bp, Homo sapiens
  source 1..2939: mol_type = unassigned DNA; mol_type = unassigned DNA
ccgagccttcagagtgaggcattattttctcctctctcttgtcagatactgactcccacgcaggaaaaaggaagcaccttttgtcagatgctgtggccacttcctcttcagaaggctccagccaacctttcggtttgcagaatgacggggcccgccgcggtgccggactgcctgtgcacggggccaccgactgcagcctgggttttattcttggcctggccctgaccgggagctggcccctcggctgcttctctggctcgggggggactttctctggctcagatccggacccctgaactggacctggttgtcgtccccccgcttctcagccccctctggggttcctctctcctctccgcccactctttgctcactgccccatgtccctcggtcagtcggcctgtctgttcctctctatagctcggtcaaggagtgtgatgactggcgagcagatggctgccttccatccatcgtccacccccaacccgctggagaggcccatcaagatgggctggctgaagaagcagaggtccatcgtgaagaactggcagcagaggtactttgtgctgagggcgcagcagctctactactacaaggatgaagaggacacgaagccccagggctgcatgtatctaccaggatgtacaatcaaggagatcgccacaaacccagaagaagctgggaagtttgtctttgaaatcattccagcctcatgggaccagaatcgcatgggacaggactcctatgtcctcatggccagctctcaggcggagatggaggagtgggttaaattcctcaggagagttgctggcacaccctgtggagcagtgtttggccagcgcttggatgagactgtggcctatgaacagaaattcggcccccatctggtgcccatcctggtggagaaatgtgcagagttcatcctggagcacggccggaatgaagagggcatcttccgtctgcctgggcaggacaacctggtgaagcagctgagagacgcttttgatgctggggagcggccctcctttgacagagacacagatgtgcacactgtggcttccctgttaaagctctacctccgagacctcccagagcccgtggttccctggagccagtacgaagggttcctgctctgtgggcagctcacgaatgcggatgaggcaaaggctcagcaggagttgatgaagcagctctccatccttcctcgtgacaactatagtctcctgagctacatctgcaggttcctacatgaaatacagctgaactgtgctgttaacaagatgagtgtggacaacctggctactgtgattggtgtgaatctcatcaggtcgaaggtcgaagaccctgccgtgatcatgagagggactcctcagatccaaagagtgatgactatgatgatcagagaccatgaagtcctcttccccaagtccaaggatatacccctgtcaccccctgcccagaaaaatgaccccaagaaagctccagtggcccgaagctctgtaggctgggatgccactgaagacctccgaatttctaggacagacagcttcagtagcatgacaagcgactctgatacaaccagccccaccggacagcagccgagcgatgcgtttccggaggacagcagcaaagtacccagggaaaagccaggagactggaaaatgcaatctcgtaaaaggactcaaacactccctaaccggaaatgtttcttgacatcagcttttcagggtgccaacagcagcaaaatggagatctttaaaaatgaattctggtcgccttcctcagaggctaaggcaggggaagggcacaggagaacgatgtctcaagacttgcgccaactttctgactcccaacggacttccacctacgataacgtcccttccctgccagggtcccctggggaggaagccagtgcactctcttcccaagcctgtgactccaagggagatactcttgccagtccaaactctgaaactgggcctggaaaaaagaactctggagaagaggaaattgattctttgcagaggatggtccaagagctacgaaaggaaatagaaacacagaagcaaatgtatgaggaacagattaaaaaccttgagaaggaaaattatgacgtttgggctaaagtggtgaggctcaatgaagaactggagaaggaaaagaagaagtctgcagccctagagatcagcctccgcaacatggagcgctcccgggaggatgttgagaagaggaacaaggccttggaagaagaagtcaaggaatttgtcaaatccatgaaggaacccaagaccgaggcttaagggtcccaggagtactgcagggacagccccagagaggcccaactctggcccctttctcagtgctatctgatgacggggaaacaaaattattctctgagagggaaaggacatttgagggaaacatcaaatttccccataaataaatgaatggagtttgcaggaaggtgagggtgagcagagatgtgtgtggacatctctgaccatccatcgctgtattcaaatggattgttttattccattctggtctcaggcatgaccacgtccagtgaagacatttgaggcagcacatctcaggacccaggcaatagactggccccaactcaggctggactaaggtgtgattaattctttgttttttgtgtggaacagctcaccttgtcagacagcctcagggcatctctgagacacaggggcagaaaatgacattcatcttttgagtcctcatccatggagtgctgtgtttggggggctgcatctgctgaagcgagaaccccattctgccaccccaccaggatgcccattctccaggacttctccaacttactattagactaaaccagaacaagcaacaaactgtatttatgcaagcaaaattgatgagaaaattatattcaaataaagcaaaaattaaaaaaaaaa

SEQ ID NO: 1407 - DNA, 1362 bp, Homo sapiens
  source 1..1362: mol_type = unassigned DNA; mol_type = unassigned DNA
ctcttcagaaggctccagccaacctttcggtttgcagaatgacggggcccgccgcggtgccggactgcctgtgcacggggccaccgactgcagcctgggttttattcttggcctggccctgaccgggagctggcccctcggctgcttctctggctcgggggggactttctctggctcagatccggacccctgaactggacctggttgtcgtccccccgcttctcagccccctctggggttcctctctcctctccgcccactctttgctcactgccccatgtccctcggtcagtcggcctgtctgttcctctctatagctcggtcaaggagtgtgatgactggcgagcagatggctgccttccatccatcgtccacccccaacccgctggagaggcccatcaagatgggctggctgaagaagcagaggtccatcgtgaagaactggcagcagagtggtcctccaggaagcaccaggacgggcactgtggagtttcctacacatggctctgagtcaagactggcaacagggcggtgatggtagtgacactcagtcaagggctcagagagagtggatttgggttcaggaaaaccgattttgggactcattgatttgtttgttcaggctgcatgtatctaccaggatgtacaatcaaggagatcgccacaaacccagaagaagctgggaagtttgtctttgaaatcattccagcctcatgggaccagaatcgcatgggacaggactcctatgtcctcatggccagctctcaggcggagatggaggagtgggttaaattcctcaggagagttgctggcacaccctgtggagcagtgtttggccagcgcttggatgagactgtggcctatgaacagaaattcggcccccatctggtgcccatcctggtggagaaatgtgcagagttcatcctggagcacggccggaatgaagagggcatcttccgtctgcctgggcaggacaacctggtgaagcagctgagagacgcttttgatgctggggagcggccctcctttgacagacacagatgtgcacactgtggcttccctgttaaagctctacctccgagacctcccagagcccgtggttccctggagccagtacgaagggttcctgctctgtgggcagctcacgaatgcggatgaggcaaaggctcagcaggagttgatgaagcagctctccatccttcctcgtgacaactatagtctcctgagctacatctgcaggttcctacatgaaatacagctgaactgtgctgttaacaagatgagtgtggacaacctggctactgtgattggtgtgaatctcatcaggtcgaaggtcgaagaccctgccgtgatcatgagagg

SEQ ID NO: 1408 - DNA, 1843 bp, Homo sapiens
  source 1..1843: mol_type = unassigned DNA; mol_type = unassigned DNA
gaatgacggggcccgccgcggtgccggactgcctgtgcacggggccaccgactgcagcctgggttttattcttggcctggccctgaccgggagctggcccctcggctgcttctctggctcgggggggactttctctggctcagatccggacccctgaactggacctggttgtcgtccccccgcttctcagccccctctggggttcctctctcctctccgcccactctttgctcactgccccatgtccctcggtcagtcggcctgtctgttcctctctatagctcggtcaaggagtgtgatgactggcgagcagatggctgccttccatccatcgtccacccccaacccgctggagaggcccatcaagatgggctggctgaagaagcagaggtccatcgtgaagaactggcagcagaggtactttgtgctgagggcgcagcagctctactactacaaggatgaagaggacacgaagccccagggctgcatgtatctaccaggatgtacaatcaaggagatcgccacaaacccagaagaagctgggaagtttgtctttgaaatcattccagcctcatgggaccagaatcgcatgggacaggactcctatgtcctcatggccagctctcaggcggagatggaggagtgggttaaattcctcaggagagttgctggcacaccctgtggagcagtgtttggccagcgcttggatgagactgtggcctatgaacagaaattcggcccccatctggtgcccatcctggtggagaaatgtgcagagttcatcctggagcacggccggaatgaagagggcatcttccgtctgcctgggcaggacaacctggtgaagcagctgagagacgcttttgatgctggggagcggccctcctttgacagagacacagatgtgcacactgtggcttccctgttaaagctctacctccgagacctcccagagcccgtggttccctggagccagtacgaagggttcctgctctgtgggcagctcacgaatgcggatgaggcaaaggctcagcaggagttgatgaagcagctctccatccttcctcgtgacaactatagtctcctgagctacatctgcaggttcctacatgaaatacagctgaactgtgctgttaacaagatgagtgtggacaacctggctactgtgattggtgtgaatctcatcaggtcgaaggtcgaagaccctgccgtgatcatgagagggactcctcagatccaaagagtgatgactatgatgatcagagaccatgaagtcctcttccccaagtccaaggatatacccctgtcaccccctgcccagaaaaatgaccccaagaaagctccagtggcccgaagctctgtaggctgggatgccactgaagacctccgaatttctaggacagacagcttcagtagcatggtaaggtgcagagaaccttcctgcttccattgggttcttcctttagtccaggccatcccatgtaaggcctgctctcgggtggcaatttggggagttttaggtgatgcagtggcagtgggcgctgctgctacagactcatctgaacacaccttgaaagcctggcctctttccaaatctagtttctattggcatctttgaggggggtgagtgacaagtgtgccaatcacccagtgactgagcaatgaggtcctcactgaagcccactctgaaagagagactcaaatacagtccagagaagttcagtgggaaaaatgtatacaacattgtaaatgttttggtcagaattgttgaaaattctgggtgaacgtccagagaaaactggtttcctgctaacccatgaaacgtgattcctttctcagagta

SEQ ID NO: 1409 - DNA, 2096 bp, Homo sapiens
  source 1..2096: mol_type = unassigned DNA; mol_type = unassigned DNA
aagcacagaatgacgggcaggttctgtttgctctctcctcagcagtgtttggccagcgcttggatgagactgtggcctatgaacagaaattcggcccccatctggtgcccatcctggtggagaaatgtgcagagttcatcctggagcacggccggaatgaagagggcatcttccgtctgcctgggcaggacaacctggtgaagcagctgagagacgcttttgatgctggggagcggccctcctttgacagagacacagatgtgcacactgtggcttccctgttaaagctctacctccgagacctcccagagcccgtggttccctggagccagtacgaagggttcctgctctgtgggcagctcacgaatgcggatgaggcaaaggctcagcaggagttgatgaagcagctctccatccttcctcgtgacaactatagtctcctgagctacatctgcaggttcctacatgaaatacagctgaactgtgctgttaacaagatgagtgtggacaacctggctactgtgattggtgtgaatctcatcaggtcgaaggtcgaagaccctgccgtgatcatgagagggactcctcagatccaaagagtgatgactatgatgatcagagaccatgaagtcctcttccccaagtccaaggatatacccctgtcaccccctgcccagaaaaatgaccccaagaaagctccagtggcccgaagctctgtaggctgggatgccactgaagacctccgaatttctaggacagacagcttcagtagcatgacaagcgactctgatacaaccagccccaccggacagcagccgagcgatgcgtttccggaggacagcagcaaagtacccagggaaaagccaggagactggaaaatgcaatctcgtaaaaggactcaaacactccctaaccggaaatgtttcttgacatcagcttttcagggtgccaacagcagcaaaatggagatctttaaaaatgaattctggtcgccttcctcagaggctaaggcaggggaagggcacaggagaacgatgtctcaagacttgcgccaactttctgactcccaacggacttccacctacgataacgtcccttccctgccagggtcccctggggaggaagccagtgcactctcttcccaagcctgtgactccaagggagatactcttgccagtccaaactctgaaactgggcctggaaaaaagaactctggagaagaggaaattgattctttgcagaggatggtccaagagctacgaaaggaaatagaaacacagaagcaaatgtatgaggaacagattaaaaaccttgagaaggaaaattatgacgtttgggctaaagtggtgaggctcaatgaagaactggagaaggaaaagaagaagtctgcagccctagagatcagcctccgcaacatggagcgctcccgggaggatgttgagaagaggaacaaggccttggaagaagaagtcaaggaatttgtcaaatccatgaaggaacccaagaccgaggcttaagggtcccaggagtactgcagggacagccccagagaggcccaactctggcccctttctcagtgctatctgatgacggggaaacaaaattattctctgagagggaaaggacatttgagggaaacatcaaatttccccataaataaatgaatggagtttgcaggaaggtgagggtgagcagagatgtgtgtggacatctctgaccatccatcgctgtattcaaatggattgttttattccattctggtctcaggcatgaccacgtccagtgaagacatttgaggcagcacatctcaggacccaggcaatagactggccccaactcaggctggactaaggtgtgattaattctttgttttttgtgtggaacagctcaccttgtcagacagcctcagggcatctctgagacacaggggcagaaaatgacattcatcttttgagtcctcatccatggagtgctgtgtttggggggctgcatctgctgaagcgagaaccccattctgccaccccaccaggatgcccattctccaggacttctccaacttactattagactaaaccagaacaagcaacaaactgtat

SEQ ID NO: 1410 - DNA, 1933 bp, Homo sapiens
  source 1..1933: mol_type = unassigned DNA; mol_type = unassigned DNA
attctgggccaccctggttattttccttcagccctttctggggacctgctgtgcgccacccctgtggcaactctagctgtggattgacccagatctggctcggctgggaactgggatcttcatcccagactgacctgaattttgtcttttattttttaaaaataatttgttgtagttcctagattataaaagtcatgcttgcttgacttggaaaccaggaagatatagcaaacagttcctacatgaaatacagctgaactgtgctgttaacaagatgagtgtggacaacctggctactgtgattggtgtgaatctcatcaggtcgaaggtcgaagaccctgccgtgatcatgagagggactcctcagatccaaagagtgatgactatgatgatcagagaccatgaagtcctcttccccaagtccaaggatatacccctgtcaccccctgcccagaaaaatgaccccaagaaagctccagtggcccgaagctctgtaggctgggatgccactgaagacctccgaatttctaggacagacagcttcagtagcatgacaagcgactctgatacaaccagccccaccggacagcagccgagcgatgcgtttccggaggacagcagcaaagtacccagggaaaagccaggagactggaaaatgcaatctcgtaaaaggactcaaacactccctaaccggaaatgtttcttgacatcagcttttcagggtgccaacagcagcaaaatggagatctttaaaaatgaattctggtcgccttcctcagaggctaaggcaggggaagggcacaggagaacgatgtctcaagacttgcgccaactttctgactcccaacggacttccacctacgataacgtcccttccctgccagggtcccctggggaggaagccagtgcactctcttcccaagcctgtgactccaagggagatactcttgccagtccaaactctgaaactgggcctggaaaaaagaactctggagaagaggaaattgattctttgcagaggatggtccaagagctacgaaaggaaatagaaacacagaagcaaatgtatgaggaacagattaaaaaccttgagaaggaaaattatgacgtttgggctaaagtggtgaggctcaatgaagaactggagaaggaaaagaagaagtctgcagccctagagatcagcctccgcaacatggagcgctcccgggaggatgttgagaagaggaacaaggccttggaagaagaagtcaaggaatttgtcaaatccatgaaggaacccaagaccgaggcttaagggtcccaggagtactgcagggacagccccagagaggcccaactctggcccctttctcagtgctatctgatgacggggaaacaaaattattctctgagagggaaaggacatttgagggaaacatcaaatttccccataaataaatgaatggagtttgcaggaaggtgagggtgagcagagatgtgtgtggacatctctgaccatccatcgctgtattcaaatggattgttttattccattctggtctcaggcatgaccacgtccagtgaagacatttgaggcagcacatctcaggacccaggcaatagactggccccaactcaggctggactaaggtgtgattaattctttgttttttgtgtggaacagctcaccttgtcagacagcctcagggcatctctgagacacaggggcagaaaatgacattcatcttttgagtcctcatccatggagtgctgtgtttggggggctgcatctgctgaagcgagaaccccattctgccaccccaccaggatgcccattctccaggacttctccaacttactattagactaaaccagaacaagcaacaaactgtatttatgcaagcaaaattgatgagaaaattatattcaaataaagcaaaaattaaaaaaaaaa

SEQ ID NO: 1411 - DNA, 6862 bp, Homo sapiens
  source 1..6862: mol_type = unassigned DNA; mol_type = unassigned DNA
ggcggggcggccgaggctgctgtgagagggcgctcgaggctgccgagagctagctagcgaaggaggcggggaggcggcgtctgcactcgctcgcccgctcgctcgcttcccggcgccgctgcgggtccgcgctgcgtttcctgctcgcgatccgctccgttgcccgcgcccggaacagcagcacctcggccgggtccgagctcggttcgggagtcttgcgcgccggcggacaccgcgcgcggagtgagccagcgccacacctgtggagccggcggccgtcgggggagccggccggggtcccgccgcgtgagtgctctgggcggcgggcggcccgggccccggcggaggcgcgccccccggctgggcgccgcgcgcaccatggggctcccagcgctcgagttcagcgactgctgcctcgatagtccgcacttccgagagacgctcaagtcgcacgaagcagagctggacaagaccaacaaattcatcaaggagctcatcaaggacgggaagtcactcataagcgcgctcaagaatttgtcttcagcgaagcggaagtttgcagattccttaaatgaatttaaatttcagtgcataggagatgcagaaacagatgatgagatgtgtatagcaagatctttgcaggagtttgccactgtcctcaggaatcttgaagatgaacggatacggatgattgagaatgccagcgaggtgctcatcactcccttggagaagtttcgaaaggaacagatcggggctgccaaggaagccaaaaagaagtatgacaaagagacagaaaagtattgtggcatcttagaaaaacacttgaatttgtcttccaaaaagaaagaatctcagcttcaggaggcagacagccaagtggacctggtccggcagcatttctatgaagtatccctggaatatgtcttcaaggtgcaggaagtccaagagagaaagatgtttgagtttgtggagcctctgctggccttcctgcaaggactcttcactttctatcaccatggttacgaactggccaaggatttcggggacttcaagacacagttaaccattagcatacagaacacaagaaatcgctttgaaggcactagatcagaagtggaatcactgatgaaaaagatgaaggagaatccccttgagcacaagaccatcagtccctacaccatggagggatacctctacgtgcaggagaaacgtcactttggaacttcttgggtgaagcactactgtacatatcaacgggattccaaacaaatcaccatggtaccatttgaccaaaagtcaggaggaaaagggggagaagatgaatcagttatcctcaaatcctgcacacggcggaaaacagactccattgagaagaggttttgctttgatgtggaagcagtagacaggccaggggttatcaccatgcaagctttgtcggaagaggaccggaggctctggatggaagccatggatggccgggaacctgtctacaactcgaacaaagacagccagagtgaagggactgcgcagttggacagcattggcttcagcataatcaggaaatgcatccatgctgtggaaaccagagggatcaacgagcaagggctgtatcgaattgtgggtgtcaactccagagtgcagaagttgctgagtgtcctgatggaccccaagactgcttctgagacagaaacagatatctgtgctgaatgggagataaagaccatcactagtgctctgaagacctacctaagaatgcttccaggaccactcatgatgtaccagtttcaaagaagtttcatcaaagcagcaaaactggagaaccaggagtctcgggtctctgaaatccacagccttgttcatcggctcccagagaaaaatcggcagatgttacagctgctcatgaaccacttggcaaatgttgctaacaaccacaagcagaatttgatgacggtggcaaaccttggtgtggtgtttggacccactctgctgaggcctcaggaagaaacagtagcagccatcatggacatcaaatttcagaacattgtcattgagatcctaatagaaaaccacgaaaagatatttaacaccgtgcccgatatgcctctcaccaatgcccagctgcacctgtctcggaagaagagcagtgactccaagcccccgtcctgcagcgagaggcccctgacgctcttccacaccgttcagtcaacagagaaacaggaacaaaggaacagcatcatcaactccagtttggaatctgtctcatcaaatccaaacagcatccttaattccagcagcagcttacagcccaacatgaactccagtgacccagacctggctgtggtcaaacccacccggcccaactcactccccccgaatccaagcccaacttcacccctctcgccatcttggcccatgttctcggcgccatccagccctatgcccacctcatccacgtccagcgactcatcccccgtcaggtctgttgcagggtttgtttggttttctgttgctgccgttgttctctcattggctcggtcctctcttcatgcagtgttcagcctcctcgtcaactttgttccctgccatccaaacctgcacttgctttttgacaggccagaagaagcggtacatgaagactccagcacaccgttccggaaggcaaaagccttgtatgcctgcaaagctgaacatgactcagaactttcgttcacagcaggcacggtcttcgataacgttcacccatctcaggagcctggctggttggaggggactctgaacggaaagactggcctcatccctgagaattacgtggagttcctctaaccgtgggccccagcagaactgctgagctttacatggtatccatgacaactgctgattccagtgtcgaggccatttctctttgccactgagaaatgcagcgtgactgactctgttgctacctgtcaacatgaatgtttctgtgagctctggtgtcactcatctccatgatcatctcagccaacatgcatcagtactgcaagaaaagaagtcaatcagcagaggagagcatttgataactaagaggaagacttgcaaagccgttttctcatgagtaccctgaatagggggcactcattttgtttcaacggtccaaacgcccaaccttcagaaagaggaagtcagatagaaatagtccctgagagcacactgtgtagctaagcctgctggggctgggtgaagaaattggcgctgagatccaggctggatccattgcttttgtttacaataggcactctctctaccccacctctcagtacttgagacttaaagtgctacaggcagctggatctgtttgcatgcaggatgaagagggttaaaacactgtttatataagatccaatctctcaccatctctaaagcagccgttggcctgtcatcagtgagatacaatccagtcttctcatgcacgggaacacacacaccctgcgtttctccctcccaggctaggaacctctctgccaccaagggctgccatccatcgcctagtaaccacggcaacccaacctactctaaaaccaaaccaaaaaaataaaataacacatcctctttgcatgacacattttttttctcccctttttggtacactttttttgaatggttttctaacaacttgaagcacaggatcaaggaattagggtggtctacttgaggcagatgggatagtagctgggaactgttccctttctgattaatttcagcagcatcggaatatatttggagcacaccctagtaacctcttgagattaaattacatagtcttaatatttctgttcctccatgcaactgatgtttgttttttaaagggtaagatgctgcctcccaatgggtgatgccatctgactggtttccccatgtcctcccattcacccatctctgctcccacccttgcctgcctctaacccaccactggccagcccccttgccctactctgggctgctgaacactggtgctgtggtggttttcaaggttaattcctaggctaaccgtatggcctatagtttaaaagcacatctatgttcactgccactctgaaaaagggaattatttctcagtctttcaaggcttgagactaatataggccattgtgattcaggaagaaacccaaggttggagggtgggatgagtaccctctgaaaaagggaatttgctggtgaaaagaggctggatcttgtggaagactgtcttggatggggaagtactacctggagatttcaaattcacttggcctgcaaacaacagagttatccgtatcttccacatgtgaatgtcattgcaagggtgactctagacaaactacaaaccgatggaccgtcaagctccccaggagccccttggatggcagcgttgcttcagagtgtttcctgtttctggaattccttgttagggaactttaaagaagaaaagaaaaacttgaattgtgttgaattactgtatcttttacttttttttttttgaaaagataaacttgtaaatagagtgatttgaaatactatatggcaaagttttatatttgatattctttaagttagttgctcacacacttaggctttgattgctgaagaagtatgtttaagagggagagaggggaggcaaagctgaagagagtcaaggtcactgtccccgcttcggcctgaaggaaagagaagacatttctatggccttgctctctgctgtcctgttggtgggcacgacacatcagtggtgttcagtctttatgtgtttttaagcatcccttgggctttggatttggagatgggaagagcatctccaggcaatgagtttttcaaagaatgcctacttagtagtaagatgaagctcaggatttaaataagtggggtcaggcattcgagtttttgtctttcttctcaggtgtatttcttggtacccccaagatatcaggccagaaagagatgagtcagttgctgtgctctttacttctttttctccacatcttctgaggctttagaaatgtggacaagctagttttcaaattttgtgtgcgtctgtaagttcttaaagaaccagcttcttagaatgttcagttctcaatgtgctgctgctttcccttctcctaaacattttaaaactcttccctttcacctccaattcccgtgatcccaaaagaagaggaagactccaggaggggtatagattgtgccgtcatagctttacaggtggttttaaagttaacaggggtttgtcatggtgattcactactcagtttatcagctcaaggattatacagctcttttccgggaactcacccaggagcaagcgagacactaccattgaatcagggaatgagaattaagaatggacaggaccaagacagaactcaagaaagccactggggaaaactcgagaagaaagggagtatactagtaggttagatctgtgaacctgaggacaagaagaccttgggaaatggaggcctcaggggatgtgcattcacatactattacgcttctcaaagagagaccaacatcatgcttttaacacatttgatgaggttttttatttgtgtttttgtttgttttttgagatggagtctcactctgtggcccaggctggagtgcagtggcgcaatcttggctcactgcaacctccacctcccaggttcaagtgattctcctgtctcagcctcccaagtagctgggactacaggcatgagccatcacacccagctagttttttgtatttttagtaaagatggggttttgccatgtttgccaggctgatctcgaactcctgacctcaagtgatctgcccacttcagacccccaaagtgctgggattccaggtgtgagccgctgcggccgaccacatttgatgtttgaagttgtaatctgtcccatcataaacttacctggagctcatgtggaggaacagaaggccaagatccttgctttgggggtgcctcacgaagcatccctgtagacatttggccccagcttcactgcttggaagcatgtccctccctcttgagttggctctgatttgaaatcgggagaaacagagctgctgccaatgggatcttttaggtaactccctccctagcttccgtgtgtctgtgcagtgcccatgagctgctgccaatgggatctttcaggtaccccctccccagcttccctgtggctgtgcggtgcccttgacagatggcttctctgtttccctttgcccagccaggctcccctccttcctattagctacaaaactggataaacttcagaatatgagccaatgagtaggaaggaacttgaagactaaagattttactctctcccctatccatgccccctacctctgactctctctgtgtgaacaggaaactttagggcagatgaggagaatgaattggttatcagagtggaagaccatggcccaggatccctgagctttcccagtagcctccagtttcctttgtaagacccagggatcacttagccatagcctgaatcttttaggggtattaaggtcagcctctcactcttccttcaggttactaacaaaatttcgtagctaaagaatgccatggccgggtgcagtggctcacgcctataatcccagcactttgggaggccgaggcgggcggatcacgaggtcaggagattgagaccatcctggctacgacggtgaaaccccgtctctactaaaaatacaaaaaattagccgggtgtggtggcgggcgcctgtagtcccagctactctggaggctgaggcaggagaatggcatgaacccaggaggcagagattgcagtgagccaagatcacgcccctgcactccagcctgggtgacagagccagactccgtctcaaagg

SEQ ID NO: 1412 - DNA, 9200 bp, Homo sapiens
  source 1..9200: mol_type = unassigned DNA; mol_type = unassigned DNA
gagagggcgctcgaggctgccgagagctagctagcgaaggaggcggggaggcggcgtctgcactcgctcgcccgctcgctcgcttcccggcgccgctgcgggtccgcgctgcgtttcctgctcgcgatccgctccgttgcccgcgcccggaacagcagcacctcggccgggtccgagctcggttcgggagtcttgcgcgccggcggacaccgcgcgcggagtgagccagcgccacacctgtggagccggcggccgtcgggggagccggccggggtcccgccgcgtgagtgctctgggcggcgggcggcccgggccccggcggaggcgcgccccccggctgggcgccgcgcgcaccatggggctcccagcgctcgagttcagcgactgctgcctcgatagtccgcacttccgagagacgctcaagtcgcacgaagcagagctggacaagaccaacaaattcatcaaggagctcatcaaggacgggaagtcactcataagcgcgctcaagaatttgtcttcagcgaagcggaagtttgcagattccttaaatgaatttaaatttcagtgcataggagatgcagaaacagatgatgagatgtgtatagcaagatctttgcaggagtttgccactgtcctcaggaatcttgaagatgaacggatacggatgattgagaatgccagcgaggtgctcatcactcccttggagaagtttcgaaaggaacagatcggggctgccaaggaagccaaaaagaagtatgacaaagagacagaaaagtattgtggcatcttagaaaaacacttgaatttgtcttccaaaaagaaagaatctcagcttcaggaggcagacagccaagtggacctggtccggcagcatttctatgaagtatccctggaatatgtcttcaaggtgcaggaagtccaagagagaaagatgtttgagtttgtggagcctctgctggccttcctgcaaggactcttcactttctatcaccatggttacgaactggccaaggatttcggggacttcaagacacagttaaccattagcatacagaacacaagaaatcgctttgaaggcactagatcagaagtggaatcactgatgaaaaagatgaaggagaatccccttgagcacaagaccatcagtccctacaccatggagggatacctctacgtgcaggagaaacgtcactttggaacttcttgggtgaagcactactgtacatatcaacgggattccaaacaaatcaccatggtaccatttgaccaaaagtcaggaggaaaagggggagaagatgaatcagttatcctcaaatcctgcacacggcggaaaacagactccattgagaagaggttttgctttgatgtggaagcagtagacaggccaggggttatcaccatgcaagctttgtcggaagaggaccggaggctctggatggaagccatggatggccgggaacctgtctacaactcgaacaaagacagccagagtgaagggactgcgcagttggacagcattggcttcagcataatcaggaaatgcatccatgctgtggaaaccagagggatcaacgagcaagggctgtatcgaattgtgggtgtcaactccagagtgcagaagttgctgagtgtcctgatggaccccaagactgcttctgagacagaaacagatatctgtgctgaatgggagataaagaccatcactagtgctctgaagacctacctaagaatgcttccaggaccactcatgatgtaccagtttcaaagaagtttcatcaaagcagcaaaactggagaaccaggagtctcgggtctctgaaatccacagccttgttcatcggctcccagagaaaaatcggcagatgttacagctgctcatgaaccacttggcaaatgttgctaacaaccacaagcagaatttgatgacggtggcaaaccttggtgtggtgtttggacccactctgctgaggcctcaggaagaaacagtagcagccatcatggacatcaaatttcagaacattgtcattgagatcctaatagaaaaccacgaaaagatatttaacaccgtgcccgatatgcctctcaccaatgcccagctgcacctgtctcggaagaagagcagtgactccaagcccccgtcctgcagcgagaggcccctgacgctcttccacaccgttcagtcaacagagaaacaggaacaaaggaacagcatcatcaactccagtttggaatctgtctcatcaaatccaaacagcatccttaattccagcagcagcttacagcccaacatgaactccagtgacccagacctggctgtggtcaaacccacccggcccaactcactccccccgaatccaagcccaacttcacccctctcgccatcttggcccatgttctcggcgccatccagccctatgcccacctcatccacgtccagcgactcatcccccgtcagcacaccgttccggaaggcaaaagccttgtatgcctgcaaagctgaacatgactcagaactttcgttcacagcaggcacggtcttcgataacgttcacccatctcaggagcctggctggttggaggggactctgaacggaaagactggcctcatccctgagaattacgtggagttcctctaaccgtgggccccagcagaactgctgagctttacatggtatccatgacaactgctgattccagtgtcgaggccatttctctttgccactgagaaatgcagcgtgactgactctgttgctacctgtcaacatgaatgtttctgtgagctctggtgtcactcatctccatgatcatctcagccaacatgcatcagtactgcaagaaaagaagtcaatcagcagaggagagcatttgataactaagaggaagacttgcaaagccgttttctcatgagtaccctgaatagggggcactcattttgtttcaacggtccaaacgcccaaccttcagaaagaggaagtcagatagaaatagtccctgagagcacactgtgtagctaagcctgctggggctgggtgaagaaattggcgctgagatccaggctggatccattgcttttgtttacaataggcactctctctaccccacctctcagtacttgagacttaaagtgctacaggcagctggatctgtttgcatgcaggatgaagagggttaaaacactgtttatataagatccaatctctcaccatctctaaagcagccgttggcctgtcatcagtgagatacaatccagtcttctcatgcacgggaacacacacaccctgcgtttctccctcccaggctaggaacctctctgccaccaagggctgccatccatcgcctagtaaccacggcaacccaacctactctaaaaccaaaccaaaaaaataaaataacacatcctctttgcatgacacattttttttctcccctttttggtacactttttttgaatggttttctaacaacttgaagcacaggatcaaggaattagggtggtctacttgaggcagatgggatagtagctgggaactgttccctttctgattaatttcagcagcatcggaatatatttggagcacaccctagtaacctcttgagattaaattacatagtcttaatatttctgttcctccatgcaactgatgtttgttttttaaagggtaagatgctgcctcccaatgggtgatgccatctgactggtttccccatgtcctcccattcacccatctctgctcccacccttgcctgcctctaacccaccactggccagcccccttgccctactctgggctgctgaacactggtgctgtggtggttttcaaggttaattcctaggctaaccgtatggcctatagtttaaaagcacatctatgttcactgccactctgaaaaagggaattatttctcagtctttcaaggcttgagactaatataggccattgtgattcaggaagaaacccaaggttggagggtgggatgagtaccctctgaaaaagggaatttgctggtgaaaagaggctggatcttgtggaagactgtcttggatggggaagtactacctggagatttcaaattcacttggcctgcaaacaacagagttatccgtatcttccacatgtgaatgtcattgcaagggtgactctagacaaactacaaaccgatggaccgtcaagctccccaggagccccttggatggcagcgttgcttcagagtgtttcctgtttctggaattccttgttagggaactttaaagaagaaaagaaaaacttgaattgtgttgaattactgtatcttttacttttttttttttgaaaagataaacttgtaaatagagtgatttgaaatactatatggcaaagttttatatttgatattctttaagttagttgctcacacacttaggctttgattgctgaagaagtatgtttaagagggagagaggggaggcaaagctgaagagagtcaaggtcactgtccccgcttcggcctgaaggaaagagaagacatttctatggccttgctctctgctgtcctgttggtgggcacgacacatcagtggtgttcagtctttatgtgtttttaagcatcccttgggctttggatttggagatgggaagagcatctccaggcaatgagtttttcaaagaatgcctacttagtagtaagatgaagctcaggatttaaataagtggggtcaggcattcgagtttttgtctttcttctcaggtgtatttcttggtacccccaagatatcaggccagaaagagatgagtcagttgctgtgctctttacttctttttctccacatcttctgaggctttagaaatgtggacaagctagttttcaaattttgtgtgcgtctgtaagttcttaaagaaccagcttcttagaatgttcagttctcaatgtgctgctgctttcccttctcctaaacattttaaaactcttccctttcacctccaattcccgtgatcccaaaagaagaggaagactccaggaggggtatagattgtgccgtcatagctttacaggtggttttaaagttaacaggggtttgtcatggtgattcactactcagtttatcagctcaaggattatacagctcttttccgggaactcacccaggagcaagcgagacactaccattgaatcagggaatgagaattaagaatggacaggaccaagacagaactcaagaaagccactggggaaaactcgagaagaaagggagtatactagtaggttagatctgtgaacctgaggacaagaagaccttgggaaatggaggcctcaggggatgtgcattcacatactattacgcttctcaaagagagaccaacatcatgcttttaacacatttgatgaggttttttatttgtgtttttgtttgttttttgagatggagtctcactctgtggcccaggctggagtgcagtggcgcaatcttggctcactgcaacctccacctcccaggttcaagtgattctcctgtctcagcctcccaagtagctgggactacaggcatgagccatcacacccagctagttttttgtatttttagtaaagatggggttttgccatgtttgccaggctgatctcgaactcctgacctcaagtgatctgcccacttcagacccccaaagtgctgggattccaggtgtgagccgctgcggccgaccacatttgatgtttgaagttgtaatctgtcccatcataaacttacctggagctcatgtggaggaacagaaggccaagatccttgctttgggggtgcctcacgaagcatccctgtagacatttggccccagcttcactgcttggaagcatgtccctccctcttgagttggctctgatttgaaatcgggagaaacagagctgctgccaatgggatcttttaggtaactccctccctagcttccgtgtgtctgtgcagtgcccatgagctgctgccaatgggatctttcaggtaccccctccccagcttccctgtggctgtgcggtgcccttgacagatggcttctctgtttccctttgcccagccaggctcccctccttcctattagctacaaaactggataaacttcagaatatgagccaatgagtaggaaggaacttgaagactaaagattttactctctcccctatccatgccccctacctctgactctctctgtgtgaacaggaaactttagggcagatgaggagaatgaattggttatcagagtggaagaccatggcccaggatccctgagctttcccagtagcctccagtttcctttgtaagacccagggatcacttagccatagcctgaatcttttaggggtattaaggtcagcctctcactcttccttcaggttactaacaaaatttcgtagctaaagaatgccatggccgggtgcagtggctcacgcctataatcccagcactttgggaggccgaggcgggcggatcacgaggtcaggagattgagaccatcctggctacgacggtgaaaccccgtctctactaaaaatacaaaaaattagccgggtgtggtggcgggcgcctgtagtcccagctactctggaggctgaggcaggagaatggcatgaacccaggaggcagagattgcagtgagccaagatcacgcccctgcactccagcctgggtgacagagccagactccgtctcaaaggaaaaaaaaaaaaaaaaaaaaagaatgccatgccaggagaagacagctggtttcaaatccctgcccccaggcaagtaaaaccctgacttgctcaagacagaagatcttttctcctgtttttcaaaataaacatatatagggatggaccctgtgcattgtggcctgccttggtgtcctagaattggagccagtctttagcttaatgtctgaagtatttatacggccaatatgtgttttcttatgtcagaccacactgtctttttgaatatcagttcatttcctctcaccgagtgcttttcggtgagaggcaaagagaaagaatgaacaatcaagtattgacagactggcattagcaggacagagccatactagtgacaagggcatcccaaggcacttgcccagagctgcagagttgtgtgtgccatacctgcggctcaaagggaaggccttctatcccctgagtttctatcagctgaaaatggcaactgctgtctcagtaaaagctctgtcttgactgcagaggctccaaaagcattcacagttgagggggagaaagacagaaagaagaagccaaagataacctgatccctgcctgtctgttggcacctgtcatcctctggcttctgctcccaaaagcaagtctggatgactgagttttgtggacatggcactcccggagacagcagtggccaccatggcacccagagtttgcccaagtactgaatgttttgtgagcaaccatgttccccaagtaggtagccagcgctgcagaaaccaaacagcctcttagctacctgactttaaaaggaatgacctaggtgttctgccaaaggagttatctatcatctctggcaaacttgacaatcatcacttacctcgacaaccctgccccacatcactttataaagtcagcaggatgtcttctcacccaccctgtgctggtgtctaacaaatttatcttgtcatgctcaaatgtgtttggcagccacaccgatcggctgggtgctgaaccgcctctctgtaattgtagcatcaaaatgacaacagcagcagagcagcgaatcttgcacagccccacagcatgcctgagacaagactccaacaagtaataattagctttttttctcctgccgcctacagtacctgtctaactaaagagcttcccaaagtggagggaaaggccatagaatccaggtgtcattcagagccagtccttgctgaaatgtggtcttccagtggaagcacctgtattattgagaggaaaaagtgttggatgcaaagtaacaccaggactagagagaaagagaaaggtgaaccatcctaaggagctttggatacttttttagaaggataaatattatgcttactgaggagaaaaaaaaaagcgatcacagaaaaatttcacagctaatatttttacaaaagttgtgccagacattacagagtgaaaacgtctctcaaggtggaatgctttagagagcaaaggcttagcatagacctagacccttgtgtgggtatgacatgacatgacatgtccatgtcaaaattcactttagtcagaaccagagtattgataaacaaaatgtcagttacctggagcagtcctggagaggttaagacattctatactgttctacgtcaaccatttctacaaagttgtccagacacctaaaagcagctttcttggttatccagatgccagaatcaaccttgtatctgacaatgcacatctgttgattctaaagtatatttatgtgtgtgtgtatgtgtgtgtatacagcacatatttacatctatgaagacatagacacttacagagacccacatgagctggcactttctgagcctttacagcctttaagactcggaggttgagaattagagacacaagagaggctgtggatggcctattaaaatgattaaagatgtaaattcagtgccattttaaaactgttcatatttatcaaacaattactgtctacagctacattttttgttaacttacttaaagtcatgtcgcaagaaagatcaaacccatgaatgcttagtagctaaggctagtgttcaaaagcactctaaaagacattttgtccacattttggaaaagaaaatatttgcatgtttaattcataatttaggctatctttgagtatactgtaaagtgctgtgtgatataatatcaataaagtacttattaaatggcactttaatgttttcttttaaaataacgcactgttctaaacttcagtattgactattgactcgtgcatagaatccaatgctgtaattagaaagtaatctgtgactagaatagacctttgtccctgttagtagccctgttgccatgttcaggcttttaaaaaatgcttttgtgtcaccaaatatatctataaagaaaacaaaatttctgttcagaggcctctgaaacttggctttcttacatgtggttggtttatgtgacaatccctatgaaatgagtggacgtatgatttttgaattaaatgacttttccatttggtggtatttt

SEQ ID NO: 1413 - DNA, 564 bp, Homo sapiens
  source 1..564: mol_type = unassigned DNA; mol_type = unassigned DNA
agccagagatggagtccctgccagtgcagagctcttgacttctgccccatctcacttgcccggaatggaacctcttgcaccaagccctagaatttggacttgtgttttctattttggcattgaatctgaggaggatttgtcttcagcgaagcggaagtttgcagattccttaaatgaatttaaatttcagtgcataggagatgcagaaacagatgatgagatgtgtatagcaagatctttgcaggagtttgccactgtcctcaggaatcttgaagatgaacggatacggatgattgagaatgccagcgaggtgctcatcactcccttggagaagtttcgaaaggaacagatcggggctgccaaggaagccaaaaagaagtatgacaaagagacagaaaagtattgtggcatcttagaaaaacacttgaatttgtcttccaaaaagaaagaatctcagcttcaggaggcagacagccaagtggacctggtccggcagcatttctatgaagtatccctggaatatgtcttcaaggtgcaggaagtccaagagagaaagatgtttga

SEQ ID NO: 1414 - DNA, 643 bp, Homo sapiens
  source 1..643: mol_type = unassigned DNA; mol_type = unassigned DNA
attccctagctagagtgccaggtggaattaacctgcatttctgggtcatccttaatggttaatgattaaaaagatgaagggagccttgggaagcaattgactttaggcatctgtatgtgccaaggaattaaaatccataacataatagccagagctggaaaggctccccaaggcccatgacactccttccacctcatggcccctttctgttttccagcaagatctttgcaggagtttgccactgtcctcaggaatcttgaagatgaacggatacggatgattgagaatgccagcgaggtgctcatcactcccttggagaagtttcgaaaggaacagatcggggctgccaaggaagccaaaaagaagtatgacaaagagacagaaaagtattgtggcatcttagaaaaacacttgaatttgtcttccaaaaagaaagaatctcagcttcaggaggcagacagccaagtggacctggtccggcagcatttctatgaagtatccctggaatatgtcttcaaggtgcaggaagtccaagagagaaagatgtttgagtttgtggagcctctgctggccttcctgcaaggactcttcactttctatcaccatggttacgaactggccaaggatttcggggacttcaaga

SEQ ID NO: 1415 - DNA, 910 bp, Homo sapiens
  source 1..910: mol_type = unassigned DNA; mol_type = unassigned DNA
acaagaaatcgctttgaaggcactagatcagaagtggaatcactgatgaaaaagatgaaggagaatccccttgagcacaagaccatcagtccctacaccatggagggatacctctacgtgcaggagaaacgtcactttggaacttcttgggtgaagcactactgtacatatcaacgggattccaaacaaatcaccatggtaccatttgaccaaaagtcaggaggaaaagggggagaagatgaatcagttatcctcaaatcctgcacacggcggaaaacagactccattgagaagaggttttgctttgatgtggaagcagtagacagggaagagacccaggaaaactgaagattggtgaaagtcagaatagtggaggccagaaagatttttgaaagatctgaagaatctactggaaccctcagcaccctcatttcaaatatgtttgtatggcaggctgcatgatgcaggtaaaaaagataagagcattcctaaatttgaatttgggatctgttccttactagctgtgtgactctgggtaagtggtttaaccacatctgtaagatggggtgaattatcactacattgcaggattttttctgaaggtggaacacactaatattcccctctgatggagtcctatgtctgaaaacatggctgttgaatttttttctataccctaaaacctggggctttattgttgtgatggtgaaccttagctttggtggatattcctgtgagcctgctttttgtcttaatggtgctccttttcctgtagtgtcatgagttttcaagttatctataagctgagaggaaatacaggtgcattcgggttatatgtgcaaagggcctgctagggtaagattccattttcaaactgtgtatgtgataacctgttgttgatacatgcttc

SEQ ID NO: 1416 - DNA, 527 bp, Homo sapiens
  source 1..527: mol_type = unassigned DNA; mol_type = unassigned DNA
tttctgcgttctctcctcaatcatcttactcctgtcagtgaagagagtggaaacttcagttggggcttgatgatgggaacggggattagtttccccagggaacctttacttccgttgtattttaagacccactggatgtagcatcaatgggaaacagtcttctttggtccctgggggaaatcccggggtcactttggaacttcttgggtgaagcactactgtacatatcaacgggattccaaacaaatcaccatggtaccatttgaccaaaagtcaggaggaaaagggggagaagatgaatcagttatcctcaaatcctgcacacggcggaaaacagactccattgagaagaggttttgctttgatgtggaagcagtagacaggccaggggttatcaccatgcaagctttgtcggaagaggaccggaggctctggatggaagccatggatggccgggaacctgtctacaactcgaacaaagacagccagagtgaagggactgcgcagttggacagcattggcttcag

SEQ ID NO: 1417 - DNA, 566 bp, Homo sapiens
  source 1..566: mol_type = unassigned DNA; mol_type = unassigned DNA
gaagagagtggaaacttcagttggggcttgatgatgggaacggggattagtttccccagggaacctttacttccgttgtattttaagacccactggatgtagcatcaatgggaaacagtcttctttggtccctgggggaaatcccggggtcactttggaacttcttgggtgaagcactactgtacatatcaacgggattccaaacaaatcaccatggtaccatttgaccaaaagtcaggaggaaaagggggagaagatgaatcagttatcctcaaatcctgcacacggcggaaaacagactccattgagaagaggttttgctttgatgtggaagcagtagacagtggagacggaatttcaccgtgttggctaggctggtcctgaactcctgacctcaagtgatccacccaccttggcctcccaaagtgctgggattacaggcatgagccgccacgcctggcctgaatctcctcttaatgaacaggaggccaggggttatcaccatgcaagctttgtcggaagaggaccggaggctctggatggaagccatggatggccgggaacct

SEQ ID NO: 1418 - DNA, 667 bp, Homo sapiens
  source 1..667: mol_type = unassigned DNA; mol_type = unassigned DNA
acttctaacatagtttaagggtagggtagatgagcattatgaattatgggttgtggtttttccagctcatgatgtatagcatacagtggaatgtatagatattttatgggaaatattacctttcaggtcactttggaacttcttgggtgaagcactactgtacatatcaacgggattccaaacaaatcaccatggtaccatttgaccaaaagtcaggaggaaaagggggagaagatgaatcagttatcctcaaatcctgcacacggcggaaaacagactccattgagaagaggttttgctttgatgtggaagcagtagacaggccaggggttatcaccatgcaagctttgtcggaagaggaccggaggctctggatggaagccatggatggccgggaacctgtctacaactcgaacaaagacagccagagtgaagggactgcgcagttggacagcattggcttcagcataatcaggaaatgcatccatgctgtggaaaccagagggatcaacgagcaagggctgtatcgaattgtgggtgtcaactccagagtgcagaagttgctgagtgtcctgatggaccccaagactgcttctgagacagaaacagatatctgtgctgaatgggagataaagaccatcactagtgctctgaagacctacctaag

SEQ ID NO: 1419 - DNA, 513 bp, Homo sapiens
  source 1..513: mol_type = unassigned DNA; mol_type = unassigned DNA
attgtaggaaaagcacgtggcatagaaggtgatatgtagctatctttggaagagacagttgggcacatatggctccctggtgtccccgccattgggcagctccttgaatgctcctagttcttccctcctcctggctgttgcctctcgcctcctgcctgcttggagaagatgaatcagttatcctcaaatcctgcacacggcggaaaacagactccattgagaagaggttttgctttgatgtggaagcagtagacaggccaggggttatcaccatgcaagctttgtcggaagaggaccggaggctctggatggaagccatggatggccgggaacctgtctacaactcgaacaaagacagccagagtgaagggactgcgcagttggacagcattggcttcagcataatcaggaaatgcatccatgctgtggaaaccagagggatcaacgagcaagggctgtatcgaattgtgggtgtcaactccagagtgcagaagttgctgagtgtcctgatgg

SEQ ID NO: 1420 - DNA, 556 bp, Homo sapiens
  source 1..556: mol_type = unassigned DNA; mol_type = unassigned DNA
cccaggaaaccttgaaagagagtaatttggcacaaattcatctcctaatgaaggagggctggaagtcctgcattttactattccttctggattttgccagctataaatagaagcaaggttcccttggatagaatgtttgaatttactaggagaaatgcagggatcaaggatggctgaagaaaaatacttgccaaagtgtggtcttctcttctgcacttcccttgcccaactttccaaggtctacaactcgaacaaagacagccagagtgaagggagtaagtacgatgcttgggtaaccttctacagccagggttgggagtaggctttgagaagttgctactccaggtgtgaaccaccaggcggtgctgtgggcgtgttgggttggctccagttcccgagtgcagtgggacatgcctccaccccaactttccgccagtgactccagagggacggtaagtgagcctggctggcaaggctgtagtgtagtgacaccttgcattgaaataatgggtcacactttacaaagcattctcgtgtacattatctcctttaatcg

SEQ ID NO: 1421 - DNA, 293 bp, Homo sapiens
  source 1..293: mol_type = unassigned DNA; mol_type = unassigned DNA
gtctacaactcgaacaaagacagccagagtgaagggactgcgcagttggacagcattggcttcagcataatcaggaaatgcatccatgctgtggaaaccagagaactcttcagatgctgcctttggcaagagaaaggaaagcttctttcgccgctgatgactgaactaacatgagggctgaagtgtgcagcacatccgtgaaatcctagacagctgtaccaaatcccactcgtttgctaagagctgagctgagtgacaggggactttaattagagcagcttttaggaggactg

SEQ ID NO: 1422 - DNA, 2870 bp, Homo sapiens
  source 1..2870: mol_type = unassigned DNA; mol_type = unassigned DNA
ctgcgcagttggacagcattggcttcagcataatcaggaaatgcatccatgctgtggaaaccagagggatcaacgagcaagggctgtatcgaattgtgggtgtcaactccagagtgcagaagttgctgagtgtcctgatggaccccaagactgcttctgagacagaaacagatatctgtgctgaatgggagataaagaccatcactagtgctctgaagacctacctaagaatgcttccaggaccactcatgatgtaccagtttcaaagaagtttcatcaaagcagcaaaactggagaaccaggagtctcgggtctctgaaatccacagccttgttcatcggctcccagagaaaaatcggcagatgttacagctgctcatgaaccacttggcaaatgttgctaacaaccacaagcagaatttgatgacggtggcaaaccttggtgtggtgtttggacccactctgctgaggcctcaggaagaaacagtagcagccatcatggacatcaaatttcagaacattgtcattgagatcctaatagaaaaccacgaaaagatatttaacaccgtgcccgatatgcctctcaccaatgcccagctgcacctgtctcggaagaagagcagtgactccaagcccccgtcctgcagcgagaggcccctgacgctcttccacaccgttcagtcaacagagaaacaggaacaaaggaacagcatcatcaactccagtttggaatctgtctcatcaaatccaaacagcatccttaattccagcagcagcttacagcccaacatgaactccagtgacccagacctggctgtggtcaaacccacccggcccaactcactccccccgaatccaagcccaacttcacccctctcgccatcttggcccatgttctcggcgccatccagccctatgcccacctcatccacgtccagcgactcatcccccgtcaggccagaagaagcggtacatgaagactccagcacaccgttccggaaggcaaaagccttgtatgcctgcaaagctgaacatgactcagaactttcgttcacagcaggcacggtcttcgataacgttcacccatctcaggagcctggctggttggaggggactctgaacggaaagactggcctcatccctgagaattacgtggagttcctctaaccgtgggccccagcagaactgctgagctttacatggtatccatgacaactgctgattccagtgtcgaggccatttctctttgccactgagaaatgcagcgtgactgactctgttgctacctgtcaacatgaatgtttctgtgagctctggtgtcactcatctccatgatcatctcagccaacatgcatcagtactgcaagaaaagaagtcaatcagcagaggagagcatttgataactaagaggaagacttgcaaagccgttttctcatgagtaccctgaatagggggcactcattttgtttcaacggtccaaacgcccaaccttcagaaagaggaagtcagatagaaatagtccctgagagcacactgtgtagctaagcctgctggggctgggtgaagaaattggcgctgagatccaggctggatccattgcttttgtttacaataggcactctctctaccccacctctcagtacttgagacttaaagtgctacaggcagctggatctgtttgcatgcaggatgaagagggttaaaacactgtttatataagatccaatctctcaccatctctaaagcagccgttggcctgtcatcagtgagatacaatccagtcttctcatgcacgggaacacacacaccctgcgtttctccctcccaggctaggaacctctctgccaccaagggctgccatccatcgcctagtaaccacggcaacccaacctactctaaaaccaaaccaaaaaaataaaataacacatcctctttgcatgacacattttttttctcccctttttggtacactttttttgaatggttttctaacaacttgaagcacaggatcaaggaattagggtggtctacttgaggcagatgggatagtagctgggaactgttccctttctgattaatttcagcagcatcggaatatatttggagcacaccctagtaacctcttgagattaaattacatagtcttaatatttctgttcctccatgcaactgatgtttgttttttaaagggtaagatgctgcctcccaatgggtgatgccatctgactggtttccccatgtcctcccattcacccatctctgctcccacccttgcctgcctctaacccaccactggccagcccccttgccctactctgggctgctgaacactggtgctgtggtggttttcaaggttaattcctaggctaaccgtatggcctatagtttaaaagcacatctatgttcactgccactctgaaaaagggaattatttctcagtctttcaaggcttgagactaatataggccattgtgattcaggaagaaacccaaggttggagggtgggatgagtaccctctgaaaaagggaatttgctggtgaaaagaggctggatcttgtggaagactgtcttggatggggaagtactacctggagatttcaaattcacttggcctgcaaacaacagagttatccgtatcttccacatgtgaatgtcattgcaagggtgactctagacaaactacaaaccgatggaccgtcaagctccccaggagccccttggatggcagcgttgcttcagagtgtttcctgtttctggaattccttgttagggaactttaaagaagaaaagaaaaacttgaattgtgttgaattactgtatcttttacttttttttttttgaaaagataaacttgtaaatagagtgatttg

SEQ ID NO: 1423 - DNA, 1632 bp, Homo sapiens
  source 1..1632: mol_type = unassigned DNA; mol_type = unassigned DNA
accccaagactgcttctgagacagaaacagatatctgtgctgaatgggagataaagaccatcactagtgctctgaagacctacctaagaatgcttccaggaccactcatgatgtaccagtttcaaagaagtttcatcaaagcagcaaaactggagaaccaggagtctcgggtctctgaaatccacagccttgttcatcggctcccagagaaaaatcggcagatgttacagctgctcatgaaccacttggcaaatgttgctaacaaccacaagcagaatttgatgacggtggcaaaccttggtgtggtgtttggacccactctgctgaggcctcaggaagaaacagtagcagccatcatggacatcaaatttcagaacattgtcattgagatcctaatagaaaaccacgaaaagatatttaacaccgtgcccgatatgcctctcaccaatgcccagctgcacctgtctcggaagaagagcagtgactccaagcccccgtcctgcagcgagaggcccctgacgctcttccacaccgttcagtcaacagagaaacaggaacaaaggaacagcatcatcaactccagtttggaatctgtctcatcaaatccaaacagcatccttaattccagcagcagcttacagcccaacatgaactccagtgacccagacctggctgtggtcaaacccacccggcccaactcactcacaccgttccggaaggcaaaagccttgtatgcctgcaaagctgaacatgactcagaactttcgttcacagcaggcacggtcttcgataacgttcacccatctcaggagcctggctggttggaggggactctgaacggaaagactggcctcatccctgagaattacgtggagttcctctaaccgtgggccccagcagaactgctgagctttacatggtatccatgacaactgctgattccagtgtcgaggccatttctctttgccactgagaaatgcagcgtgactgactctgttgctacctgtcaacatgaatgtttctgtgagctctggtgtcactcatctccatgatcatctcagccaacatgcatcagtactgcaagaaaagaagtcaatcagcagaggagagcatttgataactaagaggaagacttgcaaagccgttttctcatgagtaccctgaatagggggcactcattttgtttcaacggtccaaacgcccaaccttcagaaagaggaagtcagatagaaatagtccctgagagcacactgtgtagctaagcctgctggggctgggtgaagaaattggcgctgagatccaggctggatccattgcttttgtttacaataggcactctctctaccccacctctcagtacttgagacttaaagtgctacaggcagctggatctgtttgcatgcaggatgaagagggttaaaacactgtttatataagatccaatctctcaccatctctaaagcagccgttggcctgtcatcagtgagatacaatccagtcttctcatgcacgggaacacacacaccctgcgtttctccctcccaggctaggaacctctctgccaccaagggctgccatccatcgcctagtaaccacggcaacccaacctactctaaaaccaaaccaaaaaaa

SEQ ID NO: 1424 - DNA, 412 bp, Homo sapiens
  source 1..412: mol_type = unassigned DNA; mol_type = unassigned DNA
gcaaaactggagaaccaggagtctcgggtctctgaaatccacagccttgttcatcggctcccagagaaaaatcggcagatgttacagctgctcatgaaccacttggcaaagtatgctggaggcttaggaaagaaatgtgtgaaatgttcattgcagtggagaacagcagcaaatgccagatggccttcccagaggatgctggggaagtgctcatgcaaccaggccaccaagcagagttttcagggggattttacctatggtgatcaagggcaaattggagtgtgttgtccatgataccaggtcaccacacagaattttgtgggattatatgttcttatgctcatcaagaacaaacaaaaatatgttgtgggtttacagaatttgggtttttagtaaagaggactggattcta

SEQ ID NO: 1425 - DNA, 565 bp, Homo sapiens
  source 1..565: mol_type = unassigned DNA; mol_type = unassigned DNA
attgtcattgagatcctaatagaaaaccacgaaaagatatttaacaccgtgcccgatatgcctctcaccaatgcccagctgcacctgtctcggaagaagagcagtgactccaagcccccgtcctgcagcgagaggcccctgacgctcttccacaccgttcagtcaacagagaaacaggaacaaaggaacagcatcatcaactccagtttggaatctgtctcatcaaatccaaacagcatccttaattccagcagcagcttacagcccaacatgaactccagtgacccagacctggctgtggtcaaacccacccggcccaactcacttgttcagcctcctcgtcaactttgttccctgccatccaaacctgcacttgctttttgacaggccagaagaagcggtacatgaagactccagcacaccgttccggaaggcaaaagccttgtatgcctgcaaagctgaacatgactcagaactttcgttcacagcaggcacggtcttcgataacgttcacccatctcaggagcctggctggttggaggggactctgaacggaaagactggc

SEQ ID NO: 1426 - DNA, 559 bp, Homo sapiens
  source 1..559: mol_type = unassigned DNA; mol_type = unassigned DNA
gtcattgagatcctaatagaaaaccacgaaaagatatttaacaccgtgcccgatatgcctctcaccaatgcccagctgcacctgtctcggaagaagagcagtgactccaagcccccgtcctgcagcgagaggcccctgacgctcttccacaccgttcagtcaacagagaaacaggaacaaaggaacagcatcatcaactccagtttggaatctgtctcatcaaatccaaacagcatccttaattccagcagcagcttacagcccaacatgaactccagtgacccagacctggctgtggtcaaacccacccggcccaactcactgcactggggatttggaatgtgtttggagggttgtactgaggtgcagagtcctgcttcgtgatgggcacaagggttcatgcgagttcagcaagcagttaccatgtctacggcatgccaggatactgttgggaaggtagtattccgttgttcagcctcctcgtcaactttgttccctgccatccaaacctgcacttgctttttgacaggccagaagaagcggtacatgaagactccag

SEQ ID NO: 1427 - DNA, 407 bp, Homo sapiens
  source 1..407: mol_type = unassigned DNA; mol_type = unassigned DNA
gatatgcctctcaccaatgcccagctgcacctgtctcggaagaagagcagtgactccaagcccccgtcctgcagcgagaggcccctgacgctcttccacaccgttcagtcaacagagaaacaggaacaaaggaacagcatcatcaactccagtttggaatctgtctcatcaaatccaaacagcatccttaattccagcagcagcttacagcccaacatgaactccagtgacccagacctggctgtggtcaaacccacccggcccaactcactgtaagtatgatgtccagctgcctaccccacaagggctttggtcagccattccacctagaatttgctgtctggctccatctgactttggaccattatcccctgaacattatttaaacctcctccctaaactgggag

SEQ ID NO: 1428 - DNA, 4752 bp, Homo sapiens
  source 1..4752: mol_type = unassigned DNA; mol_type = unassigned DNA
aatcagtgtgtcgggcctcaaaagagaagagcaatgtgatttcatgtagaaccctatttgtatgctgccacagccctatgctttgctttacttcggattcatatagaaatccaagaatttgtagtaagtaagagaaagaaaacaccatctctgctcagctgagctggcccgtgtgccgaactaggaagatggctcttttcctctggagaggatatgatcttttcaaggttgctttttacacatcaccatggggctggcctggttgcatgctgaagctgtgaaacctgagtgtgtatctgtgcaaagctggggtcgaatcagggcccctaggggccctgcactggttttgttgagtggaacatacaggttggggtttttggaggctgggtggggaagagggaggagagatgagggtgttgtcagtgagggaggaactttggggaacagaaatatctaaaaggaagtttaatggactttcttgtacacggtgcataatgtgaatcctcgtccatgtcacctcatgcgggcttcgcacaccgttccggaaggcaaaagccttgtatgcctgcaaagctgaacatgactcagaactttcgttcacagcaggcacggtcttcgataacgttcacccatctcaggagcctggctggttggaggggactctgaacggaaagactggcctcatccctgagaattacgtggagttcctctaaccgtgggccccagcagaactgctgagctttacatggtatccatgacaactgctgattccagtgtcgaggccatttctctttgccactgagaaatgcagcgtgactgactctgttgctacctgtcaacatgaatgtttctgtgagctctggtgtcactcatctccatgatcatctcagccaacatgcatcagtactgcaagaaaagaagtcaatcagcagaggagagcatttgataactaagaggaagacttgcaaagccgttttctcatgagtaccctgaatagggggcactcattttgtttcaacggtccaaacgcccaaccttcagaaagaggaagtcagatagaaatagtccctgagagcacactgtgtagctaagcctgctggggctgggtgaagaaattggcgctgagatccaggctggatccattgcttttgtttacaataggcactctctctaccccacctctcagtacttgagacttaaagtgctacaggcagctggatctgtttgcatgcaggatgaagagggttaaaacactgtttatataagatccaatctctcaccatctctaaagcagccgttggcctgtcatcagtgagatacaatccagtcttctcatgcacgggaacacacacaccctgcgtttctccctcccaggctaggaacctctctgccaccaagggctgccatccatcgcctagtaaccacggcaacccaacctactctaaaaccaaaccaaaaaaataaaataacacatcctctttgcatgacacattttttttctcccctttttggtacactttttttgaatggttttctaacaacttgaagcacaggatcaaggaattagggtggtctacttgaggcagatgggatagtagctgggaactgttccctttctgattaatttcagcagcatcggaatatatttggagcacaccctagtaacctcttgagattaaattacatagtcttaatatttctgttcctccatgcaactgatgtttgttttttaaagggtaagatgctgcctcccaatgggtgatgccatctgactggtttccccatgtcctcccattcacccatctctgctcccacccttgcctgcctctaacccaccactggccagcccccttgccctactctgggctgctgaacactggtgctgtggtggttttcaaggttaattcctaggctaaccgtatggcctatagtttaaaagcacatctatgttcactgccactctgaaaaagggaattatttctcagtctttcaaggcttgagactaatataggccattgtgattcaggaagaaacccaaggttggagggtgggatgagtaccctctgaaaaagggaatttgctggtgaaaagaggctggatcttgtggaagactgtcttggatggggaagtactacctggagatttcaaattcacttggcctgcaaacaacagagttatccgtatcttccacatgtgaatgtcattgcaagggtgactctagacaaactacaaaccgatggaccgtcaagctccccaggagccccttggatggcagcgttgcttcagagtgtttcctgtttctggaattccttgttagggaactttaaagaagaaaagaaaaacttgaattgtgttgaattactgtatcttttacttttttttttttgaaaagataaacttgtaaatagagtgatttgaaatactatatggcaaagttttatatttgatattctttaagttagttgctcacacacttaggctttgattgctgaagaagtatgtttaagagggagagaggggaggcaaagctgaagagagtcaaggtcactgtccccgcttcggcctgaaggaaagagaagacatttctatggccttgctctctgctgtcctgttggtgggcacgacacatcagtggtgttcagtctttatgtgtttttaagcatcccttgggctttggatttggagatgggaagagcatctccaggcaatgagtttttcaaagaatgcctacttagtagtaagatgaagctcaggatttaaataagtggggtcaggcattcgagtttttgtctttcttctcaggtgtatttcttggtacccccaagatatcaggccagaaagagatgagtcagttgctgtgctctttacttctttttctccacatcttctgaggctttagaaatgtggacaagctagttttcaaattttgtgtgcgtctgtaagttcttaaagaaccagcttcttagaatgttcagttctcaatgtgctgctgctttcccttctcctaaacattttaaaactcttccctttcacctccaattcccgtgatcccaaaagaagaggaagactccaggaggggtatagattgtgccgtcatagctttacaggtggttttaaagttaacaggggtttgtcatggtgattcactactcagtttatcagctcaaggattatacagctcttttccgggaactcacccaggagcaagcgagacactaccattgaatcagggaatgagaattaagaatggacaggaccaagacagaactcaagaaagccactggggaaaactcgagaagaaagggagtatactagtaggttagatctgtgaacctgaggacaagaagaccttgggaaatggaggcctcaggggatgtgcattcacatactattacgcttctcaaagagagaccaacatcatgcttttaacacatttgatgaggttttttatttgtgtttttgtttgttttttgagatggagtctcactctgtggcccaggctggagtgcagtggcgcaatcttggctcactgcaacctccacctcccaggttcaagtgattctcctgtctcagcctcccaagtagctgggactacaggcatgagccatcacacccagctagttttttgtatttttagtaaagatggggttttgccatgtttgccaggctgatctcgaactcctgacctcaagtgatctgcccacttcagacccccaaagtgctgggattccaggtgtgagccgctgcggccgaccacatttgatgtttgaagttgtaatctgtcccatcataaacttacctggagctcatgtggaggaacagaaggccaagatccttgctttgggggtgcctcacgaagcatccctgtagacatttggccccagcttcactgcttggaagcatgtccctccctcttgagttggctctgatttgaaatcgggagaaacagagctgctgccaatgggatcttttaggtaactccctccctagcttccgtgtgtctgtgcagtgcccatgagctgctgccaatgggatctttcaggtaccccctccccagcttccctgtggctgtgcggtgcccttgacagatggcttctctgtttccctttgcccagccaggctcccctccttcctattagctacaaaactggataaacttcagaatatgagccaatgagtaggaaggaacttgaagactaaagattttactctctcccctatccatgccccctacctctgactctctctgtgtgaacaggaaactttagggcagatgaggagaatgaattggttatcagagtggaagaccatggcccaggatccctgagctttcccagtagcctccagtttcctttgtaagacccagggatcacttagccatagcctgaatcttttaggggtattaaggtcagcctctcactcttccttcaggttactaacaaaatttcgtagctaaagaatgccatggccgggtgcagtggctcacgcctataatcccagcactttgggaggccgaggcgggcggatcacgaggtcaggagattgagaccatcctggctacgacggtgaaaccccgtctctactaaaaatacaaaaaattagccgggtgtggtggcgggcgcctgtagtcccagctactctggaggctgaggcaggagaatggcatgaacccaggaggcagagattgcagtgagccaagatcacgcccctgcactccagcctgggtgacagagccagactccgtctcaaagg

SEQ ID NO: 1429 - DNA, 783 bp, Homo sapiens
  source 1..783: mol_type = unassigned DNA; mol_type = unassigned DNA
ccccccgaatccaagcccaacttcacccctctcgccatcttggcccatgttctcggcgccatccagccctatgcccacctcatccacgtccagcgactcatcccccgtcaggtctgttgcagggtttgtttggttttctgttgctgccgttgttctctcattggctcggtcctctcttcatgcagtgttcagcctcctcgtcaactttgttccctgccatccaaacctgcacttgctttttgacaggccagaagaagcggtacatgaagactccagcacaccgttccggaaggcaaaagccttgtatgcctgcaaagctgaacatgactcagaactttcgttcacagcaggcacggtcttcgataacgcagagtgtccttcagcttccacagccatcttcactgccacaccgaagctccgggcacctccacctctcacctgggcacttccactggccgcctgacacatcttctcacatctgctcttgctgccataaccccctctttacagagcagcgagagtgatctttgaaaaacggaaatggcattaaagcccttcagtggcctcccattgctctgagaattacttacaaggccctccagggcccagttcctgcccctctgacctcacgccctcacttgacatactacagcctcatgccttcttcatgttctcaagcaaggtcggcaaactatgacctgcccgtcaaatccaacctgccacctgtcacctaacaattctgtaactgctcccacatacaacatggtcgtcatcataaatcct

SEQ ID NO: 1430 - DNA, 785 bp, Homo sapiens
  source 1..785: mol_type = unassigned DNA; mol_type = unassigned DNA
ccccgaatccaagcccaacttcacccctctcgccatcttggcccatgttctcggcgccatccagccctatgcccacctcatccacgtccagcgactcatcccccgtcagcacaccgttccggaaggcaaaagccttgtatgcctgcaaagctgaacatgactcagaactttcgttcacagcaggcacggtcttcgataacgcagagtgtccttcagcttccacagccatcttcactgccacaccgaagctccgggcacctccacctctcacctgggcacttccactggccgcctgacacatcttctcacatctgctcttgctgccataaccccctctttacagagcagcgagagtgatctttgaaaaacggaaatggcattaaagcccttcagtggcctcccattgctctgagaattacttacaaggccctccagggcccagttcctgcccctctgacctcacgccctcacttgacatactacagcctcatgccttcttcatgttctcaagcaaggtcggcaaactatgacctgcccgtcaaatccaacctgccacctgtcacctaacaattctgtaactgctcccacatacaacatggtcgtcatcataaatcctataggtattgttgagagcaggaggaaagtttggttgagtgagtgagagaccttacccaagccttcctgtggtctctaggagtcatggcagagttcgctgacactggtctgcttttaaccagccttgccagtgacctttcaaattccctgaggagcaaaaggccaaattg

SEQ ID NO: 1431 - DNA, 1807 bp, Homo sapiens
  source 1..1807: mol_type = unassigned DNA; mol_type = unassigned DNA
accatttttttccgagaatgaatagcagaatttccctgtataaaaagtccaagaatagaagccaattttaaattaaagctaaaatagtatgacttttattattctgaaaatgttgtcattccccatttccaaaataatacaatgaataatcagaagagctgtatccatgtttttcttttaggagactttaatacaaaattaccgtgtacttcatctacaatatgtcttctgctgctgatctagatctgagctgtccgatacagctgccagaagccacaggtgacgttatattcctattcgaagaccaagagctcaaaacatcattcctcccccaaatgaaaaaatgtctgggaaaaattactaatctacttctctgaaacccatttgggaagctggcccaattcgagttctatactcaaaaggcaaacgtaaagactaaacctgtaagtgtgcctgtatgtagatgacttcttacaagacctcctaatgagagtaatggcagaaataggggaaatgaaaattaagacaagttttgcaagtgttattccaaagaatccagaatatttccattttgcccatggtgaaactatccaaggaaggttaagtaatttggattggtcaggatgtgaacctaggccagtctgacttttaagcctgtgatttttctgttatcccatgacatggtgtacactacaagaaatgctaatcttaataacatagctacctgtattgagagctcattaggtccggtactgttctaagcactttgcttctatctctcactcagcatattttagtgagctctttattgatttacaagattatgcatctatgaactcagtcacactggctattaattaaattcccttcaagtttgtaaaaaattaattgacatttcattcttttttcagaagacaccaggtttttagccttggatcaagatgtctcaaaaaaaattcagtaaaaatctagatcttgctcagctccaaattcttgtactgctttcagagtactgagatcattgtagcccaaacatgcaatggcattttataagcctcttgaactctgaggactaagctctgattttttttaatcttgtccaaattcctatctaaggggtctggggagtcatgcactacaaaccataaattctcatcagatgggttttatttaaccctatatatcatgacttacttgccaacctgactctggcataacattatcagacaaggaagaaaatcaaaatattttaccccaaaacatgtttatttgccatatcttgaaatggccctgcaaagctgtcttttgtgggggaaaatttgcctctgtaaagaatctctattaacataactagatctttttcttccaggccctcccaaacctaaggagattaactaaaagtctagcacttcttaaagatctgaataggaaacatttcaactattatctctaagggcagccactataagacttcaaaagaaccttggtctccacaatcttttatcttaacctgaacctttcccttctatcaatcccaggtctttagacaaactcaaccaattgtcaatcagaaaatatttaaattcacctgtagcctggaagcccctgctttgagttgtcccatccttctagaccaaacgaatgtatttcttaaatgtatttgattgatgtctcatacctccctaaaatgtataaaaccaagctgcatccccaactaccttgggcacatgttctaaggacctcctgagggctgtgtcatgggccatggtcactcatatttggctcaaaataaatctctttgaatatt

SEQ ID NO: 1432 - DNA, 3439 bp, Homo sapiens
  source 1..3439: mol_type = unassigned DNA; mol_type = unassigned DNA
agaacccctggtaggttaatccaggcttacccacttgctctacatgctgctctttgggatttcagtttttctgactgttacatgaaaggatgattgctcacaaacagaaaaagacaaagaaaaaacgtgcttgggcatcaggtcaactctctactgatattacaacttctgaaatggggctcaagtccttaagttccaactctatttttgatccggattacatcaaggagttggtgaatgatatcaggaagttctcccacatgttactatatttgaaagaagccatattttcagactgttttaaagaagttattcatatacgtctagaggaactgctccgtgttttaaagtctataatgaataaacatcagaacctcaattctgttgatcttcaaaatgctgcagaaatgctcactgcaaaagtgaaagctgtgaacttcacagaagttaatgaagaaaacaaaaacgatctcttccaggaagtgttttcttctattgaaactttggcatttacctttggaaatatccttacaaacttccttatgggagatgtaggcaatgattcattattgcgactgcctgtttctcgagaaactaagtcgtttgaaaatgtttctgtggaatcagtggactcatccagtgaaaaaggaaatttttcccctttagaactagacaacgtgctgttaaagaacactgactctatcgagctggctttgtcatatgctaaaacttggtcaaaatatactaagaacatagtttcatgggttgaaaaaaagcttaacttggaattggagtccactagaaatatggtcaagttggcagaggcaactagaactaacattggaattcaggagttcatgccactgcagtctctgtttactaatgctcttcttaatgatatagaaagcagtcaccttttacaacaaacaattgcagctctccaggctaacaaatttgtgcagcctctacttggaaggaaaaatgaaatggaaaaacaaaggaaagaaataaaagagctttggaaacaggagcaaaataaaatgcttgaagcagagaatgctctcaaaaaggcaaaattattatgcatgcaacgtcaagatgaatatgagaaagcaaagtcttccatgtttcgtgcagaagaggagcatctgtcttcaagtggcggattagcaaaaaatctcaacaagcaactagaaaaaaagcgaaggttggaagaggaggctctccaaaaagtagaagaagcaaatgaactttacaaagtttgtgtgacaaatgttgaagaaagaagaaatgatctagaaaataccaaaagagaaattttagcacaactccggacacttgttttccagtgtgatcttacccttaaagctgtaacagttaacctcttccacatgcagcatctgcaggctgcttcccttgcagacagtttacagtctctctgtgatagtgccaaactctatgacccaggccaagagtacagtgaatttgtcaaggccacaaattcaactgaagaagaaaaagttgatggaaatgtaaataaacatttaaatagttcccaaccttcaggatttggacctgccaactctttagaggatgttgtacgccttcctgacagttctaataaaattgaagaggacagatgctctaacagtgcagatataacaggtccttcctttataagatcatggacatttgggatgtttagtgattctgagagcactggagggagcagcgaatctagatctctggattcagaatctataagtccaggagactttcatcgaaaacttccacgaacaccatccagtggaactatgtcctctgcagatgatctagatgaaagagagccaccttccccttcagaaactggacccaattcccttggaacatttaagaaaacattgatgtcaaaggcagctctcacacacaagtttcgcaaattgagatcccccacgaaatgtagggattgtgaaggcattgtagtgttccaaggtgttgaatgtgaagagtgtctccttgtttgtcatcgaaagtgtttggaaaatttagtcattatttgtggtcatcagaaacttccaggaaaaatacacttatttggagcagaattcacacaagttgcaaaaaaggaaccagatggtatcccttttatactcaaaatatgtgcctcagagattgaaaatagagctttgtgtctacagggaatttatcgtgtgtgtggaaacaaaataaaaactgaaaaattgtgtcaagctttggaaaatggaatgcacttggtagatatttcagaatttagttcacatgatatctgtgacgtcttgaaattataccttcggcagctcccagaaccatttattttatttcgattgtacaaggaatttatagaccttgcaaaagagatccaacatgtaaatgaagaacaagagacaaaaaagaatagtcttgaagacaaaaaatggccaaatatgtgtatagaaataaaccgaattcttctaaaaagcaaagaccttctaagacaattgccagcatcaaattttaacagtcttcatttccttatagtacatctaaagcgggtagtagatcatgcagaagaaaacaagatgaactccaaaaacttgggggtgatatttggaccaagtctcattaggccaaggcccacaactgctcctatcaccatctcctcccttgcagagtattcaaatcaagcacgcttggtagagtttctcattacttactcacagaagatcttcgatgggtccctacaaccacaagatgttatgtgtagcataggtgttgttgatcaaggctgttttccaaagcctctgttatcaccagaagaaagagacattgaacgttccatgaagtcactatttttttcttcaaaggaagatatccatacttcagagagtgaaagcaaaatttttgaacgagctacatcatttgaggaatcagaacgcaagcaaaatgcgttaggaaaatgtgatgcatgtctcagtgacaaagcacagttgcttctagaccaagaggctgaatcagcatcccaaaagatagaagatggtaaaacccctaagccactttctctgaaatctgataggtcaacaaacaatgtggagaggcatactccaaggaccaagattagacctgagactttaatacaaaattaccgtgtacttcatctacaatatgtcttctgctgctgatctagatctgagctgtccgatacagctgccagaagccacaggtgacgttatattcctattcgaagaccaagagctcaaaacatcattcctcccccaaatgaaaaaatgtctgggaaaaattactaatctacttctctgaaacccatttgggaagctggcccaattcgagttctatactcaaaaggcaaacgtaaagactaaacctaagacaccaggtttttagccttggatcaagatgtctc

SEQ ID NO: 1433 - DNA, 6087 bp, Homo sapiens
  source 1..6087: mol_type = unassigned DNA; mol_type = unassigned DNA
gctgtggctgcggctgcggctgcggctgagatttggccgggcgtccgcaggccgtgggggatgggggcagcgagctccagccctcggcggtggcggcggccgtaggtgtggggcgggcgtccgcgtccggcacgcgagatggagcgccgtggatttcagtttttctgactgttacatgaaaggatgattgctcacaaacagaaaaagacaaagaaaaaacgtgcttgggcatcaggtcaactctctactgatattacaacttctgaaatggggctcaagtccttaagttccaactctatttttgatccggattacatcaaggagttggtgaatgatatcaggaagttctcccacatgttactatatttgaaagaagccatattttcagactgttttaaagaagttattcatatacgtctagaggaactgctccgtgttttaaagtctataatgaataaacatcagaacctcaattctgttgatcttcaaaatgctgcagaaatgctcactgcaaaagtgaaagctgtgaacttcacagaagttaatgaagaaaacaaaaacgatctcttccaggaagtgttttcttctattgaaactttggcatttacctttggaaatatccttacaaacttccttatgggagatgtaggcaatgattcattattgcgactgcctgtttctcgagaaactaagtcgtttgaaaatgtttctgtggaatcagtggactcatccagtgaaaaaggaaatttttcccctttagaactagacaacgtgctgttaaagaacactgactctatcgagctggctttgtcatatgctaaaacttggtcaaaatatactaagaacatagtttcatgggttgaaaaaaagcttaacttggaattggagtccactagaaatatggtcaagttggcagaggcaactagaactaacattggaattcaggagttcatgccactgcagtctctgtttactaatgctcttcttaatgatatagaaagcagtcaccttttacaacaaacaattgcagctctccaggctaacaaatttgtgcagcctctacttggaaggaaaaatgaaatggaaaaacaaaggaaagaaataaaagagctttggaaacaggagcaaaataaaatgcttgaagcagagaatgctctcaaaaaggcaaaattattatgcatgcaacgtcaagatgaatatgagaaagcaaagtcttccatgtttcgtgcagaagaggagcatctgtcttcaagtggcggattagcaaaaaatctcaacaagcaactagaaaaaaagcgaaggttggaagaggaggctctccaaaaagtagaagaagcaaatgaactttacaaagtttgtgtgacaaatgttgaagaaagaagaaatgatctagaaaataccaaaagagaaattttagcacaactccggacacttgttttccagtgtgatcttacccttaaagctgtaacagttaacctcttccacatgcagcatctgcaggctgcttcccttgcagacagtttacagtctctctgtgatagtgccaaactctatgacccaggccaagagtacagtgaatttgtcaaggccacaaattcaactgaagaagaaaaagttgatggaaatgtaaataaacatttaaatagttcccaaccttcaggatttggacctgccaactctttagaggatgttgtacgccttcctgacagttctaataaaattgaagaggacagatgctctaacagtgcagatataacaggtccttcctttataagatcatggacatttgggatgtttagtgattctgagagcactggagggagcagcgaatctagatctctggattcagaatctataagtccaggagactttcatcgaaaacttccacgaacaccatccagtggaactatgtcctctgcagatgatctagatgaaagagagccaccttccccttcagaaactggacccaattcccttggaacatttaagaaaacattgatgtcaaaggcagctctcacacacaagtttcgcaaattgagatcccccacgaaatgtagggattgtgaaggcattgtagtgttccaaggtgttgaatgtgaagagtgtctccttgtttgtcatcgaaagtgtttggaaaatttagtcattatttgtggtcatcagaaacttccaggaaaaatacacttatttggagcagaattcacacaagttgcaaaaaaggaaccagatggtatcccttttatactcaaaatatgtgcctcagagattgaaaatagagctttgtgtctacagggaatttatcgtgtgtgtggaaacaaaataaaaactgaaaaattgtgtcaagctttggaaaatggaatgcacttggtagatatttcagaatttagttcacatgatatctgtgacgtcttgaaattataccttcggcagctcccagaaccatttattttatttcgattgtacaaggaatttatagaccttgcaaaagagatccaacatgtaaatgaagaacaagagacaaaaaagaatagtcttgaagacaaaaaatggccaaatatgtgtatagaaataaaccgaattcttctaaaaagcaaagaccttctaagacaattgccagcatcaaattttaacagtcttcatttccttatagtacatctaaagcgggtagtagatcatgcagaagaaaacaagatgaactccaaaaacttgggggtgatatttggaccaagtctcattaggccaaggcccacaactgctcctatcaccatctcctcccttgcagagtattcaaatcaagcacgcttggtagagtttctcattacttactcacagaagatcttcgatgggtccctacaaccacaagatgttatgtgtagcataggtgttgttgatcaaggctgttttccaaagcctctgttatcaccagaagaaagagacattgaacgttccatgaagtcactatttttttcttcaaaggaagatatccatacttcagagagtgaaagcaaaatttttgaacgagctacatcatttgaggaatcagaacgcaagcaaaatgcgttaggaaaatgtgatgcatgtctcagtgacaaagcacagttgcttctagaccaagaggctgaatcagcatcccaaaagatagaagatggtaaaacccctaagccactttctctgaaatctgataggtcaacaaacaatgtggagaggcatactccaaggaccaagattagacctgtaagtttgcctgtagatagactacttcttgcaagtcctcctaatgagagaaatggcagaaatatgggaaatgtaaatttagacaagttttgcaagaatcctgcctttgaaggagttaatagaaaagacgctgctactactgtttgttccaaatttaatggctttgaccagcaaactctacagaaaattcaggacaaacagtatgaacaaaacagcctaactgccaagactacaatgatcatgcccagtgcactccaggaaaaaggagtgacaacaagcctccagattagtggggaccattctatcaatgccactcaacccagtaagccatatgcagagccagtcaggtcagtgagagaggcatctgagagacggtcttcagattcctaccctctcgctcctgtcagagcacccagaacactgcagcctcaacattggacaacattttataaaccacatgctcccatcatcagtatcagggggaatgaggagaagccagcttcaccctcagcagcagtgcctcctggcacagatcacgatccccacggtctcgtggtgaagtcaatgccagacccagacaaagcatcagcttgtcctgggcaagcaactggtcaacctaaagaagactctgaggagcttggcttgcctgatgtgaatccaatgtgtcagagaccaaggctaaaacgaatgcaacagtttgaagacctcgaaggtgaaattccacaatttgtgtagggatgtcaaatttcagggtttttttgttgttgttgtgttattttgtggtattgtgcttgttttgtgaaagaatgttttgacagggcctcttttgtataggactgccaaatcatgggttttgccttttgttgttgtatttatcctctgttggtaatactgaatggtagaatgttttgatagggtcacatttgtgcctcactggaattatctttaaattctgtatttttaaagttgtgaataagataggtggattcgtattttttaaagttcagttgactttccccaccaaatggtccatttgaatgcatccctaatatatgatatagtctcaactaataggtgcaatttgggaaaatcaggtttattttttggagtggaactgttataagtgcttatttataaaaggaatgtttctgaatgcaagtgcctaaaaagatctttgttggtatgcatatgttttgtcacacaattttatagtgcatctttcaccatttgtgcttttttaagatacgtatgtaagctcttatttttcaattggcaattcagttaatttttaaatgtttacataatggccagaaggcttgcaaatctgtatttaattgcattttaattaattgccagtttttacatgtgatagtcagttgtacaaagaaaatgcacttaaacctgtttctaaattatatattcagttatattatatttggctttagatggttttaatacatttgatagtttttcaccccttggctttattttatataaacttttgtttttcagcagttctgaactttttagtattttataaatggtccaaaaaatgcctgtttcagaagtttttgaattcagtgcatttcctcttgatttgtctgggttaaaaccattccttttgtatgaaatgttttgacttaggaatcattttatgtacttgttctacctggattgtcaacaactgaaagtacatatttcatccaaatcaagctaaaatttatttaagttgattctgagagtacaggtcagtaagcctcattatttggaatttgagagaaggtataggtgatcggatctgtttcatttataaaaggtccagtttttaggactagtacattcctgttattttctgggttttatcattttgcctaaaataggatataaaagggacaaaaaataagtagactgtttttatgtgtgaattatatttctactaaatgtttttgtatgactgtgttatacttgataatatatatatatatatatatcaacttgttaaattatttcatgttcccgtggcttcttttcagttgttgcctattacagtatgagagtttaaggttattaaccattggcttagaagtcaacacctaggatcatacatccgttgactacaatgtggaatgaattttatggaaacctgttttatagttctatgtgatgtaaaggtctagggagcaataaccagcccttttttttctgaaggcttgtttttagtcctcattgtacaaaatataaaataatcatattgctatgaatacctaaaaagaaaattagagcccatgtgtattgagccttctctgtgtgccaggaactttgccaaggtgctacatagattattttatttcaagttcacagcaacctataatgggtgggtaagcatgttattatttctgtgttacagataaggaaactaaggcttagttaaatgacttgcttcagtgttccacaggtgtaacaggtggagtcaaatctcaaacatagggctgtcagattttgatggttagtgctcttaatgactgtgattactaaataatatctggtagtttttaacaatagaaaatgcaactttaaaaaatttttattgtggtaaaatacacataacatttaccatttttaagtatattgtttgaaccatttttaagcatatagttcagtggcattaagtatattcacattgttttgcaaccatgagcacctattcatctccagaacattatcatcatcctatactaaaacttagaaaatgtacttttaaacttcttcagttctcttttaatatatggagcccacccaaaggttatatcatgtaataaactcatttctctgttttccctcacagcttaaaaa

SEQ ID NO: 1434 - DNA, 8480 bp, Homo sapiens
  source 1..8480: mol_type = unassigned DNA
gtatattgatccttttatccctagaaatgtgtctctttttatactgataaattcccttgctttttattttactttatttaatactgatatgttattccagttttcttttggttattttgagtgtagcatatcttttatcattcttttaattttatcatatttaaagtgagtttcttatatagcattatagagagcatatacttctattgtgattttttttaaaaatctattttggcactatcttataagtggagtgtttagaccatttatatttaaggtaaatatatgttcagatttagttttatcattttatttcttttttgtttatgccttatgatattttccttaatctatttcccttttgctgccgtcttttggatgaattgatacttttctagacatatattttaatttgtctactgggttttttattatgtatcttcatataccttttttaaaaaattggttgcacacatctgtgttattaagaagctatagtagctcaggttatattcctaacttttaaatgttttctgaagaaaacattgtgaaggaaaaaacagtgtggatgctcataacacctcccctggcaccactgtcataaactgaatattgcttgcaatgtcttggattcactgtcaattgaatattgggttgcctggcccatgggtccaatcaccagaatggtttttttcccctttgttcttataaaatgagagaaaagtttaataaatgaaccaaaactgagattttgtttggtagaactctttcccttcccttctcgttctaatgactacagtgtctttttcaagagaatatagcagttacaaaccactcctggccagcttccagttaggaaattcaatttttatctttttatataacccgagaaaatctccctctaattatcatttagaaacttgcattgccttgataaccacaatggttgcatgtagacttctattattactttttacttttgtctacatttactctcagtgaagctaaatgtaaaactacatcgcttgaccaatgaaaaaatgtgtttgattgtttatgtcatatagagtcaaccagttaagcagcatatatcaaaacataatggtttttgagatcatttagcattgtaaattctcattagaacctcacaatcttggttgaatctttggtatttatctgtttaagacttggttgaactgagttgctatggactgcttatgaccccctgcaaaattagcatgttgagttcctaatccccagtgtgatgatgtgatgatatttggagggtggggcttttgggaggtgactaggtggagccctcatgacccttccccttctatcatgtgaggacacagagagaaaagaacagtctacgcatcaggaattggggcccacaccagaccctgaatctgatagtgccttggtcttgatctctcaatctctacaactgtgagaaataaatctttgttaagtcactctgtggtatttttgttgtagcagcctgatgtgactaagaacatacagatgtagtagtacatatatggattctgtcatatatgaaaatggatattgtgtcattaagatacaaaataagcattctggtaaaaaaaaaattatctctttcatggaacagaaatagaagttctgagattactagttacctgaaagtgtagtaatgaactgtgaaaaactgttgaagaagccgagcatttaatgtggcttccagagttttatgaaaatgctagatgcattaaaacatgtactaggacaattcagcctaaaatagattattctataaatagccaagtttaaaaaaaatggttgcacacttatctatatttatacatacacttaatttttttacagtctacttagaactagttttttaccacttcaagtggaacacagaagcatcaccaccgtagaagttcctttacctaatctgggttgtatttgatatatgtaaattacatccatatacgttgaaaacctcaccagactctcataatttttgcttttaaaagtcatacatattataaagaggttaagaggaaaaaagtagtctattatttactatttctattcattcttcttgcattctagtggttccatctttcctctggtaacactttgtctacagaacttcctttaccactattttatagcaggtctgctggtaatggattcacttggttgtgtttcatatgagaatgtctttatttcgtctttatttctgaaggacaccttcactggatatagaattctaaatacagaaatcagttctttcactgctttaaaaatattgttccactgccttatggcatccgtagtttctcatgagataccagtaatcatatgaattatcattccccaattgtggcatgtgtttttctttggctgtttttgtgggattttttttgtctttggattttatctgtttaagacgtatctagacctggtttttgctgtttttcctgttttggattggttgaacttcttgaatctacaagtttgactcttgaaaaatttgagaagttttcaactattgtttcttcaatttttttttttttttgtagtattctttttcctctttctctgacaggcagtgactcaaacactagagcttttgttaatcttctgcagttctggaggtcctctgttttttccccaaagctttttcctcttggttgtttatagtgttctgttgatctgtcttcaagttcacagtctcttttcctttggttatccccattctcccatacagttcatccagtaaattttttgttctggatattttatttttcagcaataaattttccttttgtttctttatatcttacatttctttgctgagacttcttctgtttttccatgtttcaagattgtttgctctacttttttgaaacctttgtaatagttgttgtagatttttcatctaatcgtcccaaatctgagctgtatcagggttggtgtctttttattgtcttttgtcttgcgagttgttgagattttcctggttctttgtatgacaagtaattttgaatgatatcctagatattttcatcattactttattgactctgggtcctgtttataacctatattgagcattaattttttttttcaattttagcagccatttgatacagttaggttcattttccagcttctgcgtgactcccttcctaatcttctggctgggggcttaggtctgcctattctgctcttctccagggccaagtgtggggaggataaagagaaaaaagtaacagaaatttcagaccctctcactctagactacagttcatctggtcataaacaaggatttccatcagagttttggcatctcctcagctgctactgccatcattgctgctcccataagattgtgtcttagggatttggacttgcttggggtctggggcaggagagaaaataaatatacaaaagaaaccagggagttttcttctactgttttagtttcatctcccatcacccctccccgcttttgttccttgggccagaaaggacctctcttggagctccttctgtctgcactcagtttgtactttgggaattggagaattgggtaggagctgagcatgggctggaaaagagggcaggagtagacctatcactggataggtcataccttgaattgtagtttatttccatttacttttcagagtcttgatttgtgcattctgttcagatttttaggtgaattcagtgggagacgggagaagttagcttactgcatctgaaccagaaaacttccttaaaatatttttgagtgtttaatattgtatctcatttattttccaaattttgattaattaatatattatttacttaaagaatcatgaaaggatttaaaagaattataaaatccaggatttgaaattaccttagaagtcatttaggccatttacttttgacaaattctcttcacctcaaacaatagctaataatagctaagattgactacgtacctgccagtgtattaagctcatggtctacattaattcatttaattctcacaaaaatcctatcaagtttttagctccattttactgatgagaaaactaaagtttagaaagccttctcaagatgcggtccttggaccagtcatattgccattactttgagagcctatgaggaatgcagaatcttgggtttcaacacagatccttagaaccataatctacatttggacaagatccccaaggtgattcatttgcacattaactttttcaatgcactggtttaaataaattataaataacttgatgaaggtcacctagcgtgcaagttacctttaggatcaagagagtaagcagtttacctttagctggagaatgctctaacatagccagttgctagaattaaactgtaccttatgcagtttgaattttctttgtttcttgaagaagttagggcacaaataagctatttattctgttatctgtacttttcaaatactatttatgcagagtcaagtatccttagggaatgcctgtctacattgaaaaggacttagaggctaattatcctatcatctggtatatcaagagagatgaagaggaaacatggcagtctttgaaataacattaagctaatcgaaatttagcacttattcagattgctacccttaaataccttccccacaaagaagccagagtgtcattttaaagaataaatcagatcatgttacagctttgtgtaaaatgctccaccagcttcctgttgctcttaaattcagacaccttgccatagttcagatgactacttctttttttagctttatcttaaaccagagctccagctctttccatatacttcaaccatattgacctttcatctctttcttgagcatgacaagctctttcgcattcacatttgcactacctcctcctttcatttggattgatctccatgaagcttttcttacatcggctcgcagttcaaatgttacctcctcagagaagccttccctaatttaccatgttggaaataccctttcacaaacacgtacctggtcatactgcataatttgacattcttatgtagtatttatagcatttttcagtaccagaaagtattttatttacgtaatttgttacttctctcgcgtaccaccctcaggagaacgtaaaggtccaggagggtcagtatctcatcggtttgctgtaatatacccaaagcctaggtttttgtgaacatcaaattagtgtattcatgtaagactctgagaatgggtctggcatattgtacacacttgtcagctgctgctattgttgttagtacaagtgatgatagtgataatatatttaggcatttgtgaaactcaatggaataatttattttgaataaattcaaggtaatatctaattattagaactgagtactgtagttaagcatttctatttttataggattgaaaaagtgaaaacagtctaaataatagttctttgattggaagtgttttccccatgtttttctcttaggcagttgtgatcagaccatcaggatatagagatgaggatcctcagaaacacatccatctcctaaaattatgaaccagctggggcatggagtttttgaagtcacttttgaacttttcagctaaaagccagttttgctggaaatgattgctcctagatattagattcaaactgcttttctccctaatctagacttatgcaaaatcaggcatcatagtatgttcagagtgatattcagtgttgtatgcttcactgtatggcatttttattggtgcagtcattgaaataaatgtatgtttatatagcattctgtatatcatgagttactctgccttttgtctctgggtccataggtaacagttaacctcttccacatgcagcatctgcaggctgcttcccttgcagacagtttacagtctctctgtgatagtgccaaactctatgacccaggccaagagtacagtgaatttgtcaaggccacaaattcaactgaagaagaaaaagttgatggaaatgtaaataaacatttaaatagttcccaaccttcaggatttggacctgccaactctttagaggatgttgtacgccttcctgacagttctaataaaattgaagaggacagatgctctaacagtgcagatataacaggtccttcctttataagatcatggacatttgggatgtttagtgattctgagagcactggagggagcagcgaatctagatctctggattcagaatctataagtccaggagactttcatcgaaaacttccacgaacaccatccagtggaactatgtcctctgcagatgatctagatgaaagagagccaccttccccttcagaaactggacccaattcccttggaacatttaagaaaacattgatgtcaaaggcagctctcacacacaagtttcgcaaattgagatcccccacgaaatgtagggattgtgaaggcattgtagtgttccaaggtgttgaatgtgaagagtgtctccttgtttgtcatcgaaagtgtttggaaaatttagtcattatttgtggtcatcagaaacttccaggaaaaatacacttatttggagcagaattcacacaagttgcaaaaaaggaaccagatggtatcccttttatactcaaaatatgtgcctcagagattgaaaatagagctttgtgtctacagggaatttatcgtgtgtgtggaaacaaaataaaaactgaaaaattgtgtcaagctttggaaaatggaatgcacttggtagatatttcagaatttagttcacatgatatctgtgacgtcttgaaattataccttcggcagctcccagaaccatttattttatttcgattgtacaaggaatttatagaccttgcaaaagagatccaacatgtaaatgaagaacaagagacaaaaaagaatagtcttgaagacaaaaaatggccaaatatgtgtatagaaataaaccgaattcttctaaaaagcaaagaccttctaagacaattgccagcatcaaattttaacagtcttcatttccttatagtacatctaaagcgggtagtagatcatgcagaagaaaacaagatgaactccaaaaacttgggggtgatatttggaccaagtctcattaggccaaggcccacaactgctcctatcaccatctcctcccttgcagagtattcaaatcaagcacgcttggtagagtttctcattacttactcacagaagatcttcgatgggtccctacaaccacaagatgttatgtgtagcataggtgttgttgatcaaggctgttttccaaagcctctgttatcaccagaagaaagagacattgaacgttccatgaagtcactatttttttcttcaaaggaagatatccatacttcagagagtgaaagcaaaatttttgaacgagctacatcatttgaggaatcagaacgcaagcaaaatgcgttaggaaaatgtgatgcatgtctcagtggtgagtagccatgtaaaaaaaaaatatgtttgctggcttaaaattttaccagtagaaccgtgattaaaaccaaggtgaggggcaatgagggaagccagagaatgaagctttattagttaacaaatcttggctagccattgagaaagttgccttttagtgtatcttgcatttaaatgaatgtcattcttcataaaagtctttcttataataagacatcttggagtttataatgttttttgtgttccttctgaattttgtttttgtttttgagttttgccatcagctaaaatcaaggtagaaatgtgttgagcaatgtgatattcgttagtatcttccagttccgtagttcagtgcattgagctaactgctcatacagagtcaactagactcctgaaattcaaaaactttagagtcctactttttttttgacatgctttttacctgtggcctacatttaacctattaaacacagagatgtgtatgtcttttttctttccttgactgcgatcattttattcacttattttctctttataatattagttgctgtcattgctagttgttaagctggtggaaaagcttccatttgtattgtcatttctacattgttatagctaaattccagttttttacattgcagccatatatgttaaatttaatgtgtaatcaagtatcagtgatcatagggtctaaaaaggaaaggagggccgggcatggtggctcacgcctgtaatcccagcactttgagaggccaaggcgggcagatcacctgaggtcaggagtttgagaccagcttggccaacatggtgaaaccccgcctactaaaagtacaaaaaattagccaggtgtggtggtgggcgcctgtaatcccagctactcgggaggctaaggcaggagaatcacttgaacccgagaagcagaggttgcagtgaggcgagaacgtgccattgcactccagccagggtgacaagagaaactccatctcaaagaaaaaaaaaa

SEQ ID NO: 1435 - DNA, 2043 bp, Homo sapiens
  source 1..2043: mol_type = unassigned DNA
gggcgggcggtgcggccgtggcggtagctgcaggggcggtggcggctgcagtggtggtggtgcctgtggctgtggctgcggctgcggctgcggctgagatttggccgggcgtccgcaggccgtgggggatgggggcagcgagctccagccctcggcggtggcggcggccgtaggtgtggggcgggcgtccgcgtccggcacgcgagatggagcgccgtggatttcagtttttctgactgttacatgaaaggatgattgctcacaaacagaaaaagacaaagaaaaaacgtgcttgggcatcaggtcaactctctactgatattacaacttctgaaatggggctcaagtccttaagttccaactctatttttgatccggattacatcaaggagttggtgaatgatatcaggaagttctcccacatgttactatatttgaaagaagccatattttcagactgttttaaagaagttattcatatacgtctagaggaactgctccgtgttttaaagtctataatgaataaacatcagaacctcaattctgttgatcttcaaaatgctgcagaaatgctcactgcaaaagtgaaagctgtgaacttcacagaagttaatgaagaaaacaaaaacgatctcttccaggaagtgttttcttctattgaaactttggcatttacctttggaaatatccttacaaacttccttatgggagatgtaggcaatgattcattattgcgactgcctgtttctcgagaaactaagtcgtttgaaaatgtttctgtggaatcagtggactcatccagtgaaaaaggaaatttttcccctttagaactagacaacgtgctgttaaagaacactgactctatcgagctggctttgtcatatgctaaaacttggtcaaaatatactaagaacatagtttcatgggttgaaaaaaagcttaacttggaattggagtccactagaaatatggtcaagttggcagaggcaactagaactaacattggaattcaggagttcatgccactgcagtctctgtttactaatgctcttcttaatgatatagaaagcagtcaccttttacaacaaacaattgcagctctccaggctaacaaatttgtgcagcctctacttggaaggaaaaatgaaatggaaaaacaaaggaaagaaataaaagagctttggaaacaggagcaaaataaaatgcttgaagcagagaatgctctcaaaaaggcaaaattattatgcatgcaacgtcaagatgaatatgagaaagcaaagtcttccatgtttcgtgcagaagaggagcatctgtcttcaagtggcggattagcaaaaaatctcaacaagcaactagaaaaaaagcgaaggttggaagaggaggctctccaaaaagtaacgatctttttcttttttatttgcaagttgaattagcggtaatctgccaggagtttggtgtcaaagttctgcgtctgccaagactgcctggaaaggcatgttaaaacatggctaagcccatcccccagagtttctcattcagtaggtcaacattttttaataggctctcaggtcgtgctgatgctgttggtgaagatccacattttgagaaccactatgctgagacctgaattttggagtttgtgaaagaatgtcttagagaaggcagtagtttattttacttgacaagaaagttcaccttttaggcaagtgtgtgtgtgtatgtgtactaattcaggcacctgatagcaaggataggcaaaagctttgtattattgatgaaatgtaattttacgaacaaattctgtaagattatatggaatatagtaaatataaatataaaatgctatttcaaatagaagcaaatattttatagacagtgtactaattataaattgtacatggctgtccattaaaatcaactgcctttgaatcactgaccagaacagattaacttcagaagtattattttgaaaacagaagatttcagaattttcagttatttcaacttagctttactatagtaaatatttgtttaaaatataaa

SEQ ID NO: 1436 - DNA, 10111 bp, Homo sapiens
  source 1..10111: mol_type = unassigned DNA; mol_type = unassigned DNA
atggagactgaaagtgagagtagcactttaggggatgacagtgtcttctggttggagtctgaagttataatccaggtgactgactgtgaagaggaagaaagggaagagaagttcaggaagatgaagtcctcagtacattctgaagaagatgattttgttccagagctacatagaaatgtacaccctcgagagcggcctgattgggaagaaactcttagcgcaatggcaagaggcgcagatgttccagagattcctggagatcttactcttaagacgtgtggcagtacagccagtatgaaggttaagcatgtgaaaaagttacccttcactaaaggtcactttccgaagatggctgaatgtgcgcatttccattatgagaatgttgagttcggcagcatacagctttcactttcagaagaacagaatgaagtaatgaaaaatggctgtgaatctaaagagctggtctacctcgtgcagattgcttgtcagggaaaaagttggattgttaaaagaagttatgaagattttcgggtacttgataaacatcttcatctgtgtatttatgaccgaagattttcccagctctcagaacttccccgttctgacaccctgaaggacagtccagagtcggtcactcagatgcttatggcttacctgtcacgcctttcagctatcgctggcaacaagatcaactgtgggcccgcccttacctggatggagattgataataagggaaatcaccttttggttcatgaggagtcatccatcaacactcctgctgtcggtgctgcccatgttatcaagaggtacactgctcgggcccctgacgaactgaccttagaggtgggagacattgtttctgttattgacatgcccccgaaagtgttaagcacatggtggagaggcaagcacggattccaggtgggactcttccctggacactgtgttgagttaattaaccaaaaagttccccagtcagtgaccaactcagtgccaaaaccagtgtctaaaaagcacggcaagctcattacgttcttacgaacattcatgaagtctcgtccaacaaaacagaagctgaagcagcggggaatcttgaaagagagggtgtttggttgtgacctgggggaacaccttctaaattctggttttgaagtgccgcaggttcttcaaagctgcacagcattcattgagagatatggcatcgtggatggaatctatcgcctttctggtgttgcctccaatatccagagactacgccatgaatttgactctgagcacgtccccgacctgacgaaagaaccgtatgttcaggacatccattctgtgggttccctatgtaagctgtacttccgggaactcccaaaccctctgcttacctaccagctgtatgagaaattttctgatgcagtttcagcagcaacagatgaagaaaggctgataaaaatccacgatgtcatccagcagctccccccaccacactacagaacactggagttcctgatgagacacttgtctcttctagctgactattgttccatcacaaatatgcatgcaaaaaatctagcaattgtttgggctccaaacctgttaagatcaaaacagatagaatctgcctgcttcagtggaacagcagctttcatggaagtgaggattcagtctgtggttgttgagttcatcctgaatcacgttgatgtgctgttcagcggcagaatcagcatggccatgcaagagggggcagcttctctatcaaggcccaagtccctcctggtatcctctccatccaccaaactgctgacattggaagaggcccaggcacgaacacaagctcaggtcaattctccaattgtgacggaaaataaatatatcgaagtaggagaaggacctgctgcacttcaggggaaatttcataccataattgagttcccacttgaaagaaagaggcctcaaaataagatgaaaaagtctcctgtgggtagctggcgttcctttttcaacttggggaaatcatcatctgtttctaaacgaaagctgcagcggaatgagagtgagccttcagagatgaaagccatggctctgaaaggtggcagggcagaaggaaccctccgttcagctaaaagtgaggagtctcttacatctctccatgcagttgatggtgattctaagctcttccgacccagaagacccagatcttccagtgatgcactgtctgcctcttttaatggagaaatgctggggaaccgctgtaactcctatgataatctgcctcatgacaatgagagtgaggaggaaggagggctgcttcatatcccagcccttatgtctcctcattcagctgaggatgttgacttgagcccaccagacattggagtagccagcctggattttgatccaatgtcatttcaatgtagtcctcctaaggccgaatcagaatgtctggagagtggtgcttcctttttagattcaccaggatactccaaggataaaccaagtgccaataaaaaggatgcagaaacaggtagtagccaatgtcagactccaggaagcacagcaagctctgaacctgtctctcctcttcaggagaaactgagtccattctttaccctggacttgagcccaactgaagataaatcatctaagccatcctcctttactgaaaaggtcgtctatgctttctctccgaagataggacggaaattaagcaaatcaccttctatgagcatatctgagccaatttcagtgaccctaccaccacgggtgtcagaagtcattggtacagtctcaaataccacagctcagaatgcatcatcttcaacctgggacaaatgcgttgaagaaagggatgccacaaatagatcccccacccagatagtaaagatgaaaacaaatgagacagttgcccaagaagcatatgaatctgaagtccagcccctggaccaggtggctgctgaagaagtagaattgccagggaaagaggatcagtctgtctcaagcagtcagagtaaggctgtagcttctggacagactcagacaggagcagttacccatgacccccctcaggattccgttcctgtcagttcagtctctcttatcccaccaccaccgcctccgaaaaatgttgcccgaatgttggcgctagcattagctgagtccgcacagcaagcctcaactcagtcattgaagagaccagggacctctcaggctgggtatacaaattatggagacatagcggtggctacaactgaagataatctgtccagttcttactctgcagttgctctagataaggcctatttccaaaccgatcgaccagcagagcagttccacctccagaataatgcaccaggaaactgtgaccatcctctaccagagacaacagctactggggatcctacccattccaacacaactgaatctggggagcaacatcaccaagtagacttaacagggaatcagccacatcaagcatatttatctggggacccagaaaaggccagaattacttcagttcccttagactcagagaagtctgatgatcatgtaagtttccctgaagaccagtctgggaagaacagtatgccaactgtctccttcttggatcaggaccagtctccaccccgtttctacagtggagatcagcctccttcttatcttggtgcaagtgtggataaactccatcaccctttagaatttgcagacaaatctcccacacctcctaatttacctagcgataaaatctaccctccttctgggtcccccgaagagaataccagcacagccaccatgacttacatgacaactactccagcaacagcccaaatgagcaccaaggaagccagctgggatgtggctgaacaacccaccactgctgattttgctgctgccacacttcagcgcacgcacagaactaatcgtccccttccccctccgccttcccagagatctgcagagcagccaccagttgtggggcaggtacaagcagcaaccaatataggattaaataattcccacaaggttcaaggagtagttccagttccagagaggccacctgaacctcgagccatggatgaccctgcgtctgccttcatcagtgacagtggtgctgctgctgctcagtgtcccatggctacagctgtccagccaggcctgcctgagaaagtgcgggacggtgcccgggtcccgctgctgcacctgcgcgccgagtctgtccctgcgcatccctgtggctttcctgcaccactgccccccaccaggatgatggagagtaagatgattgctgccatacactccagcagtgcagatgccaccagcagttcaaattatcattcctttgtcactgcttcatccacctctgtggacgatgcattgcctttaccacttcctgtcccacaacctaagcatgcttctcagaaaacagtttactcctcctttgctaggcccgatgtcaccactgaaccctttggtccagataactgtttgcatttcaatatgactccaaactgccagtaccgtccccagagtgtacctccccatcacaataaattggagcagcaccaagtgtatggtgccaggtcagagccaccagcctccatgggtcttcgttataacacatatgtggccccaggaagaaacgcatctggacaccactccaagccatgcagccgggtcgagtatgtgtcttctttgagctcctctgtcaggaatacctgttaccccgaagacattccaccgtaccctaccatccggagagtgcagtctctccatgctccgccgtcttccatgattcgctctgttcccatttcacggacagaagttcccccagatgatgagccagcctactgcccaagacctctgtaccaatataagccatatcagtcctcccaggcccgctcagattatcatgtcactcagcttcagccttactttgagaatggccgggtccactacaggtatagcccatattccagttcttctagttcctattacagtccagatggggccctgtgtgatgtggatgcctatggcacagtccagttgagaccccttcaccgccttcccaatcgagactttgctttctacaatcctaggctgcaaggaaagagcttgtacagttatgctggtttggctccacgtccccgggccaacgtgactggctatttctctcccaacgaccataatgtagtcagcatgcctccggctgctgatgtgaagcacacctacacctcatgggatcttgaggacatggaaaaataccgcatgcagtccatccggagagagagccgtgctcggcagaaggtgaaagggcctgtcatgtcccaatatgataacatgaccccggcggtgcaggacgacttgggtgggatctatgtcatccatctgcgtagtaaatcagatcctgggaaaactggacttctctcagtggcagaaggaaaggagagccgccatgcagccaaggccatcagtcccgagggagaggaccgcttctataggaggcatcccgaggcagagatggacagagcccaccatcacggaggccatggtagcacgcagccggagaagccatccctgcctcagaagcagagcagcctgaggagcaggaagcttcctgacatgggctgcagtcttcctgagcacagggcacaccaagaagcaagccataggcagttctgtgagtcaaagaatgggcccccttatccccagggagctggccagttagattatgggtccaaagggattccagacacttctgagccagtcagctaccacaactctggagtaaaatatgctgcatccgggcaagaatctttaagactgaaccacaaagaggtaaggctctccaaagagatggagcgaccctgggttaggcagccttctgccccagagaaacactccagagactgctacaaggaggaagaacacctcactcagtcaatcgtcccaccccctaaaccagagaggagtcatagcctcaaactccatcatacccagaacgtggagagggaccccagtgtgctgtaccagtaccaaccacacggcaagcgccagagcagtgtgactgttgtgtcccagtatgataacctggaagattaccactccctgcctcagcaccagcgaggagtctttggagggggcggcatggggacgtatgtgccccctggctttccccatccacagagcaggacctatgctacagcgttgggtcaaggggccttcctgcccgcagagttgtccttgcagcatcctgaaacacagatccatgcagaatgagccctgcgagcaatagagttgaagcagcctctgctggacagtggactgttctatttttttcaataaccaaaaagattaaacaaaaaatactataaaacccctgaccacatttaaaaaatgataataaaagtaaacaaatcagcatctttttccccttccctgcttcattaccccctcttccatctatagactttgtcatttttgtctttagaaaagatctgaaggatggtaaagccccgtgctgaaacccagtagagaaacctgtctcaggacacacttgccatctagggctagcttgaaagagcctgaggactgcctttaactgaatttgaattcagcattgtcctttcttcttagtatttgctgcataattgagagcagttcacatcgatttcctggtaggcgtctgcattccctgttgtgttcctgcttctccttcagtagctgcacaacttgcgcagatcgacacactgttgtcacttcattctccccgtctgagaaggatcttgtgttcagttagagtcgtggaaaaatccctgatccttcaaggtcagtcagacagttggcaacattataattaaaaataagaaattaagactttaaattaaacatttggtagagtcatcataaaacaccagaccacttagactcaggctgaaccatactctttctattcttatttttcatccttgttcctcacggttcagtgaacaggctcatatcatgacagaatggacttttaaaagttagtacttaaggaaacttctttaggtggaagaaagtaaagttcttattgtcagtgaactttattagcaccagaaatctctattgatgcttttaatgcattgcctgccttcaggttttcttcttaccccacccctcaataagatttggtgaattgtaattctagtaaaacatgtcataccattggttttcctaaattatcaactttctttcattaaaaaaaaaaaaaaaaaaaaaagcccagcatggtttgactggatagacacgcataatttattatgaatataaatttccatgtttgtttctgttcctaaaccagagtacgaggtccctgggaatttaagtagctacgcattatctattattagactgcaagttcctgcaataactgcttagttcacagccccgtttcaccagtggagttctgggcagttattgctgtcctaaggcattactgtcgtttgcttactctatacttgtgtggtcacagtcttcttgtaattaccatctacaccagcatttcaggtatagctctttataactctggagacatgtaaaacatgtttaacacccacgagttttgaaagttgcattccttattagagtaggaactctctagcccaactccattctatgttctcagctccctccaccccccaaaatacatcagactagcaaggcagtcctatgtttacaaaacgagtttagattgtcatttcattccataactcttaataatactcaagttttatacattcacgtattttaaatgctcggtctgtagaagacactaggagaattgcattccaattactggatggttgctgctctggctttttagaacttgaaattaatttttatttagagcaaaggaggaaatcttttaagaggctaaaatcatgctgctattattgctgtgaaattgtataaagattaggattcatgccagtttttattttaaaaaataatgtgcattttaagggtttatatttagaaaaaaataaaatgtttcaagaacaacacattgatatgtggaaatattctataaggttttcttttgttcccttagaattcattggagggatgcagtaaaaactgtagtagaaaccttgaaacacccatatgtgaaaaggtctgtggaaattgaggcctctacattaaaagtgcagaaccaactgttttacagtcaaagtgctaggaaacctgataggatacttccctttggcacaaaaacaccctgggtgctacatacaggagtatgacctttggtgaatatgtggcactaattttttttaccttaatcatattcttgtcaagtaggcaacccattgccccttggagaccacaccagccctgtaagttctcaccagcagcatggagattaggaagaggggctgctgtgaccaggagatacacacggctttaagtaactgagagcctaaagaaagtaacccagggagtccggtccagttttaatatttgtggatttgttgtcacacacattgtttagtcctgaaactaaaacctattttataaatagtagggttaattcctcgaaacaatttctttattaataaatgtcctgtgggtttagaaatatcaggtaaatatttgaatacagaatgatgattgcaattactgttacaagcgtgaaacacaaacttcagatcaaatctagagttgcttcatttaatgcatgctagcaacagccttaactttggattcagttatttgaaacacttttccggcatctttccctttctaatgttgtggggtggaaaccggatggcaaatcactgtgagccggatacctcagcacagtccaccttgtgtgtgacttcacaaatgggggacttcacaaatggggtaactgaatgttattactttcaaattttgacatggagcattatgatcaaggaaatggagctgccttatacattaaacccgtgatttaatcctattgacattttcatagccatgcctccagattttatctttttggcaaaattctgattccacagtttggtctgattgaaataaatattccctggacgtctggctaaaaattttgctaacaatcccagaggtgccattttcttattaataaatttcattggagccttatttcttactatattcaatttcgtttcaaacctgcaagtccctgggatggtcccacgactagggcctgcacatttcttacaatggcaaagcattttttaaaatttagggtcaggttgaaaaattctaggactaattctgtagagaggagggactgttaactaacgtgagtggggacggaggagtaggttaccacatttggagcagtaatagatgcaaacgatgtaaatttgaaatttgcccctttagttaaagaaggagcctgcaaagtccatttctctgttttcagccctgtcagtcacccatttaggatgttggcaaagtactgcttgagcagaatgtgtaagaaagtaataatgaaagcaaaagtatgtcagacagttacttcttccacatggttagaggcatgtgattttcagcactgtgtgttacagaaatgtcaggaatggtgtattataacgtgtgcaagataatgtcagtgtgcacagagggtcttttttccttatctgattagtactgttaatgttcaaagaataaaaatggttttacagtttagattctgagatagcaaaacctgatttttcaaccatgacctgcatgagagaagcatcctaggaagtcttagatcatacttttgagtttttaattttaatttatatagtgtttttttatgtcttaatatttttgtgaactggtgtaaattgttaatgcatataagcttgtgtatttttgtaaatagttttgtgatttatttcttgccccatatgtaaatatttagagtctcatttcttgcaaacttatttgaagctgagttgtgggtttgggttttgtttgtttctttggttgcagggtggggtggggggtggcaggggagggaggaagggatttttgtacctggagatggagatatcttgtggtttaaagcaaatgtcccactgaaagtgattcaaatatcaacagaattatttcaggttaaaacaga

SEQ ID NO: 1437 - DNA, 6868 bp, Homo sapiens
  source 1..6868: mol_type = unassigned DNA; mol_type = unassigned DNA
agaagctgaagcagcggggaatcttgaaagagagggtgtttggttgtgacctgggggaacaccttctaaattctggttttgaagtgccgcaggttcttcaaagctgcacagcattcattgagagatatggcatcgtggatggaatctatcgcctttctggtgttgcctccaatatccagagactacgccatgaatttgactctgagcacgtccccgacctgacgaaagaaccgtatgttcaggacatccattctgtgggttccctatgtaagctgtacttccgggaactcccaaaccctctgcttacctaccagctgtatgagaaattttctgatgcagtttcagcagcaacagatgaagaaaggctgataaaaatccacgatgtcatccagcagctccccccaccacactacagaacactggagttcctgatgagacacttgtctcttctagctgactattgttccatcacaaatatgcatgcaaaaaatctagcaattgtttgggctccaaacctgttaagatcaaaacagatagaatctgcctgcttcagtggaacagcagctttcatggaagtgaggattcagtctgtggttgttgagttcatcctgaatcacgttgatgtgctgttcagcggcagaatcagcatggccatgcaagagggggcagcttctctatcaaggcccaagtccctcctggtatcctctccatccaccaaactgctgacattggaagaggcccaggcacgaacacaagctcaggtcaattctccaattgtgacggaaaataaatatatcgaagtaggagaaggacctgctgcacttcaggggaaatttcataccataattgagttcccacttgaaagaaagaggcctcaaaataagatgaaaaagtctcctgtgggtagctggcgttcctttttcaacttggggaaatcatcatctgtttctaaacgaaagctgcagcggaatgagagtgagccttcagagatgaaagccatggctctgaaaggtggcagggcagaaggaaccctccgttcagctaaaagtgaggagtctcttacatctctccatgcagttgatggtgattctaagctcttccgacccagaagacccagatcttccagtgatgcactgtctgcctcttttaatggagaaatgctggggaaccgctgtaactcctatgataatctgcctcatgacaatgagagtgaggaggaaggagggctgcttcatatcccagcccttatgtctcctcattcagctgaggatgttgacttgagcccaccagacattggagtagccagcctggattttgatccaatgtcatttcaatgtagtcctcctaaggccgaatcagaatgtctggagagtggtgcttcctttttagattcaccaggatactccaaggataaaccaagtgccaataaaaaggatgcagaaacaggtagtagccaatgtcagactccaggaagcacagcaagctctgaacctgtctctcctcttcaggagaaactgagtccattctttaccctggacttgagcccaactgaagataaatcatctaagccatcctcctttactgaaaaggtcgtctatgctttctctccgaagataggacggaaattaagcaaatcaccttctatgagcatatctgagccaatttcagtgaccctaccaccacgggtgtcagaagtcattggtacagtctcaaataccacagctcagaatgcatcatcttcaacctgggacaaatgcgttgaagaaagggatgccacaaatagatcccccacccagatagtaaagatgaaaacaaatgagacagttgcccaagaagcatatgaatctgaagtccagcccctggaccaggtggctgctgaagaagtagaattgccagggaaagaggatcagtctgtctcaagcagtcagagtaaggctgtagcttctggacagactcagacaggtaccgtttgttttcctccattctttctttaagttaagagggatcttcaatcctgtgtgccatctgtgccttttaagagagaaatttgtccacagctagcctttaatcaaagagaatgcttttctgggtggtgctgatggctcagagccctaaattaaaagcagtccaacaaaactccccaaaagggccaatggtcctgcttcaaatcttcacaaaagtccccttatctctttggacggtgagaattcgtggataatttttgcacaactgcgtagctcttgattctgtttttctcttctaataaaatatctttattgtagccttccaagttaacaagccagctacaccatcaaatgtaaaaactgttcataataacagtctacaagcacttgaagcttgttttctaagcaatcttttctgagccaggtgagggacatgctttttttcccccccatctctgtaacaattcaagaagagattgcagtctttatacactgtttgttttagttttccttctgaaccagatgtgttttcaacagcatttgcatgtgggatagaagatcatggattgccattttgaaatatggaaggcacctattttttaatgatcacatggggagtgtttggctttccatttaggataacgtaagctaccttttcactctcattttttttcccaatttcccactaggagcagttacccatgacccccctcaggattccgttcctgtcagttcagtctctcttatcccaccaccaccgcctccgaaaaatgttgcccgaatgttggcgctagcattagctgagtccgcacagcaagcctcaactcagtcattgaagagaccagggacctctcaggctgggtatacaaattatggagacatagcggtggctacaactgaagataatctgtccagttcttactctgcagttgctctagataaggcctatttccaaaccgatcgaccagcagagcagttccacctccagaataatgcaccaggaaactgtgaccatcctctaccagagacaacagctactggggatcctacccattccaacacaactgaatctggggagcaacatcaccaagtagacttaacagggaatcagccacatcaagcatatttatctggggacccagaaaaggccagaattacttcagttcccttagactcagagaagtctgatgatcatgtaagtttccctgaagaccagtctgggaagaacagtatgccaactgtctccttcttggatcaggaccagtctccaccccgtttctacagtggagatcagcctccttcttatcttggtgcaagtgtggataaactccatcaccctttagaatttgcagacaaatctcccacacctcctaatttacctagcgataaaatctaccctccttctgggtcccccgaagagaataccagcacagccaccatgacttacatgacaactactccagcaacagcccaaatgagcaccaaggaagccagctgggatgtggctgaacaacccaccactgctgattttgctgctgccacacttcagcgcacgcacagaactaatcgtccccttccccctccgccttcccagagatctgcagagcagccaccagttgtggggcaggtacaagcagcaaccaatataggattaaataattcccacaaggttcaaggagtagttccagttccagagaggccacctgaacctcgagccatggatgaccctgcgtctgccttcatcagtgacagtggtgctgctgctgctcagtgtcccatggctacagctgtccagccaggcctgcctgagaaagtgcgggacggtgcccgggtcccgctgctgcacctgcgcgccgagtctgtccctgcgcatccctgtggctttcctgcaccactgccccccaccaggatgatggagagtaagatgattgctgccatacactccagcagtgcagatgccaccagcagttcaaattatcattcctttgtcactgcttcatccacctctgtggacgatgcattgcctttaccacttcctgtcccacaacctaagcatgcttctcagaaaacagtttactcctcctttgctaggcccgatgtcaccactgaaccctttggtccagataactgtttgcatttcaatatgactccaaactgccagtaccgtccccagagtgtacctccccatcacaataaattggagcagcaccaagtgtatggtgccaggtcagagccaccagcctccatgggtcttcgttataacacatatgtggccccaggaagaaacgcatctggacaccactccaagccatgcagccgggtcgagtatgtgtcttctttgagctcctctgtcaggaatacctgttaccccgaagacattccaccgtaccctaccatccggagagtgcagtctctccatgctccgccgtcttccatgattcgctctgttcccatttcacggacagaagttcccccagatgatgagccagcctactgcccaagacctctgtaccaatataagccatatcagtcctcccaggcccgctcagattatcatgtcactcagcttcagccttactttgagaatggccgggtccactacaggtatagcccatattccagttcttctagttcctattacagtccagatggggccctgtgtgatgtggatgcctatggcacagtccagttgagaccccttcaccgccttcccaatcgagactttgctttctacaatcctaggctgcaaggaaagagcttgtacagttatgctggtttggctccacgtccccgggccaacgtgactggctatttctctcccaacgaccataatgtagtcagcatgcctccggctgctgatgtgaagcacacctacacctcatgggatcttgaggacatggaaaaataccgcatgcagtccatccggagagagagccgtgctcggcagaaggtgaaagggcctgtcatgtcccaatatgataacatgaccccggcggtgcaggacgacttgggtgggatctatgtcatccatctgcgtagtaaatcagatcctgggaaaactggacttctctcagtggcagaaggaaaggagagccgccatgcagccaaggccatcagtcccgagggagaggaccgcttctataggaggcatcccgaggcagagatggacagagcccaccatcacggaggccatggtagcacgcagccggagaagccatccctgcctcagaagcagagcagcctgaggagcaggaagcttcctgacatgggctgcagtcttcctgagcacagggcacaccaagaagcaagccataggcagttctgtgagtcaaagaatgggcccccttatccccagggagctggccagttagattatgggtccaaagggattccagacacttctgagccagtcagctaccacaactctggagtaaaatatgctgcatccgggcaagaatctttaagactgaaccacaaagaggtaaggctctccaaagagatggagcgaccctgggttaggcagccttctgccccagagaaacactccagagactgctacaaggaggaagaacacctcactcagtcaatcgtcccaccccctaaaccagagaggagtcatagcctcaaactccatcatacccagaacgtggagagggaccccagtgtgctgtaccagtaccaaccacacggcaagcgccagagcagtgtgactgttgtgtcccagtatgataacctggaagattaccactccctgcctcagcaccagcgaggagtctttggagggggcggcatggggacgtatgtgccccctggctttccccatccacagagcaggacctatgctacagcgttgggtcaaggggccttcctgcccgcagagttgtccttgcagcatcctgaaacacagatccatgcagaatgagccctgcgagcaatagagttgaagcagcctctgctggacagtggactgttctatttttttcaataaccaaaaagattaaacaaaaaatactataaaacccctgaccacatttaaaaaatgataataaaagtaaacaaatcagcatctttttccccttccctgcttcattaccccctcttccatctatagactttgtcatttttgtctttagaaaagatctgaaggatggtaaagccccgtgctgaaacccagtagagaaacctgtctcaggacacacttgccatctagggctagcttgaaagagcctgaggactgcctttaactgaatttgaattcagcattgtcctttcttcttagtatttgctgcataattgagagcagttcacatcgatttcctggtaggcgtctgcattccctgttgtgttcctgcttctccttcagtagctgcacaacttgcgcagatcgacacactgttgtcacttcattctccccgtctgagaaggatcttgtgttcagttagagtcgtggaaaaatccctgatccttcaaggtcagtcagacagttggcaacattataattaaaaataagaaattaagactttaaattaaacatttggtagagtcatcataaaacaccagaccacttagactcaggctgaaccatactctttctattcttatttttcatccttgttcctcacggttcagtgaacaggctcatatcatgacagaatggacttttaaaagttagtacttaaggaaacttctttaggtggaagaaagtaaagttcttattgtcagtgaactttattagcaccagaaatctctattgatgcttttaatgcattgcctgccttcaggttttcttcttaccccacccctcaataagatttggtgaattgtaattctagtaaaacatgtcataccattggttttcctaaattatcaactttctttcattaaaaaaaaaaaaaaaaaaaaaa

SEQ ID NO: 1438 - DNA, 6556 bp, Homo sapiens
  source 1..6556: mol_type = unassigned DNA; mol_type = unassigned DNA
aaagcagtatgtgctgagagaggaggattaagctcctggaggcagagctctcccacacacttgctggcttgctgggctccactgactggactgaaaacagggccaagaaaactgctgctgcagggggtcctgaaaacagctggaacccggcagtgatgtgggacctaacttgaagttaacctgtggtggtgaggttggaaccagttggattatgatttattttctacactcttgtacggaatgcagagctgttgtatcctgatgaatctactgctaaatatagtcatttggaataattttaagtattgatcttaaaacttgtaccacaacaagagtgtctaaaaagcacggcaagctcattacgttcttacgaacattcatgaagtctcgtccaacaaaacagaagctgaagcagcggggaatcttgaaagagagggtgtttggttgtgacctgggggaacaccttctaaattctggttttgaagtgccgcaggttcttcaaagctgcacagcattcattgagagatatggcatcgtggatggaatctatcgcctttctggtgttgcctccaatatccagagactacgccatgaatttgactctgagcacgtccccgacctgacgaaagaaccgtatgttcaggacatccattctgtgggttccctatgtaagctgtacttccgggaactcccaaaccctctgcttacctaccagctgtatgagaaattttctgatgcagtttcagcagcaacagatgaagaaaggctgataaaaatccacgatgtcatccagcagctccccccaccacactacagaacactggagttcctgatgagacacttgtctcttctagctgactattgttccatcacaaatatgcatgcaaaaaatctagcaattgtttgggctccaaacctgttaagatcaaaacagatagaatctgcctgcttcagtggaacagcagctttcatggaagtgaggattcagtctgtggttgttgagttcatcctgaatcacgttgatgtgctgttcagcggcagaatcagcatggccatgcaagagggggcagcttctctatcaaggcccaagtccctcctggtatcctctccatccaccaaactgctgacattggaagaggcccaggcacgaacacaagctcaggtcaattctccaattgtgacggaaaataaatatatcgaagtaggagaaggacctgctgcacttcaggggaaatttcataccataattgagttcccacttgaaagaaagaggcctcaaaataagatgaaaaagtctcctgtgggtagctggcgttcctttttcaacttggggaaatcatcatctgtttctaaacgaaagctgcagcggaatgagagtgagccttcagagatgaaagccatggctctgaaaggtggcagggcagaaggaaccctccgttcagctaaaagtgaggagtctcttacatctctccatgcagttgatggtgattctaagctcttccgacccagaagacccagatcttccagtgatgcactgtctgcctcttttaatggagaaatgctggggaaccgctgtaactcctatgataatctgcctcatgacaatgagagtgaggaggaaggagggctgcttcatatcccagcccttatgtctcctcattcagctgaggatgttgacttgagcccaccagacattggagtagccagcctggattttgatccaatgtcatttcaatgtagtcctcctaaggccgaatcagaatgtctggagagtggtgcttcctttttagattcaccaggatactccaaggataaaccaagtgccaataaaaaggatgcagaaacaggtagtagccaatgtcagactccaggaagcacagcaagctctgaacctgtctctcctcttcaggagaaactgagtccattctttaccctggacttgagcccaactgaagataaatcatctaagccatcctcctttactgaaaaggtcgtctatgctttctctccgaagataggacggaaattaagcaaatcaccttctatgagcatatctgagccaatttcagtgaccctaccaccacgggtgtcagaagtcattggtacagtctcaaataccacagctcagaatgcatcatcttcaacctgggacaaatgcgttgaagaaagggatgccacaaatagatcccccacccagatagtaaagatgaaaacaaatgagacagttgcccaagaagcatatgaatctgaagtccagcccctggaccaggtggctgctgaagaagtagaattgccagggaaagaggatcagtctgtctcaagcagtcagagtaaggctgtagcttctggacagactcagacaggagcagttacccatgacccccctcaggattccgttcctgtcagttcagtctctcttatcccaccaccaccgcctccgaaaaatgttgcccgaatgttggcgctagcattagctgagtccgcacagcaagcctcaactcagtcattgaagagaccagggacctctcaggctgggtatacaaattatggagacatagcggtggctacaactgaagataatctgtccagttcttactctgcagttgctctagataaggcctatttccaaaccgatcgaccagcagagcagttccacctccagaataatgcaccaggaaactgtgaccatcctctaccagagacaacagctactggggatcctacccattccaacacaactgaatctggggagcaacatcaccaagtagacttaacagggaatcagccacatcaagcatatttatctggggacccagaaaaggccagaattacttcagttcccttagactcagagaagtctgatgatcatgtaagtttccctgaagaccagtctgggaagaacagtatgccaactgtctccttcttggatcaggaccagtctccaccccgtttctacagtggagatcagcctccttcttatcttggtgcaagtgtggataaactccatcaccctttagaatttgcagacaaatctcccacacctcctaatttacctagcgataaaatctaccctccttctgggtcccccgaagagaataccagcacagccaccatgacttacatgacaactactccagcaacagcccaaatgagcaccaaggaagccagctgggatgtggctgaacaacccaccactgctgattttgctgctgccacacttcagcgcacgcacagaactaatcgtccccttccccctccgccttcccagagatctgcagagcagccaccagttgtggggcaggtacaagcagcaaccaatataggattaaataattcccacaaggttcaaggagtagttccagttccagagaggccacctgaacctcgagccatggatgaccctgcgtctgccttcatcagtgacagtggtgctgctgctgctcagtgtcccatggctacagctgtccagccaggcctgcctgagaaagtgcgggacggtgcccgggtcccgctgctgcacctgcgcgccgagtctgtccctgcgcatccctgtggctttcctgcaccactgccccccaccaggatgatggagagtaagatgattgctgccatacactccagcagtgcagatgccaccagcagttcaaattatcattcctttgtcactgcttcatccacctctgtggacgatgcattgcctttaccacttcctgtcccacaacctaagcatgcttctcagaaaacagtttactcctcctttgctaggcccgatgtcaccactgaaccctttggtccagataactgtttgcatttcaatatgactccaaactgccagtaccgtccccagagtgtacctccccatcacaataaattggagcagcaccaagtgtatggtgccaggtcagagccaccagcctccatgggtcttcgttataacacatatgtggccccaggaagaaacgcatctggacaccactccaagccatgcagccgggtcgagtatgtgtcttctttgagctcctctgtcaggaatacctgttaccccgaagacattccaccgtaccctaccatccggagagtgcagtctctccatgctccgccgtcttccatgattcgctctgttcccatttcacggacagaagttcccccagatgatgagccagcctactgcccaagacctctgtaccaatataagccatatcagtcctcccaggcccgctcagattatcatgtcactcagcttcagccttactttgagaatggccgggtccactacaggtatagcccatattccagttcttctagttcctattacagtccagatggggccctgtgtgatgtggatgcctatggcacagtccagttgagaccccttcaccgccttcccaatcgagactttgctttctacaatcctaggctgcaaggaaagagcttgtacagttatgctggtttggctccacgtccccgggccaacgtgactggctatttctctcccaacgaccataatgtagtcagcatgcctccggctgctgatgtgaagcacacctacacctcatgggatcttgaggacatggaaaaataccgcatgcagtccatccggagagagagccgtgctcggcagaaggtgaaagggcctgtcatgtcccaatatgataacatgaccccggcggtgcaggacgacttgggtgggatctatgtcatccatctgcgtagtaaatcagatcctgggaaaactggacttctctcagtggcagaaggaaaggagagccgccatgcagccaaggccatcagtcccgagggagaggaccgcttctataggaggcatcccgaggcagagatggacagagcccaccatcacggaggccatggtagcacgcagccggagaagccatccctgcctcagaagcagagcagcctgaggagcaggaagcttcctgacatgggctgcagtcttcctgagcacagggcacaccaagaagcaagccataggcagttctgtgagtcaaagaatgggcccccttatccccagggagctggccagttagattatgggtccaaagggattccagacacttctgagccagtcagctaccacaactctggagtaaaatatgctgcatccgggcaagaatctttaagactgaaccacaaagaggtaaggctctccaaagagatggagcgaccctgggttaggcagccttctgccccagagaaacactccagagactgctacaaggaggaagaacacctcactcagtcaatcgtcccaccccctaaaccagagaggagtcatagcctcaaactccatcatacccagaacgtggagagggaccccagtgtgctgtaccagtaccaaccacacggcaagcgccagagcagtgtgactgttgtgtcccagtatgataacctggaagattaccactccctgcctcagcaccagcgaggagtctttggagggggcggcatggggacgtatgtgccccctggctttccccatccacagagcaggacctatgctacagcgttgggtcaaggggccttcctgcccgcagagttgtccttgcagcatcctgaaacacagatccatgcagaatgagccctgcgagcaatagagttgaagcagcctctgctggacagtggactgttctatttttttcaataaccaaaaagattaaacaaaaaatactataaaacccctgaccacatttaaaaaatgataataaaagtaaacaaatcagcatctttttccccttccctgcttcattaccccctcttccatctatagactttgtcatttttgtctttagaaaagatctgaaggatggtaaagccccgtgctgaaacccagtagagaaacctgtctcaggacacacttgccatctagggctagcttgaaagagcctgaggactgcctttaactgaatttgaattcagcattgtcctttcttcttagtatttgctgcataattgagagcagttcacatcgatttcctggtaggcgtctgcattccctgttgtgttcctgcttctccttcagtagctgcacaacttgcgcagatcgacacactgttgtcacttcattctccccgtctgagaaggatcttgtgttcagttagagtcgtggaaaaatccctgatccttcaaggtcagtcagacagttggcaacattataattaaaaataagaaattaagactttaaattaaacatttggtagagtcatcataaaacaccagaccacttagactcaggctgaaccatactctttctattcttatttttcatccttgttcctcacggttcagtgaacaggctcatatcatgacagaatggacttttaaaagttagtacttaaggaaacttctttaggtggaagaaagtaaagttcttattgtcagtgaactttattagcaccagaaatctctattgatgcttttaatgcattgcctgccttcaggttttcttcttaccccacccctcaataagatttggtgaattgtaattctagtaaaacatgtcataccattggttttcctaaattatcaactttctttcatt

SEQ ID NO: 1439 - DNA, 8194 bp, Homo sapiens
  source 1..8194: mol_type = unassigned DNA; mol_type = unassigned DNA
gattgggaagaaactcttagcgcaatggcaagaggcgcagatgttccagagattcctggagatcttactcttaagacgtgtggcagtacagccagtatgaaggttaagcatgtgaaaaagttacccttcactaaaggtcactttccgaagatggctgaatgtgcgcatttccattatgagaatgttgagttcggcagcatacagctttcactttcagaagaacagaatgaagtaatgaaaaatggctgtgaatctaaagagctggtctacctcgtgcagattgcttgtcagggaaaaagttggattgttaaaagaagttatgaagattttcgggtacttgataaacatcttcatctgtgtatttatgaccgaagattttcccagctctcagaacttccccgttctgacaccctgaaggacagtccagagtcggtcactcagatgcttatggcttacctgtcacgcctttcagctatcgctggcaacaagatcaactgtgggcccgcccttacctggatggagattgataataagggaaatcaccttttggttcatgaggagtcatccatcaacactcctgctgtcggtgctgcccatgttatcaagaggtacactgctcgggcccctgacgaactgaccttagaggtgggagacattgtttctgttattgacatgcccccgaaagtgttaagcacatggtggagaggcaagcacggattccaggtgggactcttccctggacactgtgttgagttaattaaccaaaaagttccccagtcagtgaccaactcagtgccaaaaccagtgtctaaaaagcacggcaagctcattacgttcttacgaacattcatgaagtctcgtccaacaaaacagaagctgaagcagcggggaatcttgaaagagagggtgtttggttgtgacctgggggaacaccttctaaattctggttttgaagtgccgcaggttcttcaaagctgcacagcattcattgagagatatggcatcgtggatggaatctatcgcctttctggtgttgcctccaatatccagagactacgccatgaatttgactctgagcacgtccccgacctgacgaaagaaccgtatgttcaggacatccattctgtgggttccctatgtaagctgtacttccgggaactcccaaaccctctgcttacctaccagctgtatgagaaattttctgatgcagtttcagcagcaacagatgaagaaaggctgataaaaatccacgatgtcatccagcagctccccccaccacactacagaacactggagttcctgatgagacacttgtctcttctagctgactattgttccatcacaaatatgcatgcaaaaaatctagcaattgtttgggctccaaacctgttaagatcaaaacagatagaatctgcctgcttcagtggaacagcagctttcatggaagtgaggattcagtctgtggttgttgagttcatcctgaatcacgttgatgtgctgttcagcggcagaatcagcatggccatgcaagagggggcagcttctctatcaaggcccaagtccctcctggtatcctctccatccaccaaactgctgacattggaagaggcccaggcacgaacacaagctcaggtcaattctccaattgtgacggaaaataaatatatcgaagtaggagaaggacctgctgcacttcaggggaaatttcataccataattgagttcccacttgaaagaaagaggcctcaaaataagatgaaaaagtctcctgtgggtagctggcgttcctttttcaacttggggaaatcatcatctgtttctaaacgaaagctgcagcggaatgagagtgagccttcagagatgaaagccatggctctgaaaggtggcagggcagaaggaaccctccgttcagctaaaagtgaggagtctcttacatctctccatgcagttgatggtgattctaagctcttccgacccagaagacccagatcttccagtgatgcactgtctgcctcttttaatggagaaatgctggggaaccgctgtaactcctatgataatctgcctcatgacaatgagagtgaggaggaaggagggctgcttcatatcccagcccttatgtctcctcattcagctgaggatgttgacttgagcccaccagacattggagtagccagcctggattttgatccaatgtcatttcaatgtagtcctcctaaggccgaatcagaatgtctggagagtggtgcttcctttttagattcaccaggatactccaaggataaaccaagtgccaataaaaaggatgcagaaacaggtagtagccaatgtcagactccaggaagcacagcaagctctgaacctgtctctcctcttcaggagaaactgagtccattctttaccctggacttgagcccaactgaagataaatcatctaagccatcctcctttactgaaaaggtcgtctatgctttctctccgaagataggacggaaattaagcaaatcaccttctatgagcatatctgagccaatttcagtgaccctaccaccacgggtgtcagaagtcattggtacagtctcaaataccacagctcagaatgcatcatcttcaacctgggacaaatgcgttgaagaaagggatgccacaaatagatcccccacccagatagtaaagatgaaaacaaatgagacagttgcccaagaagcatatgaatctgaagtccagcccctggaccaggtggctgctgaagaagtagaattgccagggaaagaggatcagtctgtctcaagcagtcagagtaaggctgtagcttctggacagactcagacaggtaccgtttgttttcctccattctttctttaagttaagagggatcttcaatcctgtgtgccatctgtgccttttaagagagaaatttgtccacagctagcctttaatcaaagagaatgcttttctgggtggtgctgatggctcagagccctaaattaaaagcagtccaacaaaactccccaaaagggccaatggtcctgcttcaaatcttcacaaaagtccccttatctctttggacggtgagaattcgtggataatttttgcacaactgcgtagctcttgattctgtttttctcttctaataaaatatctttattgtagccttccaagttaacaagccagctacaccatcaaatgtaaaaactgttcataataacagtctacaagcacttgaagcttgttttctaagcaatcttttctgagccaggtgagggacatgctttttttcccccccatctctgtaacaattcaagaagagattgcagtctttatacactgtttgttttagttttccttctgaaccagatgtgttttcaacagcatttgcatgtgggatagaagatcatggattgccattttgaaatatggaaggcacctattttttaatgatcacatggggagtgtttggctttccatttaggataacgtaagctaccttttcactctcattttttttcccaatttcccactaggagcagttacccatgacccccctcaggattccgttcctgtcagttcagtctctcttatcccaccaccaccgcctccgaaaaatgttgcccgaatgttggcgctagcattagctgagtccgcacagcaagcctcaactcagtcattgaagagaccagggacctctcaggctgggtatacaaattatggagacatagcggtggctacaactgaagataatctgtccagttcttactctgcagttgctctagataaggcctatttccaaaccgatcgaccagcagagcagttccacctccagaataatgcaccaggaaactgtgaccatcctctaccagagacaacagctactggggatcctacccattccaacacaactgaatctggggagcaacatcaccaagtagacttaacagggaatcagccacatcaagcatatttatctggggacccagaaaaggccagaattacttcagttcccttagactcagagaagtctgatgatcatgtaagtttccctgaagaccagtctgggaagaacagtatgccaactgtctccttcttggatcaggaccagtctccaccccgtttctacagtggagatcagcctccttcttatcttggtgcaagtgtggataaactccatcaccctttagaatttgcagacaaatctcccacacctcctaatttacctagcgataaaatctaccctccttctgggtcccccgaagagaataccagcacagccaccatgacttacatgacaactactccagcaacagcccaaatgagcaccaaggaagccagctgggatgtggctgaacaacccaccactgctgattttgctgctgccacacttcagcgcacgcacagaactaatcgtccccttccccctccgccttcccagagatctgcagagcagccaccagttgtggggcaggtacaagcagcaaccaatataggattaaataattcccacaaggtaagaaggggaagatatcagtgagatgaaatatactattaccaaaggtatgtcacttttcagcagggtgtgttgttatctttgagtcagacacaacaattacttttaagccctgtggctggtttccatgagatagttcccatttgaggttggagtctgccattaccttgatgctggcttttccccaggaaaggagtagctcctagatgactatagcttaactgtacctgctcccttttcttcctaaagtgtctcggtagtttattccagtaacacaaagagatcaggatcaaatgagacaaagtgggctttacggttgtgggttgctttttcttatttttttccaactccatcactgactcattgtgactttgggcaagtcatttacctaccctctgccaattattcacagttacacaatgaaaatacttcattctcaaaacattcgtaagactgtctgccttgcagactttttggaagtataagagattatagtgccttgggattttttgttactttcctagcattcaccagcagtttgtcccatagtcaggtgcctgtttcaatgagagaatgtagtatgcagaatgctaaggtttcttcctgaatttcctcatattttaagaaagtgccacaggttgtttttcttctatatggtcaccttgaactattaataggacttaagattttagaccttagtggaggatgctgtgtttactgcttctcaaggatagcatgttttcagtatgaggattatctttggccagactaaggtggaatcaaaggtaggagagaggcagtagcttctgatttgaatattgcctttccctatgtttgaagccctaaaactgctaactgtgtacaactgtgaatttcaaaagtctccccagatgatagaattaactcttaatttaacaagatgtcctttgtgttgagactgagctagactaatagaccgggtatgtatttttaagctctacagcattacttgactaaacctctcttttggtttgtatattaaaattatgccataggcaacctcatctcgcatttaaaacctctcataaattagaaaactttgaatggttctccaaagataatactgggtgttgtacaaaatagcagcacaagccttcttttcctagaaatgggtacagattcattgcaaccacatggcttgggaaagttcaagctgctacccaaccagccttaatttgtgagttacaaatttaatagtacttgattcatagagggaacaaaaaatagacccatagtattatcatctttcaataggttcaaggagtagttccagttccagagaggccacctgaacctcgagccatggatgaccctgcgtctgccttcatcagtgacagtggtgctgctgctgctcagtgtcccatggctacagctgtccagccaggcctgcctgagaaagtgcgggacggtgcccgggtcccgctgctgcacctgcgcgccgagtctgtccctgcgcatccctgtggctttcctgcaccactgccccccaccaggatgatggagagtaagatgattgctgccatacactccagcagtgcagatgccaccagcagttcaaattatcattcctttgtcactgcttcatccacctctgtggacgatgcattgcctttaccacttcctgtcccacaacctaagcatgcttctcagaaaacagtttactcctcctttgctaggcccgatgtcaccactgaaccctttggtccagataactgtttgcatttcaatatgactccaaactgccagtaccgtccccagagtgtacctccccatcacaataaattggagcagcaccaagtgtatggtgccaggtcagagccaccagcctccatgggtcttcgttataacacatatgtggccccaggaagaaacgcatctggacaccactccaagccatgcagccgggtcgagtatgtgtcttctttgagctcctctgtcaggaatacctgttaccccgaagacattccaccgtaccctaccatccggagagtgcagtctctccatgctccgccgtcttccatgattcgctctgttcccatttcacggacagaagttcccccagatgatgagccagcctactgcccaagacctctgtaccaatataagccatatcagtcctcccaggcccgctcagattatcatgtcactcagcttcagccttactttgagaatggccgggtccactacaggtatagcccatattccagttcttctagttcctattacagtccagatggggccctgtgtgatgtggatgcctatggcacagtccagttgagaccccttcaccgccttcccaatcgagactttgctttctacaatcctaggctgcaaggaaagagcttgtacagttatgctggtttggctccacgtccccgggccaacgtgactggctatttctctcccaacgaccataatgtagtcagcatgcctccggctgctgatgtgaagcacacctacacctcatgggatcttgaggacatggaaaaataccgcatgcagtccatccggagagagagccgtgctcggcagaaggtgaaagggcctgtcatgtcccaatatgataacatgaccccggcggtgcaggacgacttgggtgggatctatgtcatccatctgcgtagtaaatcagatcctgggaaaactggacttctctcagtggcagaaggaaaggagagccgccatgcagccaaggccatcagtcccgagggagaggaccgcttctataggaggcatcccgaggcagagatggacagagcccaccatcacggaggccatggtagcacgcagccggagaagccatccctgcctcagaagcagagcagcctgaggagcaggaagcttcctgacatgggctgcagtcttcctgagcacagggcacaccaagaagcaagccataggcagttctgtgagtcaaagaatgggcccccttatccccagggagctggccagttagattatgggtccaaagggattccagacacttctgagccagtcagctaccacaactctggagtaaaatatgctgcatccgggcaagaatctttaagactgaaccacaaagaggtaaggctctccaaagagatggagcgaccctgggttaggcagccttctgccccagagaaacactccagagactgctacaaggaggaagaacacctcactcagtcaatcgtcccaccccctaaaccagagaggagtcatagcctcaaactccatcatacccagaacgtggagagggaccccagtgtgctgtaccagtaccaaccacacggcaagcgccagagcagtgtgactgttgtgtcccagtatgataacctggaagattaccactccctgcctcagcaccagcgaggagtctttggagggggcggcatggggacgtatgtgccccctggctttccccatccacagagcaggacctatgctacagcgttgggtcaaggggccttcctgcccgcagagttgtccttgcagcatcctgaaacacagatccatgcagaatgagccctgcgagcaatagagttgaagcagcctctgctggacagtggactgttctatttttttcaataaccaaaaagattaaacaaaaaatactataaaacccctgaccacatttaaaaaatgataataaaagtaaacaaatcagca

SEQ ID NO: 1440 - DNA, 5289 bp, Homo sapiens
  source 1..5289: mol_type = unassigned DNA; mol_type = unassigned DNA
gcacggcaagctcattacgttcttacgaacattcatgaagtctcgtccaacaaaacagaagctgaagcagcggggaatcttgaaagagagggtgtttggttgtgacctgggggaacaccttctaaattctggttttgaagtgccgcaggttcttcaaagctgcacagcattcattgagagatatggcatcgtggatggaatctatcgcctttctggtgttgcctccaatatccagagactacgccatgaatttgactctgagcacgtccccgacctgacgaaagaaccgtatgttcaggacatccattctgtgggttccctatgtaagctgtacttccgggaactcccaaaccctctgcttacctaccagctgtatgagaaattttctgatgcagtttcagcagcaacagatgaagaaaggctgataaaaatccacgatgtcatccagcagctccccccaccacactacagaacactggagttcctgatgagacacttgtctcttctagctgactattgttccatcacaaatatgcatgcaaaaaatctagcaattgtttgggctccaaacctgttaagatcaaaacagatagaatctgcctgcttcagtggaacagcagctttcatggaagtgaggattcagtctgtggttgttgagttcatcctgaatcacgttgatgtgctgttcagcggcagaatcagcatggccatgcaagagggggcagcttctctatcaaggcccaagtccctcctggtatcctctccatccaccaaactgctgacattggaagaggcccaggcacgaacacaagctcaggtcaattctccaattgtgacggaaaataaatatatcgaagtaggagaaggacctgctgcacttcaggggaaatttcataccataattgagttcccacttgaaagaaagaggcctcaaaataagatgaaaaagtctcctgtgggtagctggcgttcctttttcaacttggggaaatcatcatctgtttctaaacgaaagctgcagcggaatgagagtgagccttcagagatgaaagccatggctctgaaaggtggcagggcagaaggaaccctccgttcagctaaaagtgaggagtctcttacatctctccatgcagttgatggtgattctaagctcttccgacccagaagacccagatcttccagtgatgcactgtctgcctcttttaatggagaaatgctggggaaccgctgtaactcctatgataatctgcctcatgacaatgagagtgaggaggaaggagggctgcttcatatcccagcccttatgtctcctcattcagctgaggatgttgacttgagcccaccagacattggagtagccagcctggattttgatccaatgtcatttcaatgtagtcctcctaaggccgaatcagaatgtctggagagtggtgcttcctttttagattcaccaggatactccaaggataaaccaagtgccaataaaaaggatgcagaaacaggtagtagccaatgtcagactccaggaagcacagcaagctctgaacctgtctctcctcttcaggagaaactgagtccattctttaccctggacttgagcccaactgaagataaatcatctaagccatcctcctttactgaaaaggtcgtctatgctttctctccgaagataggacggaaattaagcaaatcaccttctatgagcatatctgagccaatttcagtgaccctaccaccacgggtgtcagaagtcattggtacagtctcaaataccacagctcagaatgcatcatcttcaacctgggacaaatgcgttgaagaaagggatgccacaaatagatcccccacccagatagtaaagatgaaaacaaatgagacagttgcccaagaagcatatgaatctgaagtccagcccctggaccaggtggctgctgaagaagtagaattgccagggaaagaggatcagtctgtctcaagcagtcagagtaaggctgtagcttctggacagactcagacaggagcagttacccatgacccccctcaggattccgttcctgtcagttcagtctctcttatcccaccaccaccgcctccgaaaaatgttgcccgaatgttggcgctagcattagctgagtccgcacagcaagcctcaactcagtcattgaagagaccagggacctctcaggctgggtatacaaattatggagacatagcggtggctacaactgaagataatctgtccagttcttactctgcagttgctctagataaggcctatttccaaaccgatcgaccagcagagcagttccacctccagaataatgcaccaggaaactgtgaccatcctctaccagagacaacagctactggggatcctacccattccaacacaactgaatctggggagcaacatcaccaagtagacttaacagggaatcagccacatcaagcatatttatctggggacccagaaaaggccagaattacttcagttcccttagactcagagaagtctgatgatcatgtaagtttccctgaagaccagtctgggaagaacagtatgccaactgtctccttcttggatcaggaccagtctccaccccgtttctacagtggagatcagcctccttcttatcttggtgcaagtgtggataaactccatcaccctttagaatttgcagacaaatctcccacacctcctaatttacctagcgataaaatctaccctccttctgggtcccccgaagagaataccagcacagccaccatgacttacatgacaactactccagcaacagcccaaatgagcaccaaggaagccagctgggatgtggctgaacaacccaccactgctgattttgctgctgccacacttcagcgcacgcacagaactaatcgtccccttccccctccgccttcccagagatctgcagagcagccaccagttgtggggcaggtacaagcagcaaccaatataggattaaataattcccacaaggttcaaggagtagttccagttccagagaggccacctgaacctcgagccatggatgaccctgcgtctgccttcatcagtgacagtggtgctgctgctgctcagtgtcccatggctacagctgtccagccaggcctgcctgagaaagtgcgggacggtgcccgggtcccgctgctgcacctgcgcgccgagtctgtccctgcgcatccctgtggctttcctgcaccactgccccccaccaggatgatggagagtaagatgattgctgccatacactccagcagtgcagatgccaccagcagttcaaattatcattcctttgtcactgcttcatccacctctgtggacgatgcattgcctttaccacttcctgtcccacaacctaagcatgcttctcagaaaacagtttactcctcctttgctaggcccgatgtcaccactgaaccctttggtccagataactgtttgcatttcaatatgactccaaactgccagtaccgtccccagagtgtacctccccatcacaataaattggagcagcaccaagtgtatggtgccaggtcagagccaccagcctccatgggtcttcgttataacacatatgtggccccaggaagaaacgcatctggacaccactccaagccatgcagccgggtcgagtatgtgtcttctttgagctcctctgtcaggaatacctgttaccccgaagacattccaccgtaccctaccatccggagagtgcagtctctccatgctccgccgtcttccatgattcgctctgttcccatttcacggacagaagttcccccagatgatgagccagcctactgcccaagacctctgtaccaatataagccatatcagtcctcccaggcccgctcagattatcatgtcactcagcttcagccttactttgagaatggccgggtccactacaggtatagcccatattccagttcttctagttcctattacagtccagatggggccctgtgtgatgtggatgcctatggcacagtccagttgagaccccttcaccgccttcccaatcgagactttgctttctacaatcctaggctgcaaggaaagagcttgtacagttatgctggtttggctccacgtccccgggccaacgtgactggctatttctctcccaacgaccataatgtagtcagcatgcctccggctgctgatgtgaagcacacctacacctcatgggatcttgaggacatggaaaaataccgcatgcagtccatccggagagagagccgtgctcggcagaaggtgaaagggcctgtcatgtcccaatatgataacatgaccccggcggtgcaggacgacttgggtgggatctatgtcatccatctgcgtagtaaatcagatcctgggaaaactggacttctctcagtggcagaaggaaaggagagccgccatgcagccaaggccatcagtcccgagggagaggaccgcttctataggaggcatcccgaggcagagatggacagagcccaccatcacggaggccatggtagcacgcagccggagaagccatccctgcctcagaagcagagcagcctgaggagcaggaagcttcctgacatgggctgcagtcttcctgagcacagggcacaccaagaagcaagccataggcagttctgtgagtcaaagaatgggcccccttatccccagggagctggccagttagattatgggtccaaagggattccagacacttctgagccagtcagctaccacaactctggagtaaaatatgctgcatccgggcaagaatctttaagactgaaccacaaagaggtaaggctctccaaagagatggagcgaccctgggttaggcagccttctgccccagagaaacactccagagactgctacaaggaggaagaacacctcactcagtcaatcgtcccaccccctaaaccagagaggagtcatagcctcaaactccatcatacccagaacgtggagagggaccccagtgtgctgtaccagtaccaaccacacggcaagcgccagagcagtgtgactgttgtgtcccagtatgataacctggaagattaccactccctgcctcagcaccagcgaggagtctttggagggggcggcatggggacgtatgtgccccctggctttccccatccacagagcaggacctatgctacagcgttgggtcaaggggccttcctgcccgcagagttgtccttgcagcatcctgaaacacagatccatgcagaatgagccctgcgagcaatagagttgaagcagcctctgctgga

SEQ ID NO: 1441 - DNA, 401 bp, Homo sapiens
  source 1..401: mol_type = unassigned DNA; mol_type = unassigned DNA
cagatagaatctgcctgcttcagtggaacagcagctttcatggaagtgaggattcagtctgtggttgttgagttcatcctgaatcacgttgatgtgctgttcagcggcagaatcagcatggccatgcaagagggggcagcttctctatcaaggcccaagtccctcctggtatcctctccatccaccaaactgctgacattggaagaggcccaggcacgaacacaagctcaggtcaattctccaattgtgacggaaaataaatatatcgaagtaggagaaggacctgctgcacttcaggggaaatttcataccataattgagttcccacttgaaaggtaaaatttgttaaatcctattttgggatatgattttcatagctatgtcctattattttcttttag

SEQ ID NO: 1442 - DNA, 1064 bp, Homo sapiens
  source 1..1064: mol_type = unassigned DNA; mol_type = unassigned DNA
atcttcatctgtgtatttatgaccgaagattttcccagctctcagaacttccccgttctgacaccctgaaggacagtccagagtcggtcactcagatgcttatggcttacctgtcacgcctttcagctatcgctggcaacaagatcaactgtgggcccgcccttacctggatggagattgataataagggaaatcaccttttggttcatgaggagtcatccatcaacactcctgctgtcggtgctgcccatgttatcaagaggtacactgctcgggcccctgacgaactgaccttagaggtgggagacattgtttctgttattgacatgcccccgaaagtgttaagcacatggtggagaggcaagcacggattccaggtgggactcttccctggacactgtgttgagttaattaaccaaaaagttccccagtcagtgaccaactcagtgccaaaaccagtgtctaaaaagcacggcaagctcattacgttcttacgaacattcatgaagtctcgtccaacaaaacagaagctgaagcagcggggaatcttgaaagagagggtgtttggttgtgacctgggggaacaccttctaaattctggttttgaagtgccgcaggttcttcaaagctgcacagcattcattgagagatatggcatcgtggatggaatctatcgcctttctggtgttgcctccaatatccagagactacgccatgaatttgactctgagcacgtccccgacctgacgaaagaaccgtatgttcaggacatccattctgtgggttccctatgtaagctgtacttccgggaactcccaaaccctctgcttacctaccagctgtatgagaaattttctgatgcagtttcagcagcaacagatgaagaaaggctgataaaaatccacgatgtcatccagcagctccccccaccacactacaggtcagccacagtgggtaaataccaggcagaggtagaagtcggttgacctgtaaacgtttttttttcctttggatttctatttaaacttccttggagttctaattaaacttccatttcatatata

SEQ ID NO: 1443 - DNA, 719 bp, Homo sapiens
  source 1..719: mol_type = unassigned DNA; mol_type = unassigned DNA
gcccggccgagcccccgcggctgccctcggcggccaggcgctaggctcggcggcgcgggcggcgctcggcggcggcggcggcgggcggagggcgtcgggcccggcccgcggagggcagacacggagcggccagcggggcgcagggacgccgcggcggcgcggcggggccgcggggctcggaagatgaagtcctcagtacattctgaagaagatgattttgttccagagctacatagaaatgtacaccctcgagagcggcctgattgggaagaaactcttagcgcaatggcaagaggcgcagatgttccagagattcctggagatcttactcttaagacgtgtggcagtacagccagtatgaaggttaagcatgtgaaaaagtccaccactccaggactgatgggctgtgacaacattcacaggttacccttcactaaaggtcactttccgaagatggctgaatgtgcgcatttccattatgagaatgttgagttcggcagcatacagctttcactttcagaagaacagaatgaagtaatgaaaaatggctgtgaatctaaagagctggtctacctcgtgcagattgcttgtcagggaaaaagttggattgttaaaagaagttatgaagattttcgggtacttgataaacatcttcatctgtgtatttatgaccgaagattttcccagctctcagaacttccccgttctgacaccctgaa

SEQ ID NO: 1444 - DNA, 4488 bp, Homo sapiens
  source 1..4488: mol_type = unassigned DNA; mol_type = unassigned DNA
gcgccgtcccggccatgggcgcccgcggcggcctgcggagctggaggcgcggcgccggccgccaggcgcctttgtgagcggcgcggacgacaaaggcgcgggcccgggcagccgaggtgtgtagctgggacggtgctggtctgagctggaccttgtctgatggcttcctccaaccctcctccacagcctgccataggagatcagctggttccaggagtcccaggcccctcctctgaggcagaggacgacccaggagaggcgtttgagtttgatgacagtgatgatgaagaggacaccagcgcagccctgggcgtccccagccttgctcctgagagggacacagaccccccactgatccacttggactccatccctgtcactgacccagacccagcagctgctccacccggcacaggggtgccagcctgggtgagcaatggggatgcagcggacgcagccttctccggggcccggcactccagctggaagcggaagagttcccgtcgcattgaccggttcactttccccgccctggaagaggatgtgatttatgacgacgtcccctgcgagagcccagatgcgcatcagcccggggcagagaggaacctgctctacgaggatgcgcaccgggctggggcccctcggcaggcggaggacctaggctggagctccagtgagttcgagagctacagcgaggactcgggggaggaggccaagccggaggtcgaggtcgagcccgccaagcaccgagtgtccttccagcccaagctttctccagacctgactaggctaaaggagagatacgccaggactaagagagacatcttggctttgagagttggggggagagacatgcaggagctgaagcacaagtacgattgtaagatgacccagctcatgaaggccgccaagagcgggaccaaggatgggctggagaagacacggatggccgtgatgcgcaaagtctccttcctgcacaggaaggacgtcctcggtgactcggaggaggaggacatggggctcctggaggtcagcgtttcggacatcaagcccccagccccagagctgggccccatgccagagggcctgagccctcagcaggtggtccggaggcatatcctgggctccatcgtgcagagcgaaggcagctacgtggagtctctgaagcggatactccaggactaccgcaaccccctgatggagatggagcccaaggcgctgagcgcccgcaagtgccaggtggtgttcttccgcgtgaaggagatcctgcactgccactccatgttccagatcgccctgtcctcccgcgtggctgagtgggattccaccgagaagatcggggacctcttcgtggcctcgttttccaagtccatggtgctagatgtgtacagtgactacgtgaacaacttcaccagtgccatgtccatcatcaagaaggcctgcctcaccaagcctgccttcctcgagttcctcaagcgacggcaggtgtgcagcccagaccgtgtcaccctctacgggctgatggtcaagcccatccagaggttcccacagttcatactcctgcttcaggacatgctgaagaacacccccaggggccatccggacaggctgtcgctgcagctggccctcacagagctggagacgctggctgagaagctgaacgagcagaagcggctggctgaccaggtggctgagatccagcagctgaccaagagcgtcagtgaccgcagcagcctcaacaagctgttgacctcaggccagcggcagctgctcctgtgtgagacgttgacggagaccgtgtacggtgaccgcgggcagctaattaagtccaaggagcgtcgggtcttcctgctcaacgacatgcttgtctgtgccaacatcaacttcaagcctgccaaccacaggggccagctggagatcagcagcctggtgcccctggggcccaagtatgtggtgaagtggaacacggcgctgccccaggtgcaggtggtggaggtgggccaggacggtggcacctatgacaaggacaatgtgctcatccagcactcaggcgccaagaaggcctctgcctcagggcaggctcagaataaggtgtacctcggccccccacgcctcttccaggagctgcaggacctgcagaaggacctggccgtggtggagcagatcacgcttctcatcagcacgctgcacggcacctaccagaacctgaacatgactgtggctcaagactggtgcctggccctgcagaggctgatgcgggtgaaggaggaagagatccactcggccaacaagtgccgtctcaggctcctgcttcctgggaaacccgacaagtccggccgccccattagcttcatggtggttttcatcacccccaaccccctgagcaagatttcctgggtcaacaggttacatttggccaaaatcggactccgggaggagaaccagccaggctggctatgcccggatgaggacaagaagagcaaagccccattctggtgcccgatcctggcctgctgcatccctgccttctcctcccgggcactcagcctgcagcttggggccctggtccacagtcctgtcaactgtcccctgctgggtttctcagcagtcagcacctcccttccacagggctacctctgggtcgggggcggacaggaaggcgcagggggccaggtggaaatcttttccttgaaccggccctcgccccgcaccgtcaagtccttcccactggcagcccctgtgctctgcatggagtatatcccggagctggaggaggaggcggagagcagagacgagagcccgacagttgctgacccctcggccacggtgcatccaaccatctgcctcgggctccaggatggcagcatcctcctctacagcagtgtggacactggcacccagtgcctggtgagctgcaggagcccaggtctgcagcctgtgctctgcctgcgacacagccccttccacctgctcgctggcctgcaggatgggacccttgctgcttaccctcggaccagcggaggtgtcctgtgggacctggagagccctcccgtgtgcctgactgtggggcccgggcctgtccgcaccctgttgagcctggaggatgccgtgtgggccagctgtgggccccgggtcactgtcctggaagccaccaccctgcagcctcagcaaagcttcgaggcgcaccaggacgaggcagtgagcgtgacacacatggtgaaggcgggcagcggcgtctggatggccttctcctccggcacctccatccgcctcttccacactgagaccctggagcatctgcaagagatcaacatcgccaccaggaccaccttcctcctgccaggccagaagcacttgtgtgtcaccagcctcctgatctgccagggtctgctctgggtgggcactgaccagggtgtcatcgtcctgctgcccgtgcctcggctggaaggcatccccaagatcacagggaaaggcatggtctcactcaacgggcactgtgggcctgtggccttcctggctgtggctaccagcatcctggcccctgacatcctgcggagtgaccaggaggaggctgaggggccccgggctgaggaggacaagccagacgggcaggcacacgagcccatgcccgatagccacgtgggccgagagctgacccgcaagaagggcatcctcttgcagtaccgcctgcgctccaccgcacacctcccgggcccgctgctctccatgcgggagccggcgcctgctgatggcgcagctttggagcacagcgaggaggacggctccatttacgagatggccgacgaccccgacatctgggtgcgcagccggccctgcgcccgcgacgcccaccgcaaggagatttgctctgtggccatcatctccggcgggcagggctaccgcaactttggcagcgctctgggcagcagtgggaggcaggccccgtgtggggagacggacagcaccctcctcatctggcaggtgcccttgatgctatagcgcctcccctctcccctcagagggcacagctgcaggcctgaccaaggccacgcccggctctcgtgctctaggacctgcacgggacttgtggatgggcctggactctccagaaactacttgggcagagcaaaggaaaacctcttgttttaaaaaaatttttttcagagtgttttggggaggagttttagggcttggggagagggaggacacatctggaggaaatggccttctttttaaaagcaaaaaacacaaaacctcacaactgcctggcaagcccagtatcacttgtttgggccctagcgggactccaaggcagccacacgcccctcctggaagggtgtgtgcgtgtgagtgtgtgcgagtgtgtgggctggtgtgtgaatatctataaataagtatatatggtgtatattatatgtgtataaataaagtctgtacatattggagctctgggagatgctggaataaaagacaagagttacatctgga

SEQ ID NO: 1445 - DNA, 4035 bp, Homo sapiens
  source 1..4035: mol_type = unassigned DNA; mol_type = unassigned DNA
gtgtgtagctgggacggtgctggtctgagctggaccttgtctgatggcttcctccaaccctcctccacagcctgccataggagatcagctggttccaggagtcccaggcccctcctctgaggcagaggacgacccaggagaggcgtttgagtttgatgacagtgatgatgaagaggacaccagcgcagccctgggcgtccccagccttgctcctgagagggacacagaccccccactgatccacttggactccatccctgtcactgacccagacccagcagctgctccacccggcacaggggtgccagcctgggtgagcaatggggatgcagcggacgcagccttctccggggcccggcactccagctggaagcggaagagttcccgtcgcattgaccggttcactttccccgccctggaagaggatgtgatttatgacgacgtcccctgcgagagcccagatgcgcatcagcccggggcagagaggaacctgctctacgaggatgcgcaccgggctggggcccctcggcaggcggaggacctaggctggagctccagtgagttcgagagctacagcgaggactcgggggaggaggccaagccggaggtcgaggtcgagcccgccaagcaccgagtgtccttccagcccaagatgacccagctcatgaaggccgccaagagcgggaccaaggatgggctggagaagacacggatggccgtgatgcgcaaagtctccttcctgcacaggaaggacgtcctcggtgactcggaggaggaggacatggggctcctggaggtcagcgtttcggacatcaagcccccagccccagagctgggccccatgccagagggcctgagccctcagcaggtggtccggaggcatatcctgggctccatcgtgcagagcgaaggcagctacgtggagtctctgaagcggatactccaggactaccgcaaccccctgatggagatggagcccaaggcgctgagcgcccgcaagtgccaggtggtgttcttccgcgtgaaggagatcctgcactgccactccatgttccagatcgccctgtcctcccgcgtggctgagtgggattccaccgagaagatcggggacctcttcgtggcctcgttttccaagtccatggtgctagatgtgtacagtgactacgtgaacaacttcaccagtgccatgtccatcatcaagaaggcctgcctcaccaagcctgccttcctcgagttcctcaagcgacggcaggtgtgcagcccagaccgtgtcaccctctacgggctgatggtcaagcccatccagaggttcccacagttcatactcctgcttcaggacatgctgaagaacacccccaggggccatccggacaggctgtcgctgcagctggccctcacagagctggagacgctggctgagaagctgaacgagcagaagcggctggctgaccaggtggctgagatccagcagctgaccaagagcgtcagtgaccgcagcagcctcaacaagctgttgacctcaggccagcggcagctgctcctgtgtgagacgttgacggagaccgtgtacggtgaccgcgggcagctaattaagtccaaggagcgtcgggtcttcctgctcaacgacatgcttgtctgtgccaacatcaacttcaagcctgccaaccacaggggccagctggagatcagcagcctggtgcccctggggcccaagtatgtggtgaagtggaacacggcgctgccccaggtgcaggtggtggaggtgggccaggacggtggcacctatgacaaggacaatgtgctcatccagcactcaggcgccaagaaggcctctgcctcagggcaggctcagaataaggtgtacctcggccccccacgcctcttccaggagctgcaggacctgcagaaggacctggccgtggtggagcagatcacgcttctcatcagcacgctgcacggcacctaccagaacctgaacatgactgtggctcaagactggtgcctggccctgcagaggctgatgcgggtgaaggaggaagagatccactcggccaacaagtgccgtctcaggctcctgcttcctgggaaacccgacaagtccggccgccccattagcttcatggtggttttcatcacccccaaccccctgagcaagatttcctgggtcaacaggttacatttggccaaaatcggactccgggaggagaaccagccaggctggctatgcccggatgaggacaagaagagcaaagccccattctggtgcccgatcctggcctgctgcatccctgccttctcctcccgggcactcagcctgcagcttggggccctggtccacagtcctgtcaactgtcccctgctgggtttctcagcagtcagcacctcccttccacagggctacctctgggtcgggggcggacaggaaggcgcagggggccaggtggaaatcttttccttgaaccggccctcgccccgcaccgtcaagtccttcccactggcagcccctgtgctctgcatggagtatatcccggagctggaggaggaggcggagagcagagacgagagcccgacagttgctgacccctcggccacggtgcatccaaccatctgcctcgggctccaggatggcagcatcctcctctacagcagtgtggacactggcacccagtgcctggtgagctgcaggagcccaggtctgcagcctgtgctctgcctgcgacacagccccttccacctgctcgctggcctgcaggatgggacccttgctgcttaccctcggaccagcggaggtgtcctgtgggacctggagagccctcccgtgtgcctgactgtggggcccgggcctgtccgcaccctgttgagcctggaggatgccgtgtgggccagctgtgggccccgggtcactgtcctggaagccaccaccctgcagcctcagcaaagcttcgaggcgcaccaggacgaggcagtgagcgtgacacacatggtgaaggcgggcagcggcgtctggatggccttctcctccggcacctccatccgcctcttccacactgagaccctggagcatctgcaagagatcaacatcgccaccaggaccaccttcctcctgccaggccagaagcacttgtgtgtcaccagcctcctgatctgccagggtctgctctgggtgggcactgaccagggtgtcatcgtcctgctgcccgtgcctcggctggaaggcatccccaagatcacagggaaaggcatggtctcactcaacgggcactgtgggcctgtggccttcctggctgtggctaccagcatcctggcccctgacatcctgcggagtgaccaggaggaggctgaggggccccgggctgaggaggacaagccagacgggcaggcacacgagcccatgcccgatagccacgtgggccgagagctgacccgcaagaagggcatcctcttgcagtaccgcctgcgctccaccgcacacctcccgggcccgctgctctccatgcgggagccggcgcctgctgatggcgcagctttggagcacagcgaggaggacggctccatttacgagatggccgacgaccccgacatctgggtgcgcagccggccctgcgcccgcgacgcccaccgcaaggagatttgctctgtggccatcatctccggcgggcagggctaccgcaactttggcagcgctctgggcagcagtgggaggcaggccccgtgtggggagacggacagcaccctcctcatctggcaggtgcccttgatgctatagcgcctcccctctcccctcagagggcacagctgcaggcctgaccaaggccacgcccggctctcgtgctctaggacctgcacgggacttgtggatgggcctggactctccagaaactacttgggcagagcaaaggaaaacctcttgttttaaaaaaatttttttcagagtgttttggggaggagttttagggcttggggagagggaggacacatctggaggaaatggccttctttttaaaagcaaaaaacacaaaacctcacaactgcctg

SEQ ID NO: 1446 - DNA, 539 bp, Homo sapiens
  source 1..539: mol_type = unassigned DNA; mol_type = unassigned DNA
tctccggggcccggcactccagctggaagcggaagagttcccgtcgcattgaccggttcactttccccgccctggaagaggatgtgatttatgacgacgtcccctgcgagagcccagatgcgcatcagcccggggctctccgtccaatggggaagcacagcccctgcttttgaggagctccgagtctgatggggcagctctaaccatccttgagcagcacagagcgcaatgggagagacacacagacaacacggcaaggcccgagggccccagagccacactcctgactcctgtctcaggaacggggacacctgggccaaggatatgcttatccctttagcaagcctgggatgtgcttggagcacattttcctgtttgtagctcacttgagtccagggagcaatggattcccactgtattaggaggcaaaggagtctcagaaaagtcccagagctgggaggtctgagcggctgaggggcctcagttgttgtttaacccatttggcctatttcccacctgaattcaatcaagtcactaag

SEQ ID NO: 1447 - DNA, 4585 bp, Homo sapiens
  source 1..4585: mol_type = unassigned DNA; mol_type = unassigned DNA
attagaaatttgggtgcttcctcgcaccagcacatttcaagtgctcaatagtcgcatgtggcccgtggctcccattttggacagggcagatacagagtgtttctgtcattgcagagccttctctttgctggtgctgctgtatgctggagaagatgcgggtgctagggctggggcttgggaggacaaaggactggctgaggggacagcagctctgtcaggcctgggttcccccagcacctcggatgcccacttccctcttctgggcacgcggtctccttacgtctcatgttctgcttagcttgctacgctcgtgtccatggatcccctccccactgccagaggaagctgcctcttctttctggcaacttcagccttttctccttttcccggatggtggctcagtaagaaacctggctgtttcgggggaggcaagggacgggtccctcacctgggtttggcggatgggatgggggtgtgcacacacctcctttagttgctcctaaggtcatgttcaacattcgtggagtgcatttttctgctcagggagctttcccagacccggaatgtttggtgctcacagaccctggcaaggatcggtattgctgttcctcagttttgcctggggaaatggaggctcagtgacgttcagtgacgtgcccagagtcatgccattggcgggtggcccagggctccaggtctccagcacccctcggccccctcctcaccaggtcacatcatctcctggattagaaatctgctcacatagtctgtcctgaaaggaaaaaaatcggttacagcctcctgttgcccctaaagagggagatccccgggcatgaacgcaccttctcacccccactgtcgtccttggcctttgctcacggacctgggagggaagggtctgggtggttctgatctctgcaggccgaggcctggggaggcgggtggccctcggtagcaggcatcccaggccgtcccttccctgatgagcctctctacctttgctcagatgacccagctcatgaaggccgccaagagcgggaccaaggatgggctggagaagacacggatggccgtgatgcgcaaagtctccttcctgcacaggaaggacgtcctcggtgactcggaggaggaggacatggggctcctggaggtcagcgtttcggacatcaagcccccagccccagagctgggccccatgccagagggcctgagccctcagcaggtggtccggaggcatatcctgggctccatcgtgcagagcgaaggcagctacgtggagtctctgaagcggatactccaggactaccgcaaccccctgatggagatggagcccaaggcgctgagcgcccgcaagtgccaggtggtgttcttccgcgtgaaggagatcctgcactgccactccatgttccagatcgccctgtcctcccgcgtggctgagtgggattccaccgagaagatcggggacctcttcgtggcctcgttttccaagtccatggtgctagatgtgtacagtgactacgtgaacaacttcaccagtgccatgtccatcatcaagaaggcctgcctcaccaagcctgccttcctcgagttcctcaagcgacggcaggtgtgcagcccagaccgtgtcaccctctacgggctgatggtcaagcccatccagaggttcccacagttcatactcctgcttcaggacatgctgaagaacacccccaggggccatccggacaggctgtcgctgcagctggccctcacagagctggagacgctggctgagaagctgaacgagcagaagcggctggctgaccaggtggctgagatccagcagctgaccaagagcgtcagtgaccgcagcagcctcaacaagctgttgacctcaggccagcggcagctgctcctgtgtgagacgttgacggagaccgtgtacggtgaccgcgggcagctaattaagtccaaggagcgtcgggtcttcctgctcaacgacatgcttgtctgtgccaacatcaacttcaagggccagctggagatcagcagcctggtgcccctggggcccaagtatgtggtgaagtggaacacggcgctgccccaggtgcaggtggtggaggtgggccaggacggtggcacctatgacaaggacaatgtgctcatccagcactcaggcgccaagaaggcctctgcctcagggcaggctcagaataaggtgtacctcggccccccacgcctcttccaggagctgcaggacctgcagaaggacctggccgtggtggagcagatcacgcttctcatcagcacgctgcacggcacctaccagaacctgaacatgactgtggctcaagactggtgcctggccctgcagaggctgatgcgggtgaaggaggaagagatccactcggccaacaagtgccgtctcaggctcctgcttcctgggaaacccgacaagtccggccgccccattagcttcatggtggttttcatcacccccaaccccctgagcaagatttcctgggtcaacaggttacatttggccaaaatcggactccgggaggagaaccagccaggctggctatgcccggatgaggacaagaagagcaaagccccattctggtgcccgatcctggcctgctgcatccctgccttctcctcccgggcactcagcctgcagcttggggccctggtccacagtcctgtcaactgtcccctgctgggtttctcagcagtcagcacctcccttccacagggctacctctgggtcgggggcggacaggaaggcgcagggggccaggtggaaatcttttccttgaaccggccctcgccccgcaccgtcaagtccttcccactggcagcccctgtgctctgcatggagtatatcccggagctggaggaggaggcggagagcagagacgagagcccgacagttgctgacccctcggccacggtgcatccaaccatctgcctcgggctccaggatggcagcatcctcctctacagcagtgtggacactggcacccagtgcctggtgagctgcaggagcccaggtctgcagcctgtgctctgcctgcgacacagccccttccacctgctcgctggcctgcaggatgggacccttgctgcttaccctcggaccagcggaggtgtcctgtgggacctggagagccctcccgtgtgcctgactgtggggcccgggcctgtccgcaccctgttgagcctggaggatgccgtgtgggccagctgtgggccccgggtcactgtcctggaagccaccaccctgcagcctcagcaaagcttcgaggcgcaccaggacgaggcagtgagcgtgacacacatggtgaaggcgggcagcggcgtctggatggccttctcctccggcacctccatccgcctcttccacactgagaccctggagcatctgcaagagatcaacatcgccaccaggaccaccttcctcctgccaggccagaagcacttgtgtgtcaccagcctcctgatctgccagggtctgctctgggtgggcactgaccagggtgtcatcgtcctgctgcccgtgcctcggctggaaggcatccccaagatcacagggaaaggcatggtctcactcaacgggcactgtgggcctgtggccttcctggctgtggctaccagcatcctggcccctgacatcctgcggagtgaccaggaggaggctgaggggccccgggctgaggaggacaagccagacgggcaggcacacgagcccatgcccgatagccacgtgggccgagagctgacccgcaagaagggcatcctcttgcagtaccgcctgcgctccaccgcacacctcccgggcccgctgctctccatgcgggagccggcgcctgctgatggcgcagctttggagcacagcgaggaggacggctccatttacgagatggccgacgaccccgacatctgggtgcgcagccggccctgcgcccgcgacgcccaccgcaaggagatttgctctgtggccatcatctccggcgggcagggctaccgcaactttggcagcgctctgggcagcagtgggaggcaggccccgtgtggggagacggacagcaccctcctcatctggcaggtgcccttgatgctatagcgcctcccctctcccctcagagggcacagctgcaggcctgaccaaggccacgcccggctctcgtgctctaggacctgcacgggacttgtggatgggcctggactctccagaaactacttgggcagagcaaaggaaaacctcttgttttaaaaaaatttttttcagagtgttttggggaggagttttagggcttggggagagggaggacacatctggaggaaatggccttctttttaaaagcaaaaaacacaaaacctcacaactgcctggcaagcccagtatcacttgtttgggccctagcgggactccaaggcagccacacgcccctcctggaagggtgtgtgcgtgtgagtgtgtgcgagtgtgtgggctggtgtgtgaatatctataaataagtatatatggtgtatattatatgtgtataaataaagtctgtacatattggagctctgggagatgctggaataaaagacaagagtt

SEQ ID NO: 1448 - DNA, 3685 bp, Homo sapiens
  source 1..3685: mol_type = unassigned DNA; mol_type = unassigned DNA
attaatagccgtggcagggctcgaatcacaggccaagaatgttacccagcagctcgtgggggaagaggaagctgcgaggcaggctggggtgggtgcggagtgatgcccggggcgtgatgtgggcccggcaggagggtctgcaccacccccacccccacgccgtcatccgctgtccctcctcctcctcctcctctgtctcctgctcaggtgactcggaggaggaggacatggggctcctggaggtcagcgtttcggacatcaagcccccagccccagagctgggccccatgccagagggcctgagccctcagcaggtggtccggaggcatatcctgggctccatcgtgcagagcgaaggcagctacgtggagtctctgaagcggatactccaggactaccgcaaccccctgatggagatggagcccaaggcgctgagcgcccgcaagtgccaggtggtgttcttccgcgtgaaggagatcctgcactgccactccatgttccagatcgccctgtcctcccgcgtggctgagtgggattccaccgagaagatcggggacctcttcgtggcctcgttttccaagtccatggtgctagatgtgtacagtgactacgtgaacaacttcaccagtgccatgtccatcatcaagaaggcctgcctcaccaagcctgccttcctcgagttcctcaagcgacggcaggtgtgcagcccagaccgtgtcaccctctacgggctgatggtcaagcccatccagaggttcccacagttcatactcctgcttcaggacatgctgaagaacacccccaggggccatccggacaggctgtcgctgcagctggccctcacagagctggagacgctggctgagaagctgaacgagcagaagcggctggctgaccaggtggctgagatccagcagctgaccaagagcgtcagtgaccgcagcagcctcaacaagctgttgacctcaggccagcggcagctgctcctgtgtgagacgttgacggagaccgtgtacggtgaccgcgggcagctaattaagtccaaggagcgtcgggtcttcctgctcaacgacatgcttgtctgtgccaacatcaacttcaagggccagctggagatcagcagcctggtgcccctggggcccaagtatgtggtgaagtggaacacggcgctgccccaggtgcaggtggtggaggtgggccaggacggtggcacctatgacaaggacaatgtgctcatccagcactcaggcgccaagaaggcctctgcctcagggcaggctcagaataaggtgtacctcggccccccacgcctcttccaggagctgcaggacctgcagaaggacctggccgtggtggagcagatcacgcttctcatcagcacgctgcacggcacctaccagaacctgaacatgactgtggctcaagactggtgcctggccctgcagaggctgatgcgggtgaaggaggaagagatccactcggccaacaagtgccgtctcaggctcctgcttcctgggaaacccgacaagtccggccgccccattagcttcatggtggttttcatcacccccaaccccctgagcaagatttcctgggtcaacaggttacatttggccaaaatcggactccgggaggagaaccagccaggctggctatgcccggatgaggacaagaagagcaaagccccattctggtgcccgatcctggcctgctgcatccctgccttctcctcccgggcactcagcctgcagcttggggccctggtccacagtcctgtcaactgtcccctgctgggtttctcagcagtcagcacctcccttccacagggctacctctgggtcgggggcggacaggaaggcgcagggggccaggtggaaatcttttccttgaaccggccctcgccccgcaccgtcaagtccttcccactggcagcccctgtgctctgcatggagtatatcccggagctggaggaggaggcggagagcagagacgagagcccgacagttgctgacccctcggccacggtgcatccaaccatctgcctcgggctccaggatggcagcatcctcctctacagcagtgtggacactggcacccagtgcctggtgagctgcaggagcccaggtctgcagcctgtgctctgcctgcgacacagccccttccacctgctcgctggcctgcaggatgggacccttgctgcttaccctcggaccagcggaggtgtcctgtgggacctggagagccctcccgtgtgcctgactgtggggcccgggcctgtccgcaccctgttgagcctggaggatgccgtgtgggccagctgtgggccccgggtcactgtcctggaagccaccaccctgcagcctcagcaaagcttcgaggcgcaccaggacgaggcagtgagcgtgacacacatggtgaaggcgggcagcggcgtctggatggccttctcctccggcacctccatccgcctcttccacactgagaccctggagcatctgcaagagatcaacatcgccaccaggaccaccttcctcctgccaggccagaagcacttgtgtgtcaccagcctcctgatctgccagggtctgctctgggtgggcactgaccagggtgtcatcgtcctgctgcccgtgcctcggctggaaggcatccccaagatcacagggaaaggcatggtctcactcaacgggcactgtgggcctgtggccttcctggctgtggctaccagcatcctggcccctgacatcctgcggagtgaccaggaggaggctgaggggccccgggctgaggaggacaagccagacgggcaggcacacgagcccatgcccgatagccacgtgggccgagagctgacccgcaagaagggcatcctcttgcagtaccgcctgcgctccaccgcacacctcccgggcccgctgctctccatgcgggagccggcgcctgctgatggcgcagctttggagcacagcgaggaggacggctccatttacgagatggccgacgaccccgacatctgggtgcgcagccggccctgcgcccgcgacgcccaccgcaaggagatttgctctgtggccatcatctccggcgggcagggctaccgcaactttggcagcgctctgggcagcagtgggaggcaggccccgtgtggggagacggacagcaccctcctcatctggcaggtgcccttgatgctatagcgcctcccctctcccctcagagggcacagctgcaggcctgaccaaggccacgcccggctctcgtgctctaggacctgcacgggacttgtggatgggcctggactctccagaaactacttgggcagagcaaaggaaaacctcttgttttaaaaaaatttttttcagagtgttttggggaggagttttagggcttggggagagggaggacacatctggaggaaatggccttctttttaaaagcaaaaaacacaaaacctcacaactgcctggcaagcccagtatcacttgtttgggccctagcgggactccaaggcagccacacgcccctcctggaagggtgtgtgcgtgtgagtgtgtgcgagtgtgtgggctggtgtgtgaatatctataaataagtatatatggtgtatattatatgtgtataaataaagtctgtacatattggagctctgggagatgctggaataaaagacaagagttacatctgg

SEQ ID NO: 1449 - DNA, 3018 bp, Homo sapiens
  source 1..3018: mol_type = unassigned DNA; mol_type = unassigned DNA
aagcccatccagaggttcccacagttcatactcctgcttcaggacatgctgaagaacacccccaggggccatccggacaggctgtcgctgcagctggccctcacagagctggagacgctggctgagaagctgaacgagcagaagcggctggctgaccaggtggctgagatccagcagctgaccaagagcgtcagtgaccgcagcagcctcaacaagctgttgacctcaggccagcggcagctgctcctgtgtgagacgttgacggagaccgtgtacggtgaccgcgggcagctaattaagtccaaggagcgtcgggtcttcctgctcaacgacatgcttgtctgtgccaacatcaacttcaagggccagctggagatcagcagcctggtgcccctggggcccaagtatgtggtgaagtggaacacggcgctgccccaggtgcaggtggtggaggtgggccaggacggtggcacctatgacaaggacaatgtgctcatccagcactcaggcgccaagaaggcctctgcctcagggcaggctcagaataaggtgtacctcggccccccacgcctcttccaggagctgcaggacctgcagaaggacctggccgtggtggagcagatcacgcttctcatcagcacgctgcacggcacctaccagaacctgaacatgactgtggctcaagactggtgcctggccctgcagaggctgatgcgggtgaaggaggaagagatccactcggccaacaagtgccgtctcaggctcctgcttcctgggaaacccgacaagtccggccgccccattagcttcatggtggttttcatcacccccaaccccctgagcaagatttcctgggtcaacaggttacatttggccaaaatcggactccgggaggagaaccagccaggctggctatgcccggatgaggacaagaagagcaaagccccattctggtgcccgatcctggcctgctgcatccctgccttctcctcccgggcactcagcctgcagcttggggccctggtccacagtcctgtcaactgtcccctgctgggtttctcagcagtcagcacctcccttccacagggctacctctgggtcgggggcggacaggaaggcgcagggggccaggtggaaatcttttccttgaaccggccctcgccccgcaccgtcaagtccttcccactggcagcccctgtgctctgcatggagtatatcccggagctggaggaggaggcggagagcagagacgagagcccgacagttgctgacccctcggccacggtgcatccaaccatctgcctcgggctccaggatggcagcatcctcctctacagcagtgtggacactggcacccagtgcctggtgagctgcaggagcccaggtctgcagcctgtgctctgcctgcgacacagccccttccacctgctcgctggcctgcaggatgggacccttgctgcttaccctcggaccagcggaggtgtcctgtgggacctggagagccctcccgtgtgcctgactgtggggcccgggcctgtccgcaccctgttgagcctggaggatgccgtgtgggccagctgtgggccccgggtcactgtcctggaagccaccaccctgcagcctcagcaaagcttcgaggcgcaccaggacgaggcagtgagcgtgacacacatggtgaaggcgggcagcggcgtctggatggccttctcctccggcacctccatccgcctcttccacactgagaccctggagcatctgcaagagatcaacatcgccaccaggaccaccttcctcctgccagacaggtcattaataaaatgttctccaagagcctgagctttttaaagttgtatatctccagatagatggcttgggccagaagcacttgtgtgtcaccagcctcctgatctgccagggtctgctctgggtgggcactgaccagggtgtcatcgtcctgctgcccgtgcctcggctggaaggcatccccaagatcacagggaaaggcatggtctcactcaacgggcactgtgggcctgtggccttcctggctgtggctaccagcatcctggcccctgacatcctgcggagtgaccaggaggaggctgaggggccccgggctgaggaggacaagccagacgggcaggcacacgagcccatgcccgatagccacgtgggccgagagctgacccgcaagaagggcatcctcttgcagtaccgcctgcgctccaccgcacacctcccgggcccgctgctctccatgcgggagccggcgcctgctgatggcgcagctttggagcacagcgaggaggacggctccatttacgagatggccgacgaccccgacatctgggtgcgcagccggccctgcgcccgcgacgcccaccgcaaggagatttgctctgtggccatcatctccggcgggcagggctaccgcaactttggcagcgctctgggcagcagtgggaggcaggccccgtgtggggagacggacagcaccctcctcatctggcaggtgcccttgatgctatagcgcctcccctctcccctcagagggcacagctgcaggcctgaccaaggccacgcccggctctcgtgctctaggacctgcacgggacttgtggatgggcctggactctccagaaactacttgggcagagcaaaggaaaacctcttgttttaaaaaaatttttttcagagtgttttggggaggagttttagggcttggggagagggaggacacatctggaggaaatggccttctttttaaaagcaaaaaacacaaaacctcacaactgcctggcaagcccagtatcacttgtttgggccctagcgggactccaaggcagccacacgcccctcctggaagggtgtgtgcgtgtgagtgtgtgcgagtgtgtgggctggtgtgtgaatatctataaataagtatatatggtgtatattatatgtgtataaataaagtctgtacatattggagctctgggagatgctggaataaaagacaagagttacatctgg

SEQ ID NO: 1450 - DNA, 604 bp, Homo sapiens
  source 1..604: mol_type = unassigned DNA; mol_type = unassigned DNA
ggggaatcagtttgggtgatttgggctgagtcacttcacttgactgaggatcagtgtccttgtctgggatcatctaagcttcctagcggggctgttgtgagacccagagatgaaggaaggcccgcttctgtccacacctggcctctgatgccctcattccccgcaggaggctgtctctccttctattcccgatgcccagccccatggctggcccccagcggggtcacagcccccagattagccactccattgtaataacaatctccctttccttcttgtcttttttcccaggcctgccaaccacaggggccagctggagatcagcagcctggtgcccctggggcccaagtatgtggtgaagtggaacacggcgctgccccaggtgcaggtggtggaggtgggccaggacggtggcacctatgacaaggacaatgtgctcatccagcactcaggcgccaagaaggcctctgcctcagggcaggctcagaataaggtgtacctcggccccccacgcctcttccaggagctgcaggacctgcagaaggacctggccgtggtggagcagatcacgcttctcatcagcacgctgcacggcacctaccag

SEQ ID NO: 1451 - DNA, 482 bp, Homo sapiens
  source 1..482: mol_type = unassigned DNA; mol_type = unassigned DNA
ctcagcaaacatttactgagcaactgtcccatgccaggtgctgggaacagacccaagtgagacccattcctccctctagaggcacgtggtcagacatgtaaggtgtctaagacctgtggacagctgaccgctgaccaggtggagtcacagcctgcagaggctctgccgggcacaaagccagaggctcctggagccaggctggggagcgtggctcagccaccctggccaggtccggccgccccattagcttcatggtggttttcatcacccccaaccccctgagcaagatttcctgggtcaacaggttacatttggccaaaatcggactccgggaggagaaccagccaggctggctatgcccggatgaggacaagaagagcaaagccccattctggtgcccgatcctggcctgctgcatccctgccttctcctcccgggcactcagcctgcagcttggggccctggtccacagtcctgtcaac

SEQ ID NO: 1452 - DNA, 2261 bp, Homo sapiens
  source 1..2261: mol_type = unassigned DNA; mol_type = unassigned DNA
attgctagaattgttggcaacagtgcagcagcagcgatgacagcaggtagcgcccattttgccatgtgcaggcacggggttgttttacgttcattcatttaacccaatggagagtatctgtgttccaaacatcaaaaagggacagtaaaaatacggtcctataggactgccattgtatacatggtctgttgttgactgaaaggtcattatgtgacatgtgactgtattatccttggccccttttacaagtgaggacaccatggcccagaggagtttaggatgggccccaggtcatgtagctggagagtggcagagccaaggtgtgaatcccgcacctggctctggagccctgttctcagccaccgtgctgggcagcccacacctggcatcctctctgttaggagcaggggcctgcccccacgccctctctgacattgctattcttgctaaaatgaagagacagagctgaggggagagctaaaaagaatgaatctggactggcatcagaaacatgctgcttcccaccagcgagttttgtgcttcactcttgggcccagggcctgcagggtgtgctgtgacctcatctgaagaagcacccacacgggcaggccctgaggggctgcagcagagccacctcgatgcctctcgagccccacccggccctacttatgccttccatctgcaccaacaccgatgagaagcttgcacctccccagtcttccctggttttgctcgtagctggctggctggatccctgcatggattgcccttggacaaccctttgtgccggatgacctggccgccgtgtattgagagcgcacacagaccaggcgctgtgcctgtggtgttcccccaatgcatccgtatggcagccccactttacacaggcggaaactgaggctggttaggggagtgctcagctgcaggacctcgtggccagaccccaggcaggtcagcctccaaagccccagctcttccccaccccaccgcccaacttcttgctggtttcaggggaggagcccgctgtgccaggccctcatctcgtggtggtacccagagcccatgctgtctccccaggagggcactgctcagccgccctctctttctgcaggccagaagcacttgtgtgtcaccagcctcctgatctgccagggtctgctctgggtgggcactgaccagggtgtcatcgtcctgctgcccgtgcctcggctggaaggcatccccaagatcacagggaaaggcatggtctcactcaacgggcactgtgggcctgtggccttcctggctgtggctaccagcatcctggcccctgacatcctgcggagtgaccaggaggaggctgaggggccccgggctgaggaggacaagccagacgggcaggcacacgagcccatgcccgatagccacgtgggccgagagctgacccgcaagaagggcatcctcttgcagtaccgcctgcgctccaccgcacacctcccgggcccgctgctctccatgcgggagccggcgcctgctgatggcgcagctttggagcacagcgaggaggacggctccatttacgagatggccgacgaccccgacatctgggtgcgcagccggccctgcgcccgcgacgcccaccgcaaggagatttgctctgtggccatcatctccggcgggcagggctaccgcaactttggcagcgctctgggcagcagtgggaggcaggccccgtgtggggagacggacagcaccctcctcatctggcaggtgcccttgatgctatagcgcctcccctctcccctcagagggcacagctgcaggcctgaccaaggccacgcccggctctcgtgctctaggacctgcacgggacttgtggatgggcctggactctccagaaactacttgggcagagcaaaggaaaacctcttgttttaaaaaaatttttttcagagtgttttggggaggagttttagggcttggggagagggaggacacatctggaggaaatggccttctttttaaaagcaaaaaacacaaaacctcacaactgcctggcaagcccagtatcacttgtttgggccctagcgggactccaaggcagccacacgcccctcctggaagggtgtgtgcgtgtgagtgtgtgcgagtgtgtgggctggtgtgtgaatatctataaataagtatatatggtgtatattatatgtgtataaataaagtctgtacatattggagctctgggagatgctggaataaaagacaagagttacatctggacttgg

SEQ ID NO: 1453 - DNA, 4080 bp, Homo sapiens
  source 1..4080: mol_type = unassigned DNA; mol_type = unassigned DNA
gggatcccgggagggagcggagcggacctgggcttggtcgcctccaagccggcgggaccgagtgctttaggccgcttgaaagaaagttgctccgacccgggaaaaggagaagatgaaggaagccaaggatgcccgctataccaatgggcacctcttcaccaccatttcagtttcaggcatgaccatgtgctatgcctgtaacaagagcatcacagccaaggaagccctcatctgcccaacctgcaatgtgactatccacaaccgctgtaaagacaccctcgccaactgtaccaaggtcaagcagaagcaacagaaagcggccctgctgaagaacaacaccgccttgcagtccgtttctcttcgaagtaagacaaccatccgggagcggccaagctcggccatctacccctccgacagcttccggcagtccctcctgggctcccgccgtggccgctcctccttgtctttagccaagagtgtttctaccaccaacattgctggacatttcaatgatgagtctcccctggggctgcgccggatcctctcacagtccacagactccctcaacatgcggaaccgaaccctatccgtggaatccctcattgacgaagaggtaatctacagtgagctgatgagtgactttgagatggatgagaaggactttgcagctgactcttggagtcttgctgtggacagcagcttcctgcagcagcataaaaaggaggtgatgaagcagcaagatgtcatctatgagctaatccagacagagctgcaccatgtgaggacactgaagatcatgacccgcctcttccgcacggggatgctggaagagctacacttggagccaggagtggtccagggcctgttcccctgcgtggacgagctcagtgacatccatacacgcttcctcagccagctattagaacgccgacgccaggccctgtgccctggcagcacccggaactttgtcatccatcgcttgggtgatctgctcatcagccagttctcaggtcctagtgcggagcagatgtgtaagacctactcggagttctgcagccgccacagcaaggccttaaagctctataaggagctgtacgcccgagacaaacgcttccagcaattcatccggaaagtgacccgccccgccgtgctcaagcggcacggggtacaggagtgcatcctgctggtgactcagcgcatcaccaagtacccgttactcatcagccgcatcctgcagcattcccacgggatcgaggaggagcgccaggacctgaccacagcactggggctagtgaaggagctgctgtccaatgtggacgagggtatttatcagctggagaaaggggcccgtctgcaggagatctacaaccgcatggaccctcgggcccaaaccccagtgcctggcaagggcccctttggccgagaggaacttctgaggcgcaaactcatccacgatggctgcctgctctggaagacagcgacggggcgcttcaaagatgtgctagtgctgctgatgacagatgtactggtgtttctccaggaaaaggaccagaagtacatctttcctaccctggacaagccttcagtggtatcgctgcagaatctaatcgtacgagacattgccaaccaggagaaagggatgtttctgatcagcgcagccccacctgagatgtacgaggtgcacacagcatcccgggatgaccggagcacctggatccgggtcattcagcagagcgtgcgcacatgcccatccagggaggacttccccctgattgagacagaggatgaggcttacctgcggcgaattaagatggagttgcagcagaaggaccgggcactggtggagctgctgcgagagaaggtcgggctgtttgctgagatgacccatttccaggccgaagaggatggtggcagtgggatggccctgcccaccctgcccaggggccttttccgctctgagtcccttgagtcccctcgtggcgagcggctgctgcaggatgccatccgtgaggtggagggtctgaaagacctgctggtggggccaggagtggaactgctcttgacaccccgagagccagccctgcccttggaaccagacagcggtggtaacacgagtcctggggtcactgccaatggtgaggccagaaccttcaatggctccattgaactctgcagagctgactcagactctagccagagggatcgaaatggaaatcagctgagatcaccgcaagaggaggcgttacagcgattggtcaatctctatggacttctacatggcctacaggcagctgtggcccagcaggacactctgatggaagcccggttccctgagggccctgagcggcgggagaagctgtgccgagccaactctcgggatggggaggctggcagggctggggctgcccctgtggcccctgaaaagcaggccacggaactggcattactgcagcggcaacatgcgctgctgcaggaggagctacggcgctgccggcggctaggtgaagaacgggcaaccgaagctggcagcctggaggcccggctccgggagagtgagcaggcccgggcactgctggagcgtgaggccgaagaggctcgaaggcagctggccgccctgggccagaccgagccactcccagctgaggccccctgggcccgcagacctgtggatcctcggcggcgcagcctccccgcaggcgatgccctgtacttgagtttcaaccccccacagcccagccgaggcactgaccgcctggatctacctgtcactactcgctctgtccatcgaaactttgaggaccgagagaggcaggaactggggagccccgaagagcggctgcaagacagcagtgaccctgacactggcagcgaggaggaaggtagcagccgtctgtctccgccccacagtccacgagactttaccagaatgcaggacatcccggaggagacggagagccgcgacggggaggctgtagcctccgagagctaagggggcccctcccccctgccccgtgccccactgaagaacattactgagggggctaaccttggggactccaatttgccaatgatgagggaacatttgaaagaactgcaaattgtccttgccagctcttgggatccttggatacctggggccatttaagaagctaggggaattaggccacaacaccccctgggacatccgaaagctacaccacagatgccagtggttcatgccttcttcccgcaactttaggaaaatttatttatttattgtttattagttatggggggagaggggagatttaaaggaccagggacatgggaaccaagccatagggatcagagggccttgtccttgaacactactggggtatattcaggctcatccacgcagctgctgggttcttgccctaacggccctcccctgcaacatccgtcttggaggagaggctgcagccacagcaccctactgccctttaaataaaggagggctgtgggcagggccatgtccctttctcctctcccctcaacctcttactgctgttctccctttctccgtccttcatggaagccctgggagataacctggcttcctggagttgatggaataaaggttggggtggccataatggtttgttgggggtgagggaaaaaacccacagggaccagaatgttttgttgttcttttgttttcttttttgtaccaaagtcaactgcacgtgttttatatttttaagagatcgtaggcaattagagatcgaagcctcctatctccacatctctgaagaagttgaggggtgggggagagaatgacttctgccttcatctgcagtaacggggggacctatactgacctcttccccagccatttagaaacaagttctagggtgggttggaaaatctccaagagccctgacctcatcttccacctcagcaaccatgacctgaaacctcagcgtgaatttgggggatttttcagtggaacccttgcccccaaatgtcgaccagcccccaaatgtcgaagaattttcttcttgccaattttgttgtttaaaaaaaaaattcagggaaaattaaaaacctggaactccataa

SEQ ID NO: 1454 - DNA, 4149 bp, Homo sapiens
  source 1..4149: mol_type = unassigned DNA; mol_type = unassigned DNA
gagaccaacgcgtgcgggccgaacccctccccccgccttcccccaacaatacaggacgccggggtccgcgccgcgtcctccctggtccccccgtccgattatgtctcggatcgaatccctcacgcgggcgcggatcgaccggagcagagagctggcgagcaagacccgggaaaaggagaagatgaaggaagccaaggatgcccgctataccaatgggcacctcttcaccaccatttcagtttcaggcatgaccatgtgctatgcctgtaacaagagcatcacagccaaggaagccctcatctgcccaacctgcaatgtgactatccacaaccgctgtaaagacaccctcgccaactgtaccaaggtcaagcagaagcaacagaaagcggccctgctgaagaacaacaccgccttgcagtccgtttctcttcgaagtaagacaaccatccgggagcggccaagctcggccatctacccctccgacagcttccggcagtccctcctgggctcccgccgtggccgctcctccttgtctttagccaagagtgtttctaccaccaacattgctggacatttcaatgatgagtctcccctggggctgcgccggatcctctcacagtccacagactccctcaacatgcggaaccgaaccctatccgtggaatccctcattgacgaagcagaggtaatctacagtgagctgatgagtgactttgagatggatgagaaggactttgcagctgactcttggagtcttgctgtggacagcagcttcctgcagcagcataaaaaggaggtgatgaagcagcaagatgtcatctatgagctaatccagacagagctgcaccatgtgaggacactgaagatcatgacccgcctcttccgcacggggatgctggaagagctacacttggagccaggagtggtccagggcctgttcccctgcgtggacgagctcagtgacatccatacacgcttcctcagccagctattagaacgccgacgccaggccctgtgccctggcagcacccggaactttgtcatccatcgcttgggtgatctgctcatcagccagttctcaggtcctagtgcggagcagatgtgtaagacctactcggagttctgcagccgccacagcaaggccttaaagctctataaggagctgtacgcccgagacaaacgcttccagcaattcatccggaaagtgacccgccccgccgtgctcaagcggcacggggtacaggagtgcatcctgctggtgactcagcgcatcaccaagtacccgttactcatcagccgcatcctgcagcattcccacgggatcgaggaggagcgccaggacctgaccacagcactggggctagtgaaggagctgctgtccaatgtggacgagggtatttatcagctggagaaaggggcccgtctgcaggagatctacaaccgcatggaccctcgggcccaaaccccagtgcctggcaagggcccctttggccgagaggaacttctgaggcgcaaactcatccacgatggctgcctgctctggaagacagcgacggggcgcttcaaagatgtgctagtgctgctgatgacagatgtactggtgtttctccaggaaaaggaccagaagtacatctttcctaccctggacaagccttcagtggtatcgctgcagaatctaatcgtacgagacattgccaaccaggagaaagggatgtttctgatcagcgcagccccacctgagatgtacgaggtgcacacagcatcccgggatgaccggagcacctggatccgggtcattcagcagagcgtgcgcacatgcccatccagggaggacttccccctgattgagacagaggatgaggcttacctgcggcgaattaagatggagttgcagcagaaggaccgggcactggtggagctgctgcgagagaaggtcgggctgtttgctgagatgacccatttccaggccgaagaggatggtggcagtgggatggccctgcccaccctgcccaggggccttttccgctctgagtcccttgagtcccctcgtggcgagcggctgctgcaggatgccatccgtgaggtggagggtctgaaagacctgctggtggggccaggagtggaactgctcttgacaccccgagagccagccctgcccttggaaccagacagcggtggtaacacgagtcctggggtcactgccaatggtgaggccagaaccttcaatggctccattgaactctgcagagctgactcagactctagccagagggatcgaaatggaaatcagctgagatcaccgcaagaggaggcgttacagcgattggtcaatctctatggacttctacatggcctacaggcagctgtggcccagcaggacactctgatggaagcccggttccctgagggccctgagcggcgggagaagctgtgccgagccaactctcgggatggggaggctggcagggctggggctgcccctgtggcccctgaaaagcaggccacggaactggcattactgcagcggcaacatgcgctgctgcaggaggagctacggcgctgccggcggctaggtgaagaacgggcaaccgaagctggcagcctggaggcccggctccgggagagtgagcaggcccgggcactgctggagcgtgaggccgaagaggctcgaaggcagctggccgccctgggccagaccgagccactcccagctgaggccccctgggcccgcagacctgtggatcctcggcggcgcagcctccccgcaggcgatgccctgtacttgagtttcaaccccccacagcccagccgaggcactgaccgcctggatctacctgtcactactcgctctgtccatcgaaactttgaggaccgagagaggcaggaactggggagccccgaagagcggctgcaagacagcagtgaccctgacactggcagcgaggaggaaggtagcagccgtctgtctccgccccacagtccacgagactttaccagaatgcaggacatcccggaggagacggagagccgcgacggggaggctgtagcctccgagagctaagggggcccctcccccctgccccgtgccccactgaagaacattactgagggggctaaccttggggactccaatttgccaatgatgagggaacatttgaaagaactgcaaattgtccttgccagctcttgggatccttggatacctggggccatttaagaagctaggggaattaggccacaacaccccctgggacatccgaaagctacaccacagatgccagtggttcatgccttcttcccgcaactttaggaaaatttatttatttattgtttattagttatggggggagaggggagatttaaaggaccagggacatgggaaccaagccatagggatcagagggccttgtccttgaacactactggggtatattcaggctcatccacgcagctgctgggttcttgccctaacggccctcccctgcaacatccgtcttggaggagaggctgcagccacagcaccctactgccctttaaataaaggagggctgtgggcagggccatgtccctttctcctctcccctcaacctcttactgctgttctccctttctccgtccttcatggaagccctgggagataacctggcttcctggagttgatggaataaaggttggggtggccataatggtttgttgggggtgagggaaaaaacccacagggaccagaatgttttgttgttcttttgttttcttttttgtaccaaagtcaactgcacgtgttttatatttttaagagatcgtaggcaattagagatcgaagcctcctatctccacatctctgaagaagttgaggggtgggggagagaatgacttctgccttcatctgcagtaacggggggacctatactgacctcttccccagccatttagaaacaagttctagggtgggttggaaaatctccaagagccctgacctcatcttccacctcagcaaccatgacctgaaacctcagcgtgaatttgggggatttttcagtggaacccttgcccccaaatgtcgaccagcccccaaatgtcgaagaattttcttcttgccaattttgttgtttaaaaaaaaaattcagggaaaattaaaaacctggaactcca

SEQ ID NO: 1455 - DNA, 4438 bp, Homo sapiens
  source 1..4438: mol_type = unassigned DNA; mol_type = unassigned DNA
acattgtaggggctgctggccatggaagggcactgtctctctgctttgacaatggtccccttgaacaagttcctttagctctggaggagactgcaagcatcgggatgcccaggccccaaggaggccctcttcctgcagatccgagaaggactggacacctttctgggactgcagcaccagggtggctacgcctcccggctggatcaggattcctgtcatccatctgctggccctttggaccactcggccactggcatgctttccaagtctgtacccgtgagtggcatcaactgtctcttggaccgttcggatacagatgggaatgtatcccagtcctctgccattgacctcaggaaacgctgcagccagctggaaggacattcaggtacccgggtaggctcctccctgcgacagaccttcagcttcctctcgggcatgaccggaaaggccaagacccgggaaaaggagaagatgaaggaagccaaggatgcccgctataccaatgggcacctcttcaccaccatttcagtttcaggcatgaccatgtgctatgcctgtaacaagagcatcacagccaaggaagccctcatctgcccaacctgcaatgtgactatccacaaccgctgtaaagacaccctcgccaactgtaccaaggtcaagcagaagcaacagaaagcggccctgctgaagaacaacaccgccttgcagtccgtttctcttcgaagtaagacaaccatccgggagcggccaagctcggccatctacccctccgacagcttccggcagtccctcctgggctcccgccgtggccgctcctccttgtctttagccaagagtgtttctaccaccaacattgctggacatttcaatgatgagtctcccctggggctgcgccggatcctctcacagtccacagactccctcaacatgcggaaccgaaccctatccgtggaatccctcattgacgaagcagaggtaatctacagtgagctgatgagtgactttgagatggatgagaaggactttgcagctgactcttggagtcttgctgtggacagcagcttcctgcagcagcataaaaaggaggtgatgaagcagcaagatgtcatctatgagctaatccagacagagctgcaccatgtgaggacactgaagatcatgacccgcctcttccgcacggggatgctggaagagctacacttggagccaggagtggtccagggcctgttcccctgcgtggacgagctcagtgacatccatacacgcttcctcagccagctattagaacgccgacgccaggccctgtgccctggcagcacccggaactttgtcatccatcgcttgggtgatctgctcatcagccagttctcaggtcctagtgcggagcagatgtgtaagacctactcggagttctgcagccgccacagcaaggccttaaagctctataaggagctgtacgcccgagacaaacgcttccagcaattcatccggaaagtgacccgccccgccgtgctcaagcggcacggggtacaggagtgcatcctgctggtgactcagcgcatcaccaagtacccgttactcatcagccgcatcctgcagcattcccacgggatcgaggaggagcgccaggacctgaccacagcactggggctagtgaaggagctgctgtccaatgtggacgagggtatttatcagctggagaaaggggcccgtctgcaggagatctacaaccgcatggaccctcgggcccaaaccccagtgcctggcaagggcccctttggccgagaggaacttctgaggcgcaaactcatccacgatggctgcctgctctggaagacagcgacggggcgcttcaaagatgtgctagtgctgctgatgacagatgtactggtgtttctccaggaaaaggaccagaagtacatctttcctaccctggacaagccttcagtggtatcgctgcagaatctaatcgtacgagacattgccaaccaggagaaagggatgtttctgatcagcgcagccccacctgagatgtacgaggtgcacacagcatcccgggatgaccggagcacctggatccgggtcattcagcagagcgtgcgcacatgcccatccagggaggacttccccctgattgagacagaggatgaggcttacctgcggcgaattaagatggagttgcagcagaaggaccgggcactggtggagctgctgcgagagaaggtcgggctgtttgctgagatgacccatttccaggccgaagaggatggtggcagtgggatggccctgcccaccctgcccaggggccttttccgctctgagtcccttgagtcccctcgtggcgagcggctgctgcaggatgccatccgtgaggtggagggtctgaaagacctgctggtggggccaggagtggaactgctcttgacaccccgagagccagccctgcccttggaaccagacagcggtggtaacacgagtcctggggtcactgccaatggtgaggccagaaccttcaatggctccattgaactctgcagagctgactcagactctagccagagggatcgaaatggaaatcagctgagatcaccgcaagaggaggcgttacagcgattggtcaatctctatggacttctacatggcctacaggcagctgtggcccagcaggacactctgatggaagcccggttccctgagggccctgagcggcgggagaagctgtgccgagccaactctcgggatggggaggctggcagggctggggctgcccctgtggcccctgaaaagcaggccacggaactggcattactgcagcggcaacatgcgctgctgcaggaggagctacggcgctgccggcggctaggtgaagaacgggcaaccgaagctggcagcctggaggcccggctccgggagagtgagcaggcccgggcactgctggagcgtgaggccgaagaggctcgaaggcagctggccgccctgggccagaccgagccactcccagctgaggccccctgggcccgcagacctgtggatcctcggcggcgcagcctccccgcaggcgatgccctgtacttgagtttcaaccccccacagcccagccgaggcactgaccgcctggatctacctgtcactactcgctctgtccatcgaaactttgaggaccgagagaggcaggaactggggagccccgaagagcggctgcaagacagcagtgaccctgacactggcagcgaggaggaaggtagcagccgtctgtctccgccccacagtccacgagactttaccagaatgcaggacatcccggaggagacggagagccgcgacggggaggctgtagcctccgagagctaagggggcccctcccccctgccccgtgccccactgaagaacattactgagggggctaaccttggggactccaatttgccaatgatgagggaacatttgaaagaactgcaaattgtccttgccagctcttgggatccttggatacctggggccatttaagaagctaggggaattaggccacaacaccccctgggacatccgaaagctacaccacagatgccagtggttcatgccttcttcccgcaactttaggaaaatttatttatttattgtttattagttatggggggagaggggagatttaaaggaccagggacatgggaaccaagccatagggatcagagggccttgtccttgaacactactggggtatattcaggctcatccacgcagctgctgggttcttgccctaacggccctcccctgcaacatccgtcttggaggagaggctgcagccacagcaccctactgccctttaaataaaggagggctgtgggcagggccatgtccctttctcctctcccctcaacctcttactgctgttctccctttctccgtccttcatggaagccctgggagataacctggcttcctggagttgatggaataaaggttggggtggccataatggtttgttgggggtgagggaaaaaacccacagggaccagaatgttttgttgttcttttgttttcttttttgtaccaaagtcaactgcacgtgttttatatttttaagagatcgtaggcaattagagatcgaagcctcctatctccacatctctgaagaagttgaggggtgggggagagaatgacttctgccttcatctgcagtaacggggggacctatactgacctcttccccagccatttagaaacaagttctagggtgggttggaaaatctccaagagccctgacctcatcttccacctcagcaaccatgacctgaaacctcagcgtgaatttgggggatttttcagtggaacccttgcccccaaatgtcgaccagcccccaaatgtcgaagaattttcttcttgccaattttgttgtttaaaaaaaaaattcagggaaaattaaaaacctggaactcc

SEQ ID NO: 1456 - DNA, 883 bp, Homo sapiens
  source 1..883: mol_type = unassigned DNA; mol_type = unassigned DNA
cccccaccaaagtgctggactgggttcttaaaggggccacctgaagcaggactttttcccacactgaagtcaccaactgacagcagaaacaggtcccccatctttgggatatctcccagttctgctcccagtagaatgtctaagaaatctttgatgaccagtgcaatctgtggaggttatacacttggaggaagggacagcacacgctgatggtttgcagtggtgggaagaccatctgatccagaggcaggaagataagtaaaatgacttcttagagccccttcctgctttcccagctcccctcccccatctcaagcatctgatcccagacctatttcagaatctcctatctctttgctcagtggaagcagtgatatgacatgatgtgatctcatttgagggctaaataaagccattgtgtgagacccagccctggcctctcccctgcaccatttcctgagctcaagaggctaagggaaaatgggaggggggctaggagagttaatctaatggaaaaagaagcaacacgatgatgggacccccagtttgaatttcagacagtggaggagggaatattgctaggagggagttgaggaagccttgttaaacctcatctctttgagggacagaataaaaagtattggcatcatagcatagccatttagaaacaagttctagggtgggttggaaaatctccaagagccctgacctcatcttccacctcagcaaccatgacctgaaacctcagcgtgaatttgggggatttttcagtggaacccttgcccccaaatgtcgaccagcccccaaatgtcgaagaattttcttcttgccaattttgttgtttaaaaaaaaaattcagggaaaattaaaaacctggaactcc

SEQ ID NO: 1457 - DNA, 1877 bp, Homo sapiens
  source 1..1877: mol_type = unassigned DNA; mol_type = unassigned DNA
cgcaagaggaggcgttacagcgattggtcaatctctatggacttctacatggcctacaggcagctgtggcccagcaggacactctgatggaagcccggttccctgagggccctgagcggcgggagaagctgtgccgagccaactctcgggatggggaggctggcagggctggggctgcccctgtggcccctgaaaagcaggccacggaactggcattactgcagcggcaacatgcgctgctgcaggaggagctacggcgctgccggcggctaggtgaagaacgggcaaccgaagctggcagcctggaggcccggctccgggagagtgagcaggcccgggcactgctggagcgtgaggccgaagaggctcgaaggcagctggccgccctgggccagaccgagccactcccagctgaggccccctgggcccgcagacctgtggatcctcggcggcgcagcctccccgcaggcgatgccctgtacttgagtttcaaccccccacagcccagccgaggcactgaccgcctggatctacctgtcactactcgctctgtccatcgaaactttgaggaccgagagaggcaggaactggggagccccgaagagcggctgcaagacagcagtgaccctgacactggcagcgaggaggaaggtagcagccgtctgtctccgccccacagtccacgaggtgagaccctggcggagacatggaccagagactttaccagaatgcaggacatcccggaggagacggagagccgcgacggggaggctgtagcctccgagagctaagggggcccctcccccctgccccgtgccccactgaagaacattactgagggggctaaccttggggactccaatttgccaatgatgagggaacatttgaaagaactgcaaattgtccttgccagctcttgggatccttggatacctggggccatttaagaagctaggggaattaggccacaacaccccctgggacatccgaaagctacaccacagatgccagtggttcatgccttcttcccgcaactttaggaaaatttatttatttattgtttattagttatggggggagaggggagatttaaaggaccagggacatgggaaccaagccatagggatcagagggccttgtccttgaacactactggggtatattcaggctcatccacgcagctgctgggttcttgccctaacggccctcccctgcaacatccgtcttggaggagaggctgcagccacagcaccctactgccctttaaataaaggagggctgtgggcagggccatgtccctttctcctctcccctcaacctcttactgctgttctccctttctccgtccttcatggaagccctgggagataacctggcttcctggagttgatggaataaaggttggggtggccataatggtttgttgggggtgagggaaaaaacccacagggaccagaatgttttgttgttcttttgttttcttttttgtaccaaagtcaactgcacgtgttttatatttttaagagatcgtaggcaattagagatcgaagcctcctatctccacatctctgaagaagttgaggggtgggggagagaatgacttctgccttcatctgcagtaacggggggacctatactgacctcttccccagccatttagaaacaagttctagggtgggttggaaaatctccaagagccctgacctcatcttccacctcagcaaccatgacctgaaacctcagcgtgaatttgggggatttttcagtggaacccttgcccccaaatgtcgaccagcccccaaatgtcgaagaattttcttcttgccaattttgttgtttaaaaaaaaaattcagggaaaattaaaaacctggaactc

SEQ ID NO: 1458 - DNA, 2958 bp, Homo sapiens
  source 1..2958: mol_type = unassigned DNA; mol_type = unassigned DNA
atgtctcggatcgaatccctcacgcgggcgcggatcgaccggagcagagagctggcgagcaagacccgggaaaaggagaagatgaaggaagccaaggatgcccgctataccaatgggcacctcttcaccaccatttcagtttcaggcatgaccatgtgctatgcctgtaacaagagcatcacagccaaggaagccctcatctgcccaacctgcaatgtgactatccacaaccgctgtaaagacaccctcgccaactgtaccaaggtcaagcagaagcaacagaaagcggccctgctgaagaacaacaccgccttgcagtccgtttctcttcgaagtaagacaaccatccgggagcggccaagctcggccatctacccctccgacagcttccggcagtccctcctgggctcccgccgtggccgctcctccttgtctttagccaagagtgtttctaccaccaacattgctggacatttcaatgatgagtctcccctggggctgcgccggatcctctcacagtccacagactccctcaacatgcggaaccgaaccctatccgtggaatccctcattgacgaagaggtaatctacagtgagctgatgagtgactttgagatggatgagaaggactttgcagctgactcttggagtcttgctgtggacagcagcttcctgcagcagcataaaaaggaggtgatgaagcagcaagatgtcatctatgagctaatccagacagagctgcaccatgtgaggacactgaagatcatgacccgcctcttccgcacggggatgctggaagagctacacttggagccaggagtggtccagggcctgttcccctgcgtggacgagctcagtgacatccatacacgcttcctcagccagctattagaacgccgacgccaggccctgtgccctggcagcacccggaactttgtcatccatcgcttgggtgatctgctcatcagccagttctcaggtcctagtgcggagcagatgtgtaagacctactcggagttctgcagccgccacagcaaggccttaaagctctataaggagctgtacgcccgagacaaacgcttccagcaattcatccggaaagtgacccgccccgccgtgctcaagcggcacggggtacaggagtgcatcctgctggtgactcagcgcatcaccaagtacccgttactcatcagccgcatcctgcagcattcccacgggatcgaggaggagcgccaggacctgaccacagcactggggctagtgaaggagctgctgtccaatgtggacgagggtatttatcagctggagaaaggggcccgtctgcaggagatctacaaccgcatggaccctcgggcccaaaccccagtgcctggcaagggcccctttggccgagaggaacttctgaggcgcaaactcatccacgatggctgcctgctctggaagacagcgacggggcgcttcaaagatgtgctagtgctgctgatgacagatgtactggtgtttctccaggaaaaggaccagaagtacatctttcctaccctggacaagccttcagtggtatcgctgcagaatctaatcgtacgagacattgccaaccaggagaaagggatgtttctgatcagcgcagccccacctgagatgtacgaggtgcacacagcatcccgggatgaccggagcacctggatccgggtcattcagcagagcgtgcgcacatgcccatccagggaggacttccccctgattgagacagaggatgaggcttacctgcggcgaattaagatggagttgcagcagaaggaccgggcactggtggagctgctgcgagagaaggtcgggctgtttgctgagatgacccatttccaggccgaagaggatggtggcagtgggatggccctgcccaccctgcccaggggccttttccgctctgagtcccttgagtcccctcgtggcgagcggctgctgcaggatgccatccgtgaggtggagggtctgaaagacctgctggtggggccaggagtggaactgctcttgacaccccgagagccagccctgcccttggaaccagacagcggtggtaacacgagtcctggggtcactgccaatggtgaggccagaaccttcaatggctccattgaactctgcagagctgactcagactctagccagagggatcgaaatggaaatcagctgagatcaccgcaagaggaggcgttacagcgattggtcaatctctatggacttctacatggcctacaggcagctgtggcccagcaggacactctgatggaagcccggttccctgagggccctgagcggcgggagaagctgtgccgagccaactctcgggatggggaggctggcagggctggggctgcccctgtggcccctgaaaagcaggccacggaactggcattactgcagcggcaacatgcgctgctgcaggaggagctacggcgctgccggcggctaggtgaagaacgggcaaccgaagctggcagcctggaggcccggctccgggagagtgagcaggcccgggcactgctggagcgtgaggccgaagaggctcgaaggcagctggccgccctgggccagaccgagccactcccagctgaggccccctgggcccgcagacctgtggatcctcggcggcgcagcctccccgcaggcgatgccctgtacttgagtttcaaccccccacagcccagccgaggcactgaccgcctggatctacctgtcactactcgctctgtccatcgaaactttgaggaccgagagaggcaggaactggggagccccgaagagcggctgcaagacagcagtgaccctgacactggcagcgaggaggaaggtagcagccgtctgtctccgccccacagtccacgagactttaccagaatgcaggacatcccggaggagacggagagccgcgacggggaggctgtagcctccgagagctaa

SEQ ID NO: 1459 - DNA, 742 bp, Homo sapiens
  source 1..742: mol_type = unassigned DNA; mol_type = unassigned DNA
ccgagacaaacgcttccagcaattcatccggaaagtgacccgccccgccgtgctcaagcggcacggggtacaggagtgcatcctgctggtgactcagcgcatcaccaagtacccgttactcatcagccgcatcctgcagcattcccacgggatcgaggaggagcgccaggacctgaccacagcactggggctagtgaaggagctgctgtccaatgtggacgagggtatttatcagctggagaaaggggcccgtctgcaggagatctacaaccgcatggaccctcgggcccaaaccccagtgcctggcaagggcccctttggccgagaggaacttctgaggcgcaaactcatccacgatggctgcctgctctggaagacagcgacggggcgcttcaaagatgtgctagtgctgctgatgacagatgtactggtgtttctccaggaaaaggaccagaagtacatctttcctaccctggacaagccttcagtggtatcgctgcagaatctaatcgtacgagacattgccaaccaggagaaagggatgtttctgatcagcgcagccccacctgagatgtacgaggtgcacacagcatcccgggatgaccggagcacctggatccgggtcattcagcagagcgtgcgcactggagttgcagcagaaggaccgggcactggtggagctgctgcgagagaaggtcgggctgtttgctgagatgacccatttccaggccgaagaggatgg

SEQ ID NO: 1460 - DNA, 638 bp, Homo sapiens
  source 1..638: mol_type = unassigned DNA; mol_type = unassigned DNA
gtgagtgaaactggttgagccgttccccatgccaacccccggtgccagggatcgaggaggagcgccaggacctgaccacagcactggggctagtgaaggagctgctgtccaatgtggacgagggtatttatcagctggagaaaggggcccgtctgcaggagatctacaaccgcatggaccctcgggcccaaaccccagtgcctggcaagggcccctttggccgagaggaacttctgaggcgcaaactcatccacgatggctgcctgctctggaagacagcgacggggcgcttcaaagatgtgctagtgctgctgatgacagatgtactggtgtttctccaggaaaaggaccagaagtacatctttcctaccctggacaagccttcagtggtatcgctgcagaatctaatcgtacgagacattgccaaccaggagaaagggatgtttctgatcagcgcagccccacctgagatgtacgaggtgcacacagcatcccgggatgaccggagcacctggatccgggtcattcagcagagcgtgcgcacatgcccatccagggaggacttccccctgattgagacagaggatgaggcttacctgcggcgaattaagatggagttgcagcagaaggaccgggca

SEQ ID NO: 1461 - DNA, 820 bp, Homo sapiens
  source 1..820: mol_type = unassigned DNA; mol_type = unassigned DNA
ctttgtcatccatcgcttgggtgatctgctcatcagccagttctcaggtcctagtgcggagcagatgtgtaagacctactcggagttctgcagccgccacagcaaggccttaaagctctataaggagctgtacgcccgagacaaacgcttccagcaattcatccgggtgagcggacctctccagatcccatgctcatggcccaaacccaccctccccaactcatgggggtagtgcctgtgagctgcacccacatggaggtcaggcattcgccacccgtgcagaccatccatacacagatcctgtcagcagtaacccctcagaatgctagagcacgttgtggtagtttcccaagtactttttgctccttcagttggtcctcacaacaaacctgtggcgttgttatccccattttccagatatgtcacctaggcaagcatgaggtaaatggccacgccagggccagcaccagagctcaggccccaggcctttctgttgccctcccctctggccctgagccctgcctcctcccttgtagaaagtgacccgccccgccgtgctcaagcggcacggggtacaggagtgcatcctgctggtgactcagcgcatcaccaagtacccgttactcatcagccgcatcctgcagcattcccacggtgagtaggcaggcccaggagagggccactgggagacggccacctggggtgaggaaaggctcggtatgaccacaggaagggtggggtcgggtgtgaaaccctgggcagcctctaaaggtggaatcaagacacgatgggaactggggtgtgagtgaaactggttgag

SEQ ID NO: 1462 - DNA, 372 bp, Homo sapiens
  source 1..372: mol_type = unassigned DNA; mol_type = unassigned DNA
caacagaaagcggccctgctgaagaacaacaccgccttgcagtccgtttctcttcgaagtaagaacatttcaatgatgagtctcccctggggctgcgccggatcctctcacagtccacagactccctcaacatgcggaaccgaaccctatccgtggaatccctcattgacgaagaggtaatctacagtgagctgatgagtgactttgagatggatgagaaggactttgcagctgactcttggagtcttgctgtggacagcagcttcctgcagcagcataaaaaggaggtgatgaagcagcaagatgtcatctatgagctaatccagacagagctgcaccatgtgaggacactgaagatcatgacccgcctct

SEQ ID NO: 1463 - DNA, 892 bp, Homo sapiens
  source 1..892: mol_type = unassigned DNA; mol_type = unassigned DNA
gatccagcgtttagttctcctttgatttcctctccctctggccacccctgcccccaatcgtaaaaggggtcagtctgctcaggcctgctttgatgggaccccgaaggccaggaaggaactggtcctgggttttctaagagctgggggcggatggaattctcctgcctgcgggtctttaaagactgagacccgggaaaaggagaagatgaaggaagccaaggatgcccgctataccaatgggcacctcttcaccaccatttcagtttcaggcatgaccatgtgctatgcctgtaacaagagcatcacagccaaggaagccctcatctgcccaacctgcaatgtgactatccacaaccgctgtaaagacaccctcgccaactgtaccaaggtcaagcagaagcaacagaaagcggccctgctgaagaacaacaccgccttgcagtccgtttctcttcgaagtaagacaaccatccgggagcggccaagctcggccatctacccctccgacagcttccggcagtccctcctgggctcccgccgtggccgctcctccttgtctttagccaagagtgtttctaccaccaacattgctggacatttcaatgatgagtctcccctggggctgcgccggatcctctcacagtccacagactccctcaacatgcggaaccgaaccctatccgtggaatccctcattgacgaagcagaggtaatctacagtgagctgatgagtgactttgagatggatgagaaggactttgcagctgactcttggagtcttgctgtggacagcagcttcctgcagcagcataaaaaggaggtgatgaagcagcaagatgtcatctatgagctaatccagacagagctgcaccatgtgaggacactgaagatc

SEQ ID NO: 1464 - DNA, 764 bp, Homo sapiens
  source 1..764: mol_type = unassigned DNA; mol_type = unassigned DNA
gacggtgctgggatcccgggagggagcggagcggacctgggcttggtcgcctccaagccggcgggaccgagtgctttaggccgcttgaaagaaagttgctccgacccgggaaaaggagaagatgaaggaagccaaggatgcccgctataccaatgggcacctcttcaccaccatttcagtttcaggcatgaccatgtgctatgcctgtaacaagagcatcacagccaaggaagccctcatctgcccaacctgcaatgtgactatccacaaccgctgtaaagacaccctcgccaactgtaccaaggtcaagcagaagcaacagaaagcggccctgctgaagaacaacaccgccttgcagtccgtttctcttcgaagtaagacaaccatccgggagcggccaagctcggccatctacccctccgacagcttccggcagtccctcctgggctcccgccgtggccgctcctccttgtctttagccaagagtgtttctaccaccaacattgctggacatttcaatgatgagtctcccctggggctgcgccggatcctctcacagtccacagactccctcaacatgcggaaccgaaccctatccgtggaatccctcattgacgaagcagaggtaatctacagtgagctgatgagtgactttgagatggatgagaaggactttgcagctgactcttggagtcttgctgtggacagcagcttcctgcagcagcataaaaaggaggtgatgaagcagcaagatgtcatctatg

SEQ ID NO: 1465 - DNA, 668 bp, Homo sapiens
  source 1..668: mol_type = unassigned DNA; mol_type = unassigned DNA
ctccccccgccttcccccaacaatacaggacgccggggtccgcgccgcgtcctccctggtccccccgtccgattatgtctcggatcgaatccctcacgcgggcgcggatcgaccggagcagagagctggcgagcaagacccgggaaaaggagaagatgaaggaagccaaggatgcccgctataccaatgggcacctcttcaccaccatttcagtttcaggcatgaccatgtgctatgcctgtaacaagagcatcacagccaaggaagccctcatctgcccaacctgcaatgtgactatccacaaccgctgtaaagacaccctcgccaactgtaccaaggtcaagcagaagcaacagaaagcggccctgctgaagaacaacaccgccttgcagtccgtttctcttcgaagtaagaacatttcaatgatgagtctcccctggggctgcgccggatcctctcacagtccacagactccctcaacatgcggaaccgaaccctatccgtggaatccctcattgacgaagcagaggtaatctacagtgagctgatgagtgactttgagatggatgagaaggactttgcagctgactcttggagtcttgctgtggacagcagcttcctgcagcagcataaaaaggaggtgatgaagcagcaagatgtcatctatg

SEQ ID NO: 1466 - DNA, 692 bp, Homo sapiens
  source 1..692: mol_type = unassigned DNA; mol_type = unassigned DNA
aaagcgctggtgagctggcaccctccgcttcgcctgctctcccctcctctctgcgcatcttccccctagcacagagaagagagtacagcagctcgggggtgagcagagctagggctgggaaggtggagtgaggacgcagagacctagagccagggagatgagtggcaacaggaggcagcccagccgtaggggccagacccgggaaaaggagaagatgaaggaagccaaggatgcccgctataccaatgggcacctcttcaccaccatttcagtttcaggcatgaccatgtgctatgcctgtaacaagagcatcacagccaaggaagccctcatctgcccaacctgcaatgtgactatccacaaccgctgtaaagacaccctcgccaactgtaccaaggtcaagcagaagcaacagaaagcggccctgctgaagaacaacaccgccttgcagtccgtttctcttcgaagtaagacaaccatccgggagcggccaagctcggccatctacccctccgacagcttccggcagtccctcctgggctcccgccgtggccgctcctccttgtctttagccaagagtgtttctaccaccaacattgctggacatttcaatgatgagtctcccctggggctgcgccggatcctctcacagtccacagactccctcaacatgcggaaccgaaccctatccg

SEQ ID NO: 1467 - DNA, 2176 bp, Homo sapiens
  source 1..2176: mol_type = unassigned DNA; mol_type = unassigned DNA
aggagaacagtggcggagaagcaaggctgagaaagggaaggcagagcgggaggagcctaggagggagaccctgagaagagaagggaggacatagagagagcaggagacaggaggaggatgcgaaaaatggatgattggggatggggaggatgcatgaggggagaagggattgaccccaagacctctgggctctggacatcatcaggcaaacctggagcttgggaagagaggcaggaaagagaaggatcttgggcccaggcactgcagccccatgccctctgtccctgcactgttgactcagcccctccacacttcccctttctttctaccattttctgccccaagcaccaggcccgtgcatctcttcccctcctccacctctcagctgctggcgtggcctcgtggcctcggctgagtcagtactggtctcctagagtccgggctgagtgcttcccgctgaactgtaatcctctgtccccagtccaggtcctctgacttggggcttctaccctcagccatctggatcctgatttttgatttctgagagcctgggaaaccttggagggagtggtcttctcagcttctagtcctgctccaagagcggagggaaaatccagagatcagagtcacaactaaggaaggtcctagaatagtgggaagagtgatatccccctcttctcaccttctcaggctttttgggaatcacaggggcttgaagagggacagattggaggtcagggagaatgacttgacttgcagaggcaggggcactgggggaaatgggagacagcagagatggaaaatgcggctcagaggctccgaggaaggtgtgcgccatctgcggagatcaacactgaaggatggagggtagatgtcagaaaggacttcctaggatgggagagaccagttgggtaaggagcaatagaggaaactctcctaggttttaactctggaaagtagtatgagagggataaaagttagactgcaggagagattttccgctggaagcaaccaagatggctggctgagcttccttacttaaagatcccagagtggaagagtgacccaaaggcagctagctgcctttgcctcaagacccgggaaaaggagaagatgaaggaagccaaggatgcccgctataccaatgggcacctcttcaccaccatttcagtttcaggcatgaccatgtgctatgcctgtaacaagagcatcacagccaaggaagccctcatctgcccaagtaagttgtttggaccctgagagtcacccagactcggtgcccactgaccctgatcttttcatctgttttttctgcctggatccatgagggtcactcttctctctgatccccagctgggcccaaatgccagggccagttgcttgatcccttgctccctgtcctcactctgaggggtggtggctgttggaatatggcataagccggactatctgggaatgtgggggaggggaggctgtgctggctcctcttgcagctgtcatccaccaggcaccccccttgctccccgaacagctgctaagggttaggggaactgattggagaaggagcaggaatgttgtatgtgtggagggggtggggtggggggtgacagaggaactgggtggaaagctgccagccttgcagctggctctgcctgtcttcctgcgcagagctgggcattcaggacttcacagtccccttgcccctttctttctattgactatgggtggagcctgaaatctctgctgtttcaagcagaagatgtgattaggacccttcatctcaaatttctagtgagaaagagggaatgtagcagggatgtgtgtgttgaggggcaggggttagaattcctgcccttcatccacatctgagtgtagtcctgtctttagggagtataagccaggaattctttccttccccagtacacagagggctcctgctgccccctctccctcaattcctcctgaagttatggcagagatgcctctgattagagcaggattgaaggtattgtgacctgctactgaatagcggacaaaagctctagcctgtaaatccctatgaaacttggggaaggaacccccagaaaggaccagtgatgggcaacccgctcgggtccccttctacgctgtgggagctttgtcattttgctcttcacaataaagcttgctaccgctc

SEQ ID NO: 1468 - DNA, 693 bp, Homo sapiens
  source 1..693: mol_type = unassigned DNA; mol_type = unassigned DNA
tcccgtgtactgaagatccagcgtttagttctcctttgatttcctctccctctggccacccctgcccccaatcgtaaaaggggtcagtctgctcaggcctgctttgatgggaccccgaaggccaggaaggaactggtcctgggttttctaagagctgggggcggatggaattctcctgcctgcgggtctttaaagactgagacccgggaaaaggagaagatgaaggaagccaaggatgcccgctataccaatgggcacctcttcaccaccatttcagtttcaggcatgaccatgtgctatgcctgtaacaagagcatcacagccaaggaagccctcatctgcccaagtaagttgtttggaccctgagagtcacccagactcggtgcccactgaccctgatcttttcatctgttttttctgcctggatccatgagggtcactcttctctctgatccccagctgggcccaaatgccagggccagttgcttgatcccttgctccctgtcctcactctgaggggtggtggctgttggaatatggcataagccggactatctgggaatgtgggggaggggaggctgtgctggctcctcttgcagctgtcatccaccaggcaccccccttgctccccgaacagctgctaagggttaggggaactgattggagaaggagcaggaatgttgtatgtgtgga

SEQ ID NO: 1469 - DNA, 571 bp, Homo sapiens
  source 1..571: mol_type = unassigned DNA; mol_type = unassigned DNA
agtttgggtctgggctgtgcttatgccaacaggaagggctgggctgggggcaagcaacagggctgggctgaggcgaggcagtgttcctccctggtgcccgtcactggccactggatacagacggtagtggtggcgatgtgtgtttcaggaggagactgcaagcatcgggatgcccaggccccaaggaggccctcttcctgcagatccgagaaggactggacacctttctgggactgcagcaccagggtggctacgcctcccggctggatcaggattcctgtcatccatctgctggccctttggaccactcggccactggcatgctttccaagtctgtacccgtgagtggcatcaactgtctcttggaccgttcggatacagatgggaatgtatcccagtcctctgccattgacctcaggaaacgctgcagccagctggaaggacattcaggtacccgggtaggctcctccctgcgacagaccttcagcttcctctcgggcatgaccggaaaggccaagacccgggaaaaggagaagatgaaggaagccaaggatgcccgctataccaatgg

SEQ ID NO: 1470 - DNA, 420 bp, Homo sapiens
  source 1..420: mol_type = unassigned DNA; mol_type = unassigned DNA
cccagcaatcagagcctccaggcccaggaggatgaaaagaacatggagacgagaggctccaaatggagtagccctctgccagctcacatccctctttcaggggctgcagcttggacatcccaagactggccaggttacagcccacaggaggcgaggagtgctcccctttacctcaggaagtccgatgtccgccccagctgtcttctgccccagggaaagcagtgaaggaggagactgcaagcatcgggatgcccaggccccaaggaggccctcttcctgcagatccgagaaggactggacacctttctgggactgcagcaccagggtggctacgcctcccggctggatcaggattcctgtcatccatctgctggccctttggaccactcggccactggcatgctttccaagtctgtaccc

SEQ ID NO: 1471 - DNA, 490 bp, Homo sapiens
  source 1..490: mol_type = unassigned DNA; mol_type = unassigned DNA
ggcactcctaagtccagctgactgtgacacacttctagtcccaaggtttcagagttctagaaccctgctcactcttatttcctgctgacgcagactggtctgtgtgtgtctcccacgaacagagccgtcccagacgtgttctgagcaggtggagacaaggtgcccgtgaggccacactggcctctgcctttctgcagttgaatccagagaacaactggaggaagaagagatggggaaataaaggaggggaatggctcgcatgctgtacccctccaaaggtcaggggctttccgggcccacggccgaaaacaaagacgtcttcagaagacatagttgggggcctggcagggagctcgagggcccactgaatacgaggagactgcaagcatcgggatgcccaggccccaaggaggccctcttcctgcagatccgagaaggactggacacctttctgggactgcagcaccagggtggctacgcctcccggctg

SEQ ID NO: 1472 - DNA, 1645 bp, Homo sapiens
  source 1..1645: mol_type = unassigned DNA; mol_type = unassigned DNA
atggccctgcccaccctgcccaggggccttttccgctctgagtcccttgagtcccctcgtggcgagcggctgctgcaggatgccatccgtgaggtggagggtctgaaagacctgctggtggggccaggagtggaactgctcttgacaccccgagagccagccctgcccttggaaccagacagcggtggtaacacgagtcctggggtcactgccaatggtgaggccagaaccttcaatggctccattgaactctgcagagctgactcagactctagccagagggatcgaaatggaaatcagctgagatcaccgcaagaggaggcgttacagcgattggtcaatctctatggacttctacatggcctacaggcagctgtggcccagcaggacactctgatggaagcccggttccctgagggccctgagcggcgggagaagctgtgccgagccaactctcgggatggggaggctggcagggctggggctgcccctgtggcccctgaaaagcaggccacggaactggcattactgcagcggcaacatgcgctgctgcaggaggagctacggcgctgccggcggctaggtgaagaacgggcaaccgaagctggcagcctggaggcccggctccgggagagtgagcaggcccgggcactgctggagcgtgaggccgaagaggctcgaaggcagctggccgccctgggccagaccgagccactcccagctgaggccccctgggcccgcagacctgtggatcctcggcggcgcagctccccgcaggcgatgccctgtacttgagtttcaaccccccacagcccagccgaggcactgaccgcctggatctacctgtcactactcgctctgtccatcgaaactttgaggaccgagagaggcaggaactggggagccccgaagagcggctgcaagacagcagtgaccctgacactggcagcgaggaggaaggtagcagccgtctgtctccgccccacagtccacgagactttaccagaatgcaggacatcccggaggagacggagagccgcgacggggaggctgtagcctccgagagctaagggggcccctcccccctgccccgtgccccactgaagaacattactgagggggctaaccttggggactccaatttgccaatgatgagggaacatttgaaagaactgcaaattgtccttgccagctcttgggatccttggatacctggggccatttaagaagctaggggaattaggccacaacaccccctgggacatccgaaagctacaccacagatgccagtggttcatgccttcttcccgcaactttaggaaaatttatttatttattgtttattagttatggggggagaggggagatttaaaggaccagggacatgggaaccaagccatagggatcagagggccttgtccttgaacactactggggtatattcaggctcatccacgcagctgctgggttcttgccctaacggccctcccctgcaacatccgtcttggaggagaggctgcagccacagcaccctactgccctttaaataaaggagggctgtgggcagggccatgtccctttctcctctcccctcaacctcttactgctgttctccctttctccgtccttcatggaagccctggga

SEQ ID NO: 1473 - DNA, 5254 bp, Homo sapiens
  source 1..5254: mol_type = unassigned DNA; mol_type = unassigned DNA
agaactctgcgctactgcccacgcatctcacaaagtctactacgccgcgcgttctcggtttcaacgcacctccaggattcagggcttcctaagctgcaattcagcagggctcccttgcttgttctcactctgtgcccccggcaacgaccccgcgcgcctacactcccgtgccgcctcagctactagtccgcaacttctagccccaaaacgctggagctcagaacccagctcaggcaagactaactcggtgttgctcctcccggcgctgacttcgaggcccggctatggacggcgagagcgaggtggatttttctagcaacagcataacccctttgtggcggaggcggtcgattcctcagccccaccaggttctgggccggagcaagccgaggccccagtcctaccagagccccaacgggttactaattacggatttcccggtggaggacggagggacgctcctcgcagcgcagattcccgcccaggtgcccaccgcctcggacagcaggacggtacataggagccccctgcttctgggcgcccagcggagagcggtggccaatggtgggacggcatccccggagtacagggctgcctctcctcgacttcgacggcccaagtcacccaagctccccaaagcggtgcctggcggctccccgaaatccccagcaaatggcgcggtgaccttgcctgcgccgccgccgccgccggttctgcgccccccgcggactcctaacgcgcccgccccctgcacccccgaggaggaccttactgggttgactgccagcccggtgccttcgcccactgcaaatggccttgccgctaataacgactctcctgggtcaggttcgcagtccggccggaaggcaaaggaccccgaacgggggctctttcctgggccccagaaaagttcttcggaacaaaaactccccctccaaaggctgccctcccaggagaacgagctcctcgagaatccttccgtggttttgagtacaaacagccccgccgccctcaaagtggggaagcagcagatcattccgaagagtctggcctcggaaattaaaataagtaaatccaacaatcaaaatgtggagccccacaagagactcctcaaggtgcgcagcatggtggagggcctaggaggacccctgggtcacgcaggggaggagagtgaggtcgataacgacgtggatagcccagggtctctgcggagaggcttgcggtccacgtcttatcgcagggcagtggtcagtggctttgattttgacagtcctaccagctcgaagaagaagaacagaatgtcccagcctgttctgaaagtggtgatggaagacaaggagaagttttccagtctgggaaggataaagaaaaaaatgctgaaaggacaaggaacatttgatggggaagaaaatgctgtcctgtatcaaaactacaaggaaaaggcccttgacattgattctgatgaagagtcagagcccaaagaacagaagtcagatgaaaaaattgtgattcaccataagccattgagatccacatggagccaactctctgcggtgaaaagaaagggattatctcagacagtaagccaggaggaaagaaagagacaagaggctatctttgaagtcatatcctctgaacattcatatttactcagcttggagatcttgatacgaatgtttaaaaattctaaagaactgagtgatacaatgactaaaaccgagaggcaccatcttttctccaatattacagatgtctgtgaggcaagcaaaaagttctttatagagttggaagcaagacatcagaataatatcttcatagatgacataagtgacattgtggaaaaacacacagcatccacatttgacccatatgtgaaatactgcacaaatgaagtctaccaacaacgaacactacaaaaattgttagctaccaatccatcctttaaggaagtattgtcaaggattgagtcccatgaagactgtaggaacttacccatgatctcttttctcattctccccatgcagagggtgacccgccttcccctgctgatggatactatctgtcaaaaaacacctaaggactctccgaagtatgaagtctgcaaaagagccttgaaggaagttagcaagttggttcgactatgcaatgagggcgcccggaagatggaaaggactgagatgatgtacacaattaactcccagctggaatttaaaattaagccttttcctttagtctcctcttcccggtggttggtaaaaagaggtgaattgacagcctatgttgaagacactgtgcttttctcaagaaggacatccaaacagcaagtctacttctttctctttaacgatgtgctcattatcaccaagaagaagagtgaagaaagttacaacgtcaatgattattccttaagagatcagctattggtggaatcttgtgacaatgaagagcttaattcttctccagggaagaacagctccacaatgctctattcaagacagagctctgccagtcacctctttactctgacagtccttagtaaccacgcgaatgagaaagtggagatgctactaggagctgagacgcagagcgagcgagcccgctggataactgccctgggacacagcagcgggaagccgcctgcagaccgaacctcactgacccaggtggaaatcgttaggtcatttactgctaagcagccagatgaactctccctgcaggtggctgacgtcgtcctcatctatcaacgtgtcagcgatggctggtatgagggggaacgactacgagatggagaaagaggctggtttcctatggaatgtgccaaggagataacatgtcaagctacaattgataagaatgtggagagaatgggacgcttgctaggactggagaccaacgtgtagtctctcagatggtcttttgttactgcaagatttgcacgacacttaccgggctggttggttctgggctagttttattgttaattttgtcacagcctatttaattaaaagaacgaaaacacttgcctttaagcttgccaggttgttctgctctctcatgagaagagcttggatacagtgagtttgcacagctcagtttttacctaaccacacacttgcagacctcctgaggtacacagaatagctgagcagttcacttcagggatcaggtcatctctgctcctcctagtttcaccatgttctggcaataaaaaacacatattatatcctggttttctctatccttgcattactaaggtgactgtctctctttatacatccttgtatggttctcccagtattagcaagattgtatatctgtaaagaatgtccagttttgtaaatatttccctgcctttttttttctttttttacatctgattttaatgcttcgttaacttcaaaaggaactggtagagttcagaaggtgagctgttgtttttctaaacctcttcccaggaaggggacattgacacttgaatttttgtcacctttttcctcattagaaggaaagtagaaagccttactttaggatttttaaaaaaaaatccatctcaccccatattgttcttaaataagtatagactaattaacctaagctacctttaacaacgtagaatttagatgggttcatatatgtgagaaaaacctgaatataggacaggggtcctacttttttccccacctctgtcgcccaggctagagtatagtggtgtgatcttggcccactgcaacctctgcttcctaggttcaagtgattctcctgcctcagcctcccaagtagctgggattgtaagagtatgccaccacgcccagctactttttgtatttttagtagagacagggtttcatcatgttggccaggatggtctcttaactcctgccctcaagtgatccaccagagaggagatcctcggcctccccaagtgctgggattataggcatgagccaccgtgcccagcctactttctaattaattaaaaaaaaaaaaaaaaaaaaaaaaaaaccttcccaaatgagctgataaaaaactgacgtgaggctgctttgccttcaataatacctagttttcagctgttccaactcgtttccaaatagaaattagctggaacacactacagtaatctcaaggaagggaaaattaggccttaaaagataccaagaagtcagcatggtacccaattgaaaccttttgaccttagtgggaattcattctatttgcactaaaagccttaacttgctgtattcagagtccctcttaactgtgagtttctatagaactttactttttccactagtgcacagagagagaaaggttatcttaatagtcggtttcatggagatgaaggatgggagattaagaggggggaaatgatttttactggcagctatattccctctctgttctatttgctttaacaaagggataaaacctggcaaagtgtacattattggaggactcaaatctgtatgtgacatgtcccaactactgtccgctaactagttatccaaattgtaaagctacagaagcccagttgaggggtaagtgtgcctggctcacacagcctgcaccctgtcacctcggcaatgagccagtgtggggcactggggacttctaacccttggattgctctttttgacctgtgcataccttctaattgtaaaatatatttcagaccgtgagtaccttgagatctgagcaactgtgttaatgaagtaatagcaatggtccacagtgaaagatgtgttggggtttgcaaaacaagcattccgtcacctctttaataatgtcacagactttttaaaagagaggctatcaagttgtaatataatctgtcatgttttatttaggaaggaaggtaaatttgtgcttgcacggggatcattttgtattatttttgctaatacccagttgaagctaaaaagcaactatttgaatcctgtgaattaatttataagaatgttaaacagctttggaaatacatgcatcttatgaatcatagccttatttagcaagatcaatgttaaagtgttgttatatggcaagtatttaacacattcacagtgtttgtttgatttcaactgtgaattgtcttaagttttttcaaacctagttgtttctatggacacctgctctgaattgtacattgacttcattactaaagaacaaaaatgttcatttttgtcccagtaaattgagactgcttgtacactttcagaaaaatatgtgaatttataaagattttgtagatacttgt

SEQ ID NO: 1474 - DNA, 3929 bp, Homo sapiens
  source 1..3929: mol_type = unassigned DNA; mol_type = unassigned DNA
aagtgtgggggcgtagtcaggcgtgggggcgggccggcgccggcgccgcggtcggcggcagcgctctcctaagctctcgcggctgcgcttcggtcccggacccgggccacccacggggtagtgggtgctcctcggccccggacattgcaagccccagaaggcaagactaactcggtgttgctcctcccggcgctgacttcgaggcccggctatggacggcgagagcgaggtggatttttctagcaacagcataacccctttgtggcggaggcggtcgattcctcagccccaccaggttctgggccggagcaagccgaggccccagtcctaccagagccccaacgggttactaattacggatttcccggtggaggacggagggacgctcctcgcagcgcagattcccgcccaggtgcccaccgcctcggacagcaggacggtacataggagccccctgcttctgggcgcccagcggagagcggtggccaatggtgggacggcatccccggagtacagggctgcctctcctcgacttcgacggcccaagtcacccaagctccccaaagcggtgcctggcggctccccgaaatccccagcaaatggcgcggtgaccttgcctgcgccgccgccgccgccggttctgcgccccccgcggactcctaacgcgcccgccccctgcacccccgaggaggaccttactgggttgactgccagcccggtgccttcgcccactgcaaatggccttgccgctaataacgactctcctgggtcaggttcgcagtccggccggaaggcaaaggaccccgaacgggggctctttcctgggccccagaaaagttcttcggaacaaaaactccccctccaaaggctgccctcccaggagaacgagctcctcgagaatccttccgtggttttgagtacaaacagccccgccgccctcaaagtggggaagcagcagatcattccgaagagtctggcctcggaaattaaaataagtaaatccaacaatcaaaatgtggagccccacaagagactcctcaaggtgcgcagcatggtggagggcctaggaggacccctgggtcacgcaggggaggagagtgaggtcgataacgacgtggatagcccagggtctctgcggagaggcttgcggtccacgtcttatcgcagggcagtggtcagtggctttgattttgacagtcctaccagctcgaagaagaagaacagaatgtcccagcctgttctgaaagtggtgatggaagacaaggagaagttttccagtctgggaaggataaagaaaaaaatgctgaaaggacaaggaacatttgatggggaagaaaatgctgtcctgtatcaaaactacaaggaaaaggcccttgacattgattctgatgaagagtcagagcccaaagaacagaagtcagatgaaaaaattgtgattcaccataagccattgagatccacatggagccaactctctgcggtgaaaagaaagggattatctcagacagtaagccaggaggaaagaaagagacaagaggctatctttgaagtcatatcctctgaacattcatatttactcagcttggagatcttgatacgaatgtttaaaaattctaaagaactgagtgatacaatgactaaaaccgagaggcaccatcttttctccaatattacagatgtctgtgaggcaagcaaaaagttctttatagagttggaagcaagacatcagaataatatcttcatagatgacataagtgacattgtggaaaaacacacagcatccacatttgacccatatgtgaaatactgcacaaatgaagtctaccaacaacgaacactacaaaaattgttagctaccaatccatcctttaaggaagtattgtcaaggattgagtcccatgaagactgtaggaacttacccatgatctcttttctcattctccccatgcagagggtgacccgccttcccctgctgatggatactatctgtcaaaaaacacctaaggactctccgaagtatgaagtctgcaaaagagccttgaaggaagttagcaagttggttcgactatgcaatgagggcgcccggaagatggaaaggactgagatgatgtacacaattaactcccagctggaatttaaaattaagccttttcctttagtctcctcttcccggtggttggtaaaaagaggtgaattgacagcctatgttgaagacactgtgcttttctcaagaaggacatccaaacagcaagtctacttctttctctttaacgatgtgctcattatcaccaagaagaagagtgaagaaagttacaacgtcaatgattattccttaagagatcagctattggtggaatcttgtgacaatgaagagcttaattcttctccagggaagaacagctccacaatgctctattcaagacagagctctgccagtcacctctttactctgacagtccttagtaaccacgcgaatgagaaagtggagatgctactaggagctgagacgcagagcgagcgagcccgctggataactgccctgggacacagcagcgggaagccgcctgcagaccgaacctcactgacccaggtggaaatcgttaggtcatttactgctaagcagccagatgaactctccctgcaggtggctgacgtcgtcctcatctatcaacgtgtcagcgatggctggtatgagggggaacgactacgagatggagaaagaggctggtttcctatggaatgtgccaaggagataacatgtcaagctacaattgataagaatgtggagagaatgggacgcttgctaggactggagaccaacgtgtagtctctcagatggtcttttgttactgcaagatttgcacgacacttaccgggctggttggttctgggctagttttattgttaattttgtcacagcctatttaattaaaagaacgaaaacacttgcctttaagcttgccaggttgttctgctctctcatgagaagagcttggatacagtgagtttgcacagctcagtttttacctaaccacacacttgcagacctcctgaggtacacagaatagctgagcagttcacttcagggatcaggtcatctctgctcctcctagtttcaccatgttctggcaataaaaaacacatattatatcctggttttctctatccttgcattactaaggtgactgtctctctttatacatccttgtatggttctcccagtattagcaagattgtatatctgtaaagaatgtccagttttgtaaatatttccctgcctttttttttctttttttacatctgattttaatgcttcgttaacttcaaaaggaactggtagagttcagaaggtgagctgttgtttttctaaacctcttcccaggaaggggacattgacacttgaatttttgtcacctttttcctcattagaaggaaagtagaaagccttactttaggatttttaaaaaaaaatccatctcaccccatattgttcttaaataagtatagactaattaacctaagctacctttaacaacgtagaatttagatgggttcatatatgtgagaaaaacctgaatataggacaggggtcctacttttttccccacctctgtcgcccaggctagagtatagtggtgtgatcttggcccactgcaacctctgcttcctaggttcaagtgattctcctgcctcagcctcccaagtagctgggattgtaagagtatgccaccacgcccagctactttttgtatttttagtagagacagggtttcatcatgttggccaggatggtctcttaactcctgccctcaagtgatccaccagagaggagatcctcggcctccccaagtgctgggattataggcatgagccaccgtgcccagcctactttctaattaattaaaaaaaaaaaaaaaaaaaaaaaaaaa

SEQ ID NO: 1475 - DNA, 3781 bp, Homo sapiens
  source 1..3781: mol_type = unassigned DNA; mol_type = unassigned DNA
ggcagcgctctcctaagctctcgcggctgcgcttcggtcccggacccgggccacccacggggtagtgggtgctcctcggccccggacattgcaagccccagaaggcaagactaactcggtgttgctcctcccggcgctgacttcgaggcccggctatggacggcgagagcgaggtggatttttctagcaacagcataacccctttgtggcggaggcggtcgattcctcagccccaccaggttctgggccggagcaagccgaggccccagtcctaccagagccccaacgggttactaattacggatttcccggtggaggacggagggacgctcctcgcagcgcagattcccgcccaggtgcccaccgcctcggacagcaggacggtacataggagccccctgcttctgggcgcccagcggagagcggtggccaatggtgggacggcatccccggagtacagggctgcctctcctcgacttcgacggcccaagtcacccaagctccccaaagcggtgcctggcggctccccgaaatccccagcaaatggcgcggtgaccttgcctgcgccgccgccgccgccggttctgcgccccccgcggactcctaacgcgcccgccccctgcacccccgaggaggaccttactgggttgactgccagcccggtgccttcgcccactgcaaatggccttgccgctaataacgactctcctgggtcaggttcgcagtccggccggaaggcaaaggaccccgaacgggggctctttcctgggccccagaaaagttcttcggaacaaaaactccccctccaaaggctgccctcccaggagaacgagctcctcgagaatccttccgtggttttgagtacaaacagccccgccgccctcaaagtggggaagcagcagatcattccgaagagtctggcctcggaaattaaaataagtaaatccaacaatcaaaatgtggagccccacaagagactcctcaaggtgcgcagcatggtggagggcctaggaggacccctgggtcacgcaggggaggagagtgaggtcgataacgacgtggatagcccagggtctctgcggagaggcttgcggtccacgtcttatcgcagggcagtggtcagtggctttgattttgacagtcctaccagctcgaagaagaagaacagaatgtcccagcctgttctgaaagtggtgatggaagacaaggagaagttttccagtctgggaaggataaagaaaaaaatgctgaaaggacaaggaacatttgatggggaagaaaatgctgtcctgtatcaaaactacaaggaaaaggcccttgacattgattctgatgaagagtcagagcccaaagaacagaagtcagatgaaaaaattgtgattcaccataagccattgagatccacatggagccaactctctgcggtgaaaagaaagggattatctcagacagtaagccaggaggaaagaaagagacaagaggctatctttgaagtcatatcctctgaacattcatatttactcagcttggagatcttgatacgaatgtttaaaaattctaaagaactgagtgatacaatgactaaaaccgagaggcaccatcttttctccaatattacagatgtctgtgaggcaagcaaaaagttctttatagagttggaagcaagacatcagaataatatcttcatagatgacataagtgacattgtggaaaaacacacagcatccacatttgacccatatgtgaaatactgcacaaatgaagtctaccaacaacgaacactacaaaaattgttagctaccaatccatcctttaaggaagtattgtcaaggattgagtcccatgaagactgtaggaacttacccatgatctcttttctcattctccccatgcagagggtgacccgccttcccctgctgatggatactatctgtcaaaaaacacctaaggactctccgaagtatgaagtctgcaaaagagccttgaaggaagttagcaagttggttcgactatgcaatgagggcgcccggaagatggaaaggactgagatgatgtacacaattaactcccagctggaatttaaaattaagccttttcctttagtctcctcttcccggtggttggtaaaaagaggtgaattgacagcctatgttgaagacactgtgcttttctcaagaaggacatccaaacagcaagtctacttctttctctttaacgatgtgctcattatcaccaagaagaagagtgaagaaagttacaacgtcaatgattattccttaagagatcagctattggtggaatcttgtgacaatgaagagcttaattcttctccagggaagaacagctccacaatgctctattcaagacagagctctgccagtcacctctttactctgacagtccttagtaaccacgcgaatgagaaagtggagatgctactaggagctgagacgcagagcgagcgagcccgctggataactgccctgggacacagcagcgggaagccgcctgcagaccgaacctgtggctgacgtcgtcctcatctatcaacgtgtcagcgatggctggtatgagggggaacgactacgagatggagaaagaggctggtttcctatggaatgtgccaaggagataacatgtcaagctacaattgataagaatgtggagagaatgggacgcttgctaggactggagaccaacgtgtagtctctcagatggtcttttgttactgcaagatttgcacgacacttaccgggctggttggttctgggctagttttattgttaattttgtcacagcctatttaattaaaagaacgaaaacacttgcctttaagcttgccaggttgttctgctctctcatgagaagagcttggatacagtgagtttgcacagctcagtttttacctaaccacacacttgcagacctcctgaggtacacagaatagctgagcagttcacttcagggatcaggtcatctctgctcctcctagtttcaccatgttctggcaataaaaaacacatattatatcctggttttctctatccttgcattactaaggtgactgtctctctttatacatccttgtatggttctcccagtattagcaagattgtatatctgtaaagaatgtccagttttgtaaatatttccctgcctttttttttctttttttacatctgattttaatgcttcgttaacttcaaaaggaactggtagagttcagaaggtgagctgttgtttttctaaacctcttcccaggaaggggacattgacacttgaatttttgtcacctttttcctcattagaaggaaagtagaaagccttactttaggatttttaaaaaaaaatccatctcaccccatattgttcttaaataagtatagactaattaacctaagctacctttaacaacgtagaatttagatgggttcatatatgtgagaaaaacctgaatataggacaggggtcctacttttttccccacctctgtcgcccaggctagagtatagtggtgtgatcttggcccactgcaacctctgcttcctaggttcaagtgattctcctgcctcagcctcccaagtagctgggattgtaagagtatgccaccacgcccagctactttttgtatttttagtagagacagggtttcatcatgttggccaggatggtctcttaactcctgccctcaagtgatccaccagagaggagatcctcggcctccccaagtgctgggattataggcatgagccaccgtgcccagcctactttctaattaatt

SEQ ID NO: 1476 - DNA, 2353 bp, Homo sapiens
  source 1..2353: mol_type = unassigned DNA; mol_type = unassigned DNA
ggctgcgcttcggtcccggacccgggccacccacggggtagtgggtgctcctcggccccggacattgcaagccccagaaggcaagactaactcggtgttgctcctcccggcgctgacttcgaggcccggctatggacggcgagagcgaggtggatttttctagcaacagcataacccctttgtggcggaggcggtcgattcctcagccccaccaggttctgggccggagcaagccgaggccccagtcctaccagagccccaacgggttactaattacggatttcccggtggaggacggagggacgctcctcgcagcgcagattcccgcccaggtgcccaccgcctcggacagcaggacggtacataggagccccctgcttctgggcgcccagcggagagcggtggccaatggtgggacggcatccccggagtacagggctgcctctcctcgacttcgacggcccaagtcacccaagctccccaaagcggtgcctggcggctccccgaaatccccagcaaatggcgcggtgaccttgcctgcgccgccgccgccgccggttctgcgccccccgcggactcctaacgcgcccgccccctgcacccccgaggaggaccttactgggttgactgccagcccggtgccttcgcccactgcaaatggccttgccgctaataacgactctcctgggtcaggttcgcagtccggccggaaggcaaaggaccccgaacgggggctctttcctgggccccagaaaagttcttcggaacaaaaactccccctccaaaggctgccctcccaggagaacgagctcctcgagaatccttccgtggttttgagtacaaacagccccgccgccctcaaagtggggaagcagcagatcattccgaagagtctggcctcggaaattaaaataagtaaatccaacaatcaaaatgtggagccccacaagagactcctcaaggtgcgcagcatggtggagggcctaggaggacccctgggtcacgcaggggaggagagtgaggtcgataacgacgtggatagcccagggtctctgcggagaggcttgcggtccacgtcttatcgcagggcagtggtcagtggctttgattttgacagtcctaccagctcgaagaagaagaacagaatgtcccagcctgttctgaaagtggtgatggaagacaaggagaagttttccagtctgggaaggataaagaaaaaaatgctgaaaggacaaggaacatttgatggggaagaaaatgctgtcctgtatcaaaactacaaggaaaaggcccttgacattgattctgatgaagagtcagagcccaaagaacagaagtcagatgaaaaaattgtgattcaccataagccattgagatccacatggagccaactctctgcggtgaagagaaaggttatcttaatagtcggtttcatggagatgaaggatgggagattaagaggggggaaatgatttttactggcagctatattccctctctgttctatttgctttaacaaagggataaaacctggcaaagtgtacattattggaggactcaaatctgtatgtgacatgtcccaactactgtccgctaactagttatccaaattgtaaagctacagaagcccagttgaggggtaagtgtgcctggctcacacagcctgcaccctgtcacctcggcaatgagccagtgtggggcactggggacttctaacccttggattgctctttttgacctgtgcataccttctaattgtaaaatatatttcagaccgtgagtaccttgagatctgagcaactgtgttaatgaagtaatagcaatggtccacagtgaaagatgtgttggggtttgcaaaacaagcattccgtcacctctttaataatgtcacagactttttaaaagagaggctatcaagttgtaatataatctgtcatgttttatttaggaaggaaggtaaatttgtgcttgcacggggatcattttgtattatttttgctaatacccagttgaagctaaaaagcaactatttgaatcctgtgaattaatttataagaatgttaaacagctttggaaatacatgcatcttatgaatcatagccttatttagcaagatcaatgttaaagtgttgttatatggcaagtatttaacacattcacagtgtttgtttgatttcaactgtgaattgtcttaagttttttcaaacctagttgtttctatggacacctgctctgaattgtacattgacttcattactaaagaacaaaaatgttcatttttgtcccagtaaattgagactgcttgtacactttcagaaaaatatgtgaatttataaagattttgtagatactt

SEQ ID NO: 1477 - DNA, 3106 bp, Homo sapiens
  source 1..3106: mol_type = unassigned DNA; mol_type = unassigned DNA
agcttttactttcagtaaacttaaaaggatttcaatttagctttggtcactgggtttttctccttttgtagccttttcctttagtctcctcttcccggtggttggtaaaaagaggtgaattgacagcctatgttgaagacactgtgcttttctcaagaaggacatccaaacagcaagtctacttctttctctttaacgatgtgctcattatcaccaagaagaagagtgaagaaagttacaacgtcaatgattattccttaagagatcagctattggtggaatcttgtgacaatgaagagcttaattcttctccagggaagaacagctccacaatgctctattcaagacagagctctgccagtcacctctttactctgacagtccttagtaaccacgcgaatgagaaagtggagatgctactaggagctgagacgcagagcgagcgagcccgctggataactgccctgggacacagcagcgggaagccgcctgcagaccgaacctcactgacccaggtggaaatcgttaggtcatttactgctaagcagccagatgaactctccctgcaggtggctgacgtcgtcctcatctatcaacgtgtcagcgatggctggtatgagggggaacgactacgagatggagaaagaggctggtttcctatggaatgtgccaaggagataacatgtcaagctacaattgataagaatgtggagagaatgggacgcttgctaggactggagaccaacgtgtagtctctcagatggtcttttgttactgcaagatttgcacgacacttaccgggctggttggttctgggctagttttattgttaattttgtcacagcctatttaattaaaagaacgaaaacacttgcctttaagcttgccaggttgttctgctctctcatgagaagagcttggatacagtgagtttgcacagctcagtttttacctaaccacacacttgcagacctcctgaggtacacagaatagctgagcagttcacttcagggatcaggtcatctctgctcctcctagtttcaccatgttctggcaataaaaaacacatattatatcctggttttctctatccttgcattactaaggtgactgtctctctttatacatccttgtatggttctcccagtattagcaagattgtatatctgtaaagaatgtccagttttgtaaatatttccctgcctttttttttctttttttacatctgattttaatgcttcgttaacttcaaaaggaactggtagagttcagaaggtgagctgttgtttttctaaacctcttcccaggaaggggacattgacacttgaatttttgtcacctttttcctcattagaaggaaagtagaaagccttactttaggatttttaaaaaaaaatccatctcaccccatattgttcttaaataagtatagactaattaacctaagctacctttaacaacgtagaatttagatgggttcatatatgtgagaaaaacctgaatataggacaggggtcctacttttttccccacctctgtcgcccaggctagagtatagtggtgtgatcttggcccactgcaacctctgcttcctaggttcaagtgattctcctgcctcagcctcccaagtagctgggattgtaagagtatgccaccacgcccagctactttttgtatttttagtagagacagggtttcatcatgttggccaggatggtctcttaactcctgccctcaagtgatccaccagagaggagatcctcggcctccccaagtgctgggattataggcatgagccaccgtgcccagcctactttctaattaattaaaaaaaaaaaaaaaaaaaaaaaaaaaccttcccaaatgagctgataaaaaactgacgtgaggctgctttgccttcaataatacctagttttcagctgttccaactcgtttccaaatagaaattagctggaacacactacagtaatctcaaggaagggaaaattaggccttaaaagataccaagaagtcagcatggtacccaattgaaaccttttgaccttagtgggaattcattctatttgcactaaaagccttaacttgctgtattcagagtccctcttaactgtgagtttctatagaactttactttttccactagtgcacagagagagaaaggttatcttaatagtcggtttcatggagatgaaggatgggagattaagaggggggaaatgatttttactggcagctatattccctctctgttctatttgctttaacaaagggataaaacctggcaaagtgtacattattggaggactcaaatctgtatgtgacatgtcccaactactgtccgctaactagttatccaaattgtaaagctacagaagcccagttgaggggtaagtgtgcctggctcacacagcctgcaccctgtcacctcggcaatgagccagtgtggggcactggggacttctaacccttggattgctctttttgacctgtgcataccttctaattgtaaaatatatttcagaccgtgagtaccttgagatctgagcaactgtgttaatgaagtaatagcaatggtccacagtgaaagatgtgttggggtttgcaaaacaagcattccgtcacctctttaataatgtcacagactttttaaaagagaggctatcaagttgtaatataatctgtcatgttttatttaggaaggaaggtaaatttgtgcttgcacggggatcattttgtattatttttgctaatacccagttgaagctaaaaagcaactatttgaatcctgtgaattaatttataagaatgttaaacagctttggaaatacatgcatcttatgaatcatagccttatttagcaagatcaatgttaaagtgttgttatatggcaagtatttaacacattcacagtgtttgtttgatttcaactgtgaattgtcttaagttttttcaaacctagttgtttctatggacacctgctctgaattgtacattgacttcattactaaagaacaaaaatgttcatttttgtcccagtaaattgagactgcttgtacactttcagaaaaatatgtgaatttataaagattttgtagatacttgt

SEQ ID NO: 1478 - DNA, 3106 bp, Homo sapiens; identical to SEQ ID NO: 1477
  source 1..3106: mol_type = unassigned DNA; mol_type = unassigned DNA

SEQ ID NO: 1479 - DNA, 2353 bp, Homo sapiens; identical to SEQ ID NO: 1476
  source 1..2353: mol_type = unassigned DNA; mol_type = unassigned DNA

SEQ ID NO: 1480 - DNA, 3781 bp, Homo sapiens; identical to SEQ ID NO: 1475
  source 1..3781: mol_type = unassigned DNA; mol_type = unassigned DNA

SEQ ID NO: 1481 - DNA, 3857 bp, Homo sapiens
  source 1..3857: mol_type = unassigned DNA; mol_type = unassigned DNA
ccgcggtcggcggcagcgctctcctaagctctcgcggctgcgcttcggtcccggacccgggccacccacggggtagtgggtgctcctcggccccggacattgcaagccccagaaggcaagactaactcggtgttgctcctcccggcgctgacttcgaggcccggctatggacggcgagagcgaggtggatttttctagcaacagcataacccctttgtggcggaggcggtcgattcctcagccccaccaggttctgggccggagcaagccgaggccccagtcctaccagagccccaacgggttactaattacggatttcccggtggaggacggagggacgctcctcgcagcgcagattcccgcccaggtgcccaccgcctcggacagcaggacggtacataggagccccctgcttctgggcgcccagcggagagcggtggccaatggtgggacggcatccccggagtacagggctgcctctcctcgacttcgacggcccaagtcacccaagctccccaaagcggtgcctggcggctccccgaaatccccagcaaatggcgcggtgaccttgcctgcgccgccgccgccgccggttctgcgccccccgcggactcctaacgcgcccgccccctgcacccccgaggaggaccttactgggttgactgccagcccggtgccttcgcccactgcaaatggccttgccgctaataacgactctcctgggtcaggttcgcagtccggccggaaggcaaaggaccccgaacgggggctctttcctgggccccagaaaagttcttcggaacaaaaactccccctccaaaggctgccctcccaggagaacgagctcctcgagaatccttccgtggttttgagtacaaacagccccgccgccctcaaagtggggaagcagcagatcattccgaagagtctggcctcggaaattaaaataagtaaatccaacaatcaaaatgtggagccccacaagagactcctcaaggtgcgcagcatggtggagggcctaggaggacccctgggtcacgcaggggaggagagtgaggtcgataacgacgtggatagcccagggtctctgcggagaggcttgcggtccacgtcttatcgcagggcagtggtcagtggctttgattttgacagtcctaccagctcgaagaagaagaacagaatgtcccagcctgttctgaaagtggtgatggaagacaaggagaagttttccagtctgggaaggataaagaaaaaaatgctgaaaggacaaggaacatttgatggggaagaaaatgctgtcctgtatcaaaactacaaggaaaaggcccttgacattgattctgatgaagagtcagagcccaaagaacagaagtcagatgaaaaaattgtgattcaccataagccattgagatccacatggagccaactctctgcggtgaaaagaaagggattatctcagacagtaagccaggaggaaagaaagagacaagaggctatctttgaagtcatatcctctgaacattcatatttactcagcttggagatcttgatacgaatgtttaaaaattctaaagaactgagtgatacaatgactaaaaccgagaggcaccatcttttctccaatattacagatgtctgtgaggcaagcaaaaagttctttatagagttggaagcaagacatcagaataatatcttcatagatgacataagtgacattgtggaaaaacacacagcatccacatttgacccatatgtgaaatactgcacaaatgaagtctaccaacaacgaacactacaaaaattgttagctaccaatccatcctttaaggaagtattgtcaaggattgagtcccatgaagactgtaggaacttacccatgatctcttttctcattctccccatgcagagggtgacccgccttcccctgctgatggatactatctgtcaaaaaacacctaaggactctccgaagtatgaagtctgcaaaagagccttgaaggaagttagcaagttggttcgactatgcaatgagggcgcccggaagatggaaaggactgagatgatgtacacaattaactcccagctggaatttaaaattaagccttttcctttagtctcctcttcccggtggttggtaaaaagaggtgaattgacagcctatgttgaagacactgtgcttttctcaagaaggacatccaaacagcaagtctacttctttctctttaacgatgtgctcattatcaccaagaagaagagtgaagaaagttacaacgtcaatgattattccttaagagatcagctattggtggaatcttgtgacaatgaagagcttaattcttctccagggaagaacagctccacaatgctctattcaagacagagctctgccagtcacctctttactctgacagtccttagtaaccacgcgaatgagaaagtggagatgctactaggagctgagacgcagagcgagcgagcccgctggataactgccctgggacacagcagcgggaagccgcctgcagaccgaacctcactgacccaggtggaaatcgttaggtcatttactgctaagcagccagatgaactctccctgcaggtggctgacgtcgtcctcatctatcaacgtgtcagcgatggctggtatgagggggaacgactacgagatggagaaagaggctggtttcctatggaatgtgccaaggagataacatgtcaagctacaattgataagaatgtggagagaatgggacgcttgctaggactggagaccaacgtgtagtctctcagatggtcttttgttactgcaagatttgcacgacacttaccgggctggttggttctgggctagttttattgttaattttgtcacagcctatttaattaaaagaacgaaaacacttgcctttaagcttgccaggttgttctgctctctcatgagaagagcttggatacagtgagtttgcacagctcagtttttacctaaccacacacttgcagacctcctgaggtacacagaatagctgagcagttcacttcagggatcaggtcatctctgctcctcctagtttcaccatgttctggcaataaaaaacacatattatatcctggttttctctatccttgcattactaaggtgactgtctctctttatacatccttgtatggttctcccagtattagcaagattgtatatctgtaaagaatgtccagttttgtaaatatttccctgcctttttttttctttttttacatctgattttaatgcttcgttaacttcaaaaggaactggtagagttcagaaggtgagctgttgtttttctaaacctcttcccaggaaggggacattgacacttgaatttttgtcacctttttcctcattagaaggaaagtagaaagccttactttaggatttttaaaaaaaaatccatctcaccccatattgttcttaaataagtatagactaattaacctaagctacctttaacaacgtagaatttagatgggttcatatatgtgagaaaaacctgaatataggacaggggtcctacttttttccccacctctgtcgcccaggctagagtatagtggtgtgatcttggcccactgcaacctctgcttcctaggttcaagtgattctcctgcctcagcctcccaagtagctgggattgtaagagtatgccaccacgcccagctactttttgtatttttagtagagacagggtttcatcatgttggccaggatggtctcttaactcctgccctcaagtgatccaccagagaggagatcctcggcctccccaagtgctgggattataggcatgagccaccgtgcccagcctactttctaattaatt

SEQ ID NO: 1482 - DNA, 3975 bp, Homo sapiens
  source 1..3975: mol_type = unassigned DNA; mol_type = unassigned DNA
agaactctgcgctactgcccacgcatctcacaaagtctactacgccgcgcgttctcggtttcaacgcacctccaggattcagggcttcctaagctgcaattcagcagggctcccttgcttgttctcactctgtgcccccggcaacgaccccgcgcgcctacactcccgtgccgcctcagctactagtccgcaacttctagccccaaaacgctggagctcagaacccagctcaggcaagactaactcggtgttgctcctcccggcgctgacttcgaggcccggctatggacggcgagagcgaggtggatttttctagcaacagcataacccctttgtggcggaggcggtcgattcctcagccccaccaggttctgggccggagcaagccgaggccccagtcctaccagagccccaacgggttactaattacggatttcccggtggaggacggagggacgctcctcgcagcgcagattcccgcccaggtgcccaccgcctcggacagcaggacggtacataggagccccctgcttctgggcgcccagcggagagcggtggccaatggtgggacggcatccccggagtacagggctgcctctcctcgacttcgacggcccaagtcacccaagctccccaaagcggtgcctggcggctccccgaaatccccagcaaatggcgcggtgaccttgcctgcgccgccgccgccgccggttctgcgccccccgcggactcctaacgcgcccgccccctgcacccccgaggaggaccttactgggttgactgccagcccggtgccttcgcccactgcaaatggccttgccgctaataacgactctcctgggtcaggttcgcagtccggccggaaggcaaaggaccccgaacgggggctctttcctgggccccagaaaagttcttcggaacaaaaactccccctccaaaggctgccctcccaggagaacgagctcctcgagaatccttccgtggttttgagtacaaacagccccgccgccctcaaagtggggaagcagcagatcattccgaagagtctggcctcggaaattaaaataagtaaatccaacaatcaaaatgtggagccccacaagagactcctcaaggtgcgcagcatggtggagggcctaggaggacccctgggtcacgcaggggaggagagtgaggtcgataacgacgtggatagcccagggtctctgcggagaggcttgcggtccacgtcttatcgcagggcagtggtcagtggctttgattttgacagtcctaccagctcgaagaagaagaacagaatgtcccagcctgttctgaaagtggtgatggaagacaaggagaagttttccagtctgggaaggataaagaaaaaaatgctgaaaggacaaggaacatttgatggggaagaaaatgctgtcctgtatcaaaactacaaggaaaaggcccttgacattgattctgatgaagagtcagagcccaaagaacagaagtcagatgaaaaaattgtgattcaccataagccattgagatccacatggagccaactctctgcggtgaaaagaaagggattatctcagacagtaagccaggaggaaagaaagagacaagaggctatctttgaagtcatatcctctgaacattcatatttactcagcttggagatcttgatacgaatgtttaaaaattctaaagaactgagtgatacaatgactaaaaccgagaggcaccatcttttctccaatattacagatgtctgtgaggcaagcaaaaagttctttatagagttggaagcaagacatcagaataatatcttcatagatgacataagtgacattgtggaaaaacacacagcatccacatttgacccatatgtgaaatactgcacaaatgaagtctaccaacaacgaacactacaaaaattgttagctaccaatccatcctttaaggaagtattgtcaaggattgagtcccatgaagactgtaggaacttacccatgatctcttttctcattctccccatgcagagggtgacccgccttcccctgctgatggatactatctgtcaaaaaacacctaaggactctccgaagtatgaagtctgcaaaagagccttgaaggaagttagcaagttggttcgactatgcaatgagggcgcccggaagatggaaaggactgagatgatgtacacaattaactcccagctggaatttaaaattaagccttttcctttagtctcctcttcccggtggttggtaaaaagaggtgaattgacagcctatgttgaagacactgtgcttttctcaagaaggacatccaaacagcaagtctacttctttctctttaacgatgtgctcattatcaccaagaagaagagtgaagaaagttacaacgtcaatgattattccttaagagatcagctattggtggaatcttgtgacaatgaagagcttaattcttctccagggaagaacagctccacaatgctctattcaagacagagctctgccagtcacctctttactctgacagtccttagtaaccacgcgaatgagaaagtggagatgctactaggagctgagacgcagagcgagcgagcccgctggataactgccctgggacacagcagcgggaagccgcctgcagaccgaacctcactgacccaggtggaaatcgttaggtcatttactgctaagcagccagatgaactctccctgcaggtggctgacgtcgtcctcatctatcaacgtgtcagcgatggctggtatgagggggaacgactacgagatggagaaagaggctggtttcctatggaatgtgccaaggagataacatgtcaagctacaattgataagaatgtggagagaatgggacgcttgctaggactggagaccaacgtgtagtctctcagatggtcttttgttactgcaagatttgcacgacacttaccgggctggttggttctgggctagttttattgttaattttgtcacagcctatttaattaaaagaacgaaaacacttgcctttaagcttgccaggttgttctgctctctcatgagaagagcttggatacagtgagtttgcacagctcagtttttacctaaccacacacttgcagacctcctgaggtacacagaatagctgagcagttcacttcagggatcaggtcatctctgctcctcctagtttcaccatgttctggcaataaaaaacacatattatatcctggttttctctatccttgcattactaaggtgactgtctctctttatacatccttgtatggttctcccagtattagcaagattgtatatctgtaaagaatgtccagttttgtaaatatttccctgcctttttttttctttttttacatctgattttaatgcttcgttaacttcaaaaggaactggtagagttcagaaggtgagctgttgtttttctaaacctcttcccaggaaggggacattgacacttgaatttttgtcacctttttcctcattagaaggaaagtagaaagccttactttaggatttttaaaaaaaaatccatctcaccccatattgttcttaaataagtatagactaattaacctaagctacctttaacaacgtagaatttagatgggttcatatatgtgagaaaaacctgaatataggacaggggtcctacttttttccccacctctgtcgcccaggctagagtatagtggtgtgatcttggcccactgcaacctctgcttcctaggttcaagtgattctcctgcctcagcctcccaagtagctgggattgtaagagtatgccaccacgcccagctactttttgtatttttagtagagacagggtttcatcatgttggccaggatggtctcttaactcctgccctcaagtgatccaccagagaggagatcctcggcctccccaagtgctgggattataggcatgagccaccgtgcccagcctactttctaattaatt

SEQ ID NO: 1483 - DNA, 5246 bp, Homo sapiens
  source 1..5246: mol_type = unassigned DNA; mol_type = unassigned DNA
aaaccttggcttcagcccggccgccgccaggcgttggcatcgccggggagagccttccggactccgggcggcggctggctgggggcgcgttccgaggcgccctcaggcagggcgcgggggcagagcctcgcctgggttctggaggctgcggggccatcgctccagatgcgaaagccatggagttgagctgcagcgaagcacctctttacgggcagatgatgatctatgcgaagtttgacaaaaatgtgtatcttcctgaagatgctgagttttactttacttatgacggatctcatcagcgacatgtcatgattgcagagcgcatcgaggataacgttctccagtccagcgtcccaggccatgggcttcaggagacggtgacggtatctgtgtgcctctgctcggaaggttactctccggtgaccatgggctctggctcagtgacctacgtggacaacatggcttgcaggctggctcgtctgctggtgacgcaggccaatcgcctcacagcctgcagccaccagaccctgctgaccccatttgccttgacggcaggagcactgcctgccttggatgaggagctcgtgctggctctgacccatctggaattgcctctagagtggactgtgttgggaagttcttcacttgaagtatcttctcacagagaatctcttctacacctggctatgagatggggcctggctaaactttcccagttcttcttgtgtctcccggggggagtccaggccttggctttacccaacgaagagggtgccacaccattagacttagctttacgtgaaggacactccaagctggtggaagacgtcacaaattttcagggcagatggtccccaagcttctcccgagtgcagctcagtgaagaagcctccttgcattacattcactcatcggaaacgctgaccctgaccctgaaccacacagccgagcatttgttggaggcagatattaaactcttccggaaatacttttgggatagagcctttcttgtcaaggcctttgagccagaagccaggccagaggaaagaacagctatgccctccagcggtgcagaaactgaagaagagattaagaattcagtgtccagcagatcagcagctgaaaaggaagatataaagcgtgtcaaaagcctggtggttcaacacaatgaacatgaagaccagcacagcctagatttggatcgctccttcgatatcctaaaaaaatccaagccgccctcgacattgcttgctgcaggccggctttcagacatgctgaatggaggtgatgaagtctacgctaactgtatggtgattgatcaggttggtgatttggatatcagctatattaatatagagggaatcactgccactaccagccctgaatccagaggttgcactctgtggcctcagagcagcaaacacacccttcctacagaaaccagtcccagtgtgtacccacttagtgaaaatgtcgaagggacagcacacactgaagcccagcagtccttcatgtcaccatcaagttcgtgtgcttccaacttgaatctttcttttggttggcatggatttgaaaaggaacaaagtcatctaaagaaaagaagttctagccttgatgccttggacgccgacagtgaaggggaagggcattctgagccatcccacatctgttacactccagggtctcagagctcctcaagaactgggattcctagtggggatgaattggactcttttgagactaacactgaaccggattttaatatctccagggctgaatcccttcctctatcaagtaatctacagtcgaaggaatcactgctttctggagttcgctcacgttcttattcttgctcatcacccaaaatttctttaggaaaaactcgtttggtgcgtgaattaacagtatgcagttcaagtgaagagcaaagagcttacagcttatcggagccaccaagagaaaacagaattcaggaagaagaatgggataaatacatcatacctgccaaatcagagtctgaaaaatataaagtgagtcgaactttcagtttcctcatgaataggatgactagccctcggaataaatcaaagacaaaaagcaaggatgccaaagataaagagaagctgaatcgacatcagtttgccccaggaacattctctggggttctgcagtgtttggtttgtgataaaacactcctggggaaagagtcactgcagtgttctaactgtaatgcaaatgtgcacaaaggttgtaaagatgctgcgcctgcatgcaccaagaaattccaagagaaatataacaagaacaaaccacagaccatccttggaaattcttcatttagagacatcccacagcctggtctctccttgcacccttcttcctccgtgcctgttggattgccgactggaaggagggagactgtgggacaggtccatccattgtccagaagtgttccaggcaccaccttggaaagcttcaggaggtcagccacatccttggagtctgagagtgaccataacagctgcagaagcaggtctcattctgatgagctgctacagtccatgggctcttctccctctacagagtctttcataatggaagatgttgtggattcttctctgtggagtgacctcagcagtgatgcccaggagtttgaagcagaatcttggagtcttgtggtggatccctcattttgtaataggcaggagaaggatgtcatcaaaagacaggatgtcatttttgagctaatgcaaacagagatgcatcacatccagaccctgttcatcatgtctgagatcttcaggaaaggcatgaaagaggagctgcagctggaccacagcaccgtggataaaattttcccctgtttagatgagttgcttgaaatccacaggcatttcttctacagtatgaaggaacgaaggcaggaatcctgtgctggcagcgacaggaattttgtgatcgaccgaattggagatattttggtacaacagttttcagaagaaaatgcaagtaaaatgaagaaaatatatggagaattctgttgccatcataaagaagctgttaacctctttaaagaactccagcagaataaaaagtttcagaattttattaagctccgaaatagtaatcttttggctcgacgccgaggaattccagaatgcattctgttggtcactcagcgtattacaaaataccctgtcttggtggaaaggatattgcagtacacaaaggaaagaactgaggaacataaagacttacgcaaagcgctttgcttaattaaagacatgattgcaacagtggatttaaaagtcaatgaatatgagaaaaaccaaaaatggcttgagatcctaaataagattgaaaacaaaacatacacgaagctcaaaaatggacatgtgtttaggaagcaggcactgatgagtgaagaaaggactctgttatatgatggccttgtttactggaaaactgctacaggtcgtttcaaagatatcctagctctacttctaactgatgtgctgctctttttacaagaaaaagaccagaaatacatctttgcagccgttgatcagaagccatcagttatttcccttcaaaagcttattgctagagaagttgctaatgaggagagaggaatgtttctgatcagtgcttcatctgctggtcctgagatgtatgaaattcacaccaattccaaggaggaacgcaataactggatgagacggatccagcaggctgtagaaagttgtcctgaagaaaaagggggaaggacaagtgaatctgatgaagacaagaggaaagctgaagccagagtggccaaaattcagcaatgtcaagaaatactcactaaccaagaccaacaaatttgtgcgtatttggaggagaagctgcatatctatgctgaacttggagaactgagcggatttgaggacgtccatctagagccccacctccttattaaacctgacccaggcgagcctccccaggcagcctcattactggcagcagcactgaaagaagctgagagcctacaagttgcagtgaaggcctcacagatgggcgccgtgagtcaatcatgtgaggacagttgtggagactctgtcttggcggacacactcagttctcatgatgtaccaggatcaccgactgcctcattagtcacaggagggagagaaggaagaggctgttcggatgtggatcccgggatccagggtgtggtaaccgacttggccgtctctgatgcaggggagaaggtggaatgtagaaattttccaggttcttcacaatcagagattatacaagccatacagaatttaacccgtctcttatacagccttcaggccgccttgaccattcaggacagccacattgagatccacaggctggttctccagcagcaggagggcctgtctctcggccactctatcctccgaggcggccccttgcaggaccagaagtctcgcgacgcggacaggcagcatgaggagctggccaatgtgcaccagcttcagcaccagctccagcaggagcagcggcgctggctgcgcaggtgtgagcagcagcagcgggcgcaggcgaccagggagagctggctgcaggagcgggagcgggagtgccagtcgcaggaggagctgctgctgcggagccggggcgagctggacctccagctccaggagtaccagcacagcctggagcggctgagggagggccagcgcctggtggagagggagcaggcgaggatgcgggcccagcagagcctgctgggccactggaagcacggccggcagaggagcctgcccgcggtgctccttccgggtggccccgaggtaatggaacttaatcgatctgagagtttatgtcatgaaaactcattcttcatcaatgaagctttagtacaaatgtcatttaacactttcaacaaactgaatccatcagttatccatcaggatgccacttaccctacaactcaatctcattctgacttggtgaggactagtgaacatcaagtagacctcaaggtggacccttctcagccttcgaatgtcagtcacaaactgtggacagccgctggttccggccatcagatacttcctttccatgaaagcagcaaggattcttgtaaaaatggtaattaacactttaaacatcatctgtatagtttgaacaagaagttgtccctctgaatggttggctcttgtgtagagtgaatcaaagtcctccctagcatgggaataaatcggtactgatga

SEQ ID NO: 1484 - DNA, 560 bp, Homo sapiens
  source 1..560: mol_type = unassigned DNA; mol_type = unassigned DNA
atcgccggggagagccttccggactccgggcggcggctggctgggggcgcgttccgaggcgccctcaggcagggcgcgggggcagagcctcgcctgggttctggaggctgcggggccatcgctccaggcccacagcgtccccgcattggttggctgggtgggccgaggaacagtggcaacatctgtgtttgtgcggcttctcccgccttgacccctgcctgggtatccacacatctcctcacaccaggagttatagaggttcaccacggaccacaccaattgggcaaaatccaaagaaaatgcgaaagccatggagttgagctgcagcgaagcacctctttacgggcagatgatgatctatgcgaagtttgacaaaaatgtgtatcttcctgaagatgctgagttttactttacttatgacggatctcatcagcgacatgtcatgattgcagagcgcatcgaggataacgttctccagtccagcgtcccaggccatgggcttcaggagacggtgacggtatctgtgtgcctctgctcggaaggttactctccggtgacca

SEQ ID NO: 1485 - DNA, 5792 bp, Homo sapiens
  source 1..5792: mol_type = unassigned DNA; mol_type = unassigned DNA
tcattgcagatgcgaaagccatggagttgagctgcagcgaagcacctctttacgggcagatgatgatctatgcgaagtttgacaaaaatgtgtatcttcctgaagatgctgagttttactttacttatgacggatctcatcagcgacatgtcatgattgcagagcgcatcgaggataacgttctccagtccagcgtcccaggccatgggcttcaggagacggtgacggtatctgtgtgcctctgctcggaaggttactctccggtgaccatgggctctggctcagtgacctacgtggacaacatggcttgcaggctggctcgtctgctggtgacgcaggccaatcgcctcacagcctgcagccaccagaccctgctgaccccatttgccttgacggcaggagcactgcctgccttggatgaggagctcgtgctggctctgacccatctggaattgcctctagagtggactgtgttgggaagttcttcacttgaagtatcttctcacagagaatctcttctacacctggctatgagatggggcctggctaaactttcccagttcttcttgtgtctcccggggggagtccaggccttggctttacccaacgaagagggtgccacaccattagacttagctttacgtgaaggacactccaagctggtggaagacgtcacaaattttcagggcagatggtccccaagcttctcccgagtgcagctcagtgaagaagcctccttgcattacattcactcatcggaaacgctgaccctgaccctgaaccacacagccgagcatttgttggaggcagatattaaactcttccggaaatacttttgggatagagcctttcttgtcaaggcctttgagccagaagccaggccagaggaaagaacagctatgccctccagcggtgcagaaactgaagaagagattaagaattcagtgtccagcagatcagcagctgaaaaggaagatataaagcgtgtcaaaagcctggtggttcaacacaatgaacatgaagaccagcacagcctagatttggatcgctccttcgatatcctaaaaaaatccaagccgccctcgacattgcttgctgcaggccggctttcagacatgctgaatggaggtgatgaagtctacgctaactgtatggtgattgatcaggttggtgatttggatatcagctatattaatatagagggaatcactgccactaccagccctgaatccagaggttgcactctgtggcctcagagcagcaaacacacccttcctacagaaaccagtcccagtgtgtacccacttagtgaaaatgtcgaagggacagcacacactgaagcccagcagtccttcatgtcaccatcaagttcgtgtgcttccaacttgaatctttcttttggttggcatggatttgaaaaggaacaaagtcatctaaagaaaagaagttctagccttgatgccttggacgccgacagtgaaggggaagggcattctgagccatcccacatctgttacactccagggtctcagagctcctcaagaactgggattcctagtggggatgaattggactcttttgagactaacactgaaccggattttaatatctccagggctgaatcccttcctctatcaagtaatctacagtcgaaggaatcactgctttctggagttcgctcacgttcttattcttgctcatcacccaaaatttctttaggaaaaactcgtttggtgcgtgaattaacagtatgcagttcaagtgaagagcaaagagcttacagcttatcggagccaccaagagaaaacagaattcaggaagaagaatgggataaatacatcatacctgccaaatcagagtctgaaaaatataaagtgagtcgaactttcagtttcctcatgaataggatgactagccctcggaataaatcaaagacaaaaagcaaggatgccaaagataaagagaagctgaatcgacatcagtttgccccaggaacattctctggggttctgcagtgtttggtttgtgataaaacactcctggggaaagagtcactgcagtgttctaactgtaatgcaaatgtgcacaaaggttgtaaagatgctgcgcctgcatgcaccaagaaattccaagagaaatataacaagaacaaaccacagaccatccttggaaattcttcatttagagacatcccacagcctggtctctccttgcacccttcttcctccgtgcctgttggattgccgactggaaggagggagactgtgggacaggtccatccattgtccagaagtgttccaggcaccaccttggaaagcttcaggaggtcagccacatccttggagtctgagagtgaccataacagctgcagaagcaggtctcattctgatgagctgctacagtccatgggctcttctccctctacagagtctttcataatggaagatgttgtggattcttctctgtggagtgacctcagcagtgatgcccaggagtttgaagcagaatcttggagtcttgtggtggatccctcattttgtaataggcaggagaaggatgtcatcaaaagacaggatgtcatttttgagctaatgcaaacagagatgcatcacatccagaccctgttcatcatgtctgagatcttcaggaaaggcatgaaagaggagctgcagctggaccacagcaccgtggataaaattttcccctgtttagatgagttgcttgaaatccacaggcatttcttctacagtatgaaggaacgaaggcaggaatcctgtgctggcagcgacaggaattttgtgatcgaccgaattggagatattttggtacaacagttttcagaagaaaatgcaagtaaaatgaagaaaatatatggagaattctgttgccatcataaagaagctgttaacctctttaaagaactccagcagaataaaaagtttcagaattttattaagctccgaaatagtaatcttttggctcgacgccgaggaattccagaatgcattctgttggtcactcagcgtattacaaaataccctgtcttggtggaaaggatattgcagtacacaaaggaaagaactgaggaacataaagacttacgcaaagcgctttgcttaattaaagacatgattgcaacagtggatttaaaagtcaatgaatatgagaaaaaccaaaaatggcttgagatcctaaataagattgaaaacaaaacatacacgaagctcaaaaatggacatgtgtttaggaagcaggcactgatgagtgaagaaaggactctgttatatgatggccttgtttactggaaaactgctacaggtcgtttcaaagatatcctagctctacttctaactgatgtgctgctctttttacaagaaaaagaccagaaatacatctttgcagccgttgatcagaagccatcagttatttcccttcaaaagcttattgctagagaagttgctaatgaggagagaggaatgtttctgatcagtgcttcatctgctggtcctgagatgtatgaaattcacaccaattccaaggaggaacgcaataactggatgagacggatccagcaggctgtagaaagttgtcctgaagaaaaagggggaaggacaagtgaatctgatgaagacaagaggaaagctgaagccagagtggccaaaattcagcaatgtcaagaaatactcactaaccaagaccaacaaatttgtgcgtatttggaggagaagctgcatatctatgctgaacttggagaactgagcggatttgaggacgtccatctagagccccacctccttattaaacctgacccaggcgagcctccccaggcagcctcattactggcagcagcactgaaagaagctgagagcctacaagttgcagtgaaggcctcacagatgggcgccgtgagtcaatcatgtgaggacagttgtggagactctgtcttggcggacacactcagttctcatgatgtaccaggatcaccgactgcctcattagtcacaggagggagagaaggaagaggctgttcggatgtggatcccgggatccagggtgtggtaaccgacttggccgtctctgatgcaggggagaaggtggaatgtagaaattttccaggttcttcacaatcagagattatacaagccatacagaatttaacccgtctcttatacagccttcaggccgccttgaccattcaggacagccacattgagatccacaggctggttctccagcagcaggagggcctgtctctcggccactctatcctccgaggcggccccttgcaggaccagaagtctcgcgacgcggacaggcagcatgaggagctggccaatgtgcaccagcttcagcaccagctccagcaggagcagcggcgctggctgcgcaggtgtgagcagcagcagcgggcgcaggcgaccagggagagctggctgcaggagcgggagcgggagtgccagtcgcaggaggagctgctgctgcggagccggggcgagctggacctccagctccaggagtaccagcacagcctggagcggctgagggagggccagcgcctggtggagagggagcaggcgaggatgcgggcccagcagagcctgctgggccactggaagcacggccggcagaggagcctgcccgcggtgctccttccgggtggccccgaggtaatggaacttaatcgatctgagagtttatgtcatgaaaactcattcttcatcaatgaagctttagtacaaatgtcatttaacactttcaacaaactgaatccatcagttatccatcaggatgccacttaccctacaactcaatctcattctgacttggtgaggactagtgaacatcaagtagacctcaaggtggacccttctcagccttcgaatgtcagtcacaaactgtggacagccgctggttccggccatcagatacttcctttccatgaaagcagcaaggattcttgtaaaaatggctccagtatgacaaagtgcagttgtacgttgacatctcccccgggactgtggactggaaccacatctactttgaaagatttggacacctcccacactgagtccccaaccccccatgactcaaattcacaccgccctcaactgcaggcgtttataacagaagcaaagctaaatctaccgacaaggacaatgaccagacaagatggggaaactggagatggagccaaagaaaatattgtttacctctaattgtgttgtcatttttccaaacaaaacaaaacactggcacttttgggagaaactttttgtctccattccttatgtatgtgtgattgtctgtgtccaaattgctttaagaataatatttaatatttcctggaagctcatttttttggcatgagtctaattaaattattgaaagccaccctgtttgtataatctttaacttatcaaatctaatttcagatttctggaggagaaactaacttgaataagcaggactattttaaaagttgttttgacgctagagtaaaattccatgtcacattttctacccaatcatctggatttcaagattccttttaagatctcaatgaagcaatttggatttaaagagtggtattcacaaggggtgaactttcacagtcagggcagttgcctcagtgcccacataggcagaggaggatgtgggaaagggtttttctcagctagtttttgtgtgctcatttcttctgggagcattaaaagtggtgatctgttacagtcactattcaactgggcacgtgttgtgattggtcagtcactgagccagggatacagtccgga

SEQ ID NO: 1486 - DNA, 6118 bp, Homo sapiens
  source 1..6118: mol_type = unassigned DNA; mol_type = unassigned DNA
tcattgcagatgcgaaagccatggagttgagctgcagcgaagcacctctttacgggcagatgatgatctatgcgaagtttgacaaaaatgtgtatcttcctgaagatgctgagttttactttacttatgacggatctcatcagcgacatgtcatgattgcagagcgcatcgaggataacgttctccagtccagcgtcccaggccatgggcttcaggagacggtgacggtatctgtgtgcctctgctcggaaggttactctccggtgaccatgggctctggctcagtgacctacgtggacaacatggcttgcaggctggctcgtctgctggtgacgcaggccaatcgcctcacagcctgcagccaccagaccctgctgaccccatttgccttgacggcaggagcactgcctgccttggatgaggagctcgtgctggctctgacccatctggaattgcctctagagtggactgtgttgggaagttcttcacttgaagtatcttctcacagagaatctcttctacacctggctatgagatggggcctggctaaactttcccagttcttcttgtgtctcccggggggagtccaggccttggctttacccaacgaagagggtgccacaccattagacttagctttacgtgaaggacactccaagctggtggaagacgtcacaaattttcagggcagatggtccccaagcttctcccgagtgcagctcagtgaagaagcctccttgcattacattcactcatcggaaacgctgaccctgaccctgaaccacacagccgagcatttgttggaggcagatattaaactcttccggaaatacttttgggatagagcctttcttgtcaaggcctttgagccagaagccaggccagaggaaagaacagctatgccctccagcggtgcagaaactgaagaagagattaagaattcagtgtccagcagatcagcagctgaaaaggaagatataaagcgtgtcaaaagcctggtggttcaacacaatgaacatgaagaccagcacagcctagatttggatcgctccttcgatatcctaaaaaaatccaagccgccctcgacattgcttgctgcaggccggctttcagacatgctgaatggaggtgatgaagtctacgctaactgtatggtgattgatcaggttggtgatttggatatcagctatattaatatagagggaatcactgccactaccagccctgaatccagaggttgcactctgtggcctcagagcagcaaacacacccttcctacagaaaccagtcccagtgtgtacccacttagtgaaaatgtcgaagggacagcacacactgaagcccagcagtccttcatgtcaccatcaagttcgtgtgcttccaacttgaatctttcttttggttggcatggatttgaaaaggaacaaagtcatctaaagaaaagaagttctagccttgatgccttggacgccgacagtgaaggggaagggcattctgagccatcccacatctgttacactccagggtctcagagctcctcaagaactgggattcctagtggggatgaattggactcttttgagactaacactgaaccggattttaatatctccagggctgaatcccttcctctatcaagtaatctacagtcgaaggaatcactgctttctggagttcgctcacgttcttattcttgctcatcacccaaaatttctttaggaaaaactcgtttggtgcgtgaattaacagtatgcagttcaagtgaagagcaaagagcttacagcttatcggagccaccaagagaaaacagaattcaggaagaagaatgggataaatacatcatacctgccaaatcagagtctgaaaaatataaagtgagtcgaactttcagtttcctcatgaataggatgactagccctcggaataaatcaaagacaaaaagcaaggatgccaaagataaagagaagctgaatcgacatcagtttgccccaggaacattctctggggttctgcagtgtttggtttgtgataaaacactcctggggaaagagtcactgcagtgttctaactgtaatgcaaatgtgcacaaaggttgtaaagatgctgcgcctgcatgcaccaagaaattccaagagaaatataacaagaacaaaccacagaccatccttggaaattcttcatttagagacatcccacagcctggtctctccttgcacccttcttcctccgtgcctgttggattgccgactggaaggagggagactgtgggacaggtccatccattgtccagaagtgttccaggcaccaccttggaaagcttcaggaggtcagccacatccttggagtctgagagtgaccataacagctgcagaagcaggtctcattctgatgagctgctacagtccatgggctcttctccctctacagagtctttcataatggaagatgttgtggattcttctctgtggagtgacctcagcagtgatgcccaggagtttgaagcagaatcttggagtcttgtggtggatccctcattttgtaataggcaggagaaggatgtcatcaaaagacaggatgtcatttttgagctaatgcaaacagagatgcatcacatccagaccctgttcatcatgtctgagatcttcaggaaaggcatgaaagaggagctgcagctggaccacagcaccgtggataaaattttcccctgtttagatgagttgcttgaaatccacaggcatttcttctacagtatgaaggaacgaaggcaggaatcctgtgctggcagcgacaggaattttgtgatcgaccgaattggagatattttggtacaacagttttcagaagaaaatgcaagtaaaatgaagaaaatatatggagaattctgttgccatcataaagaagctgttaacctctttaaagaactccagcagaataaaaagtttcagaattttattaagctccgaaatagtaatcttttggctcgacgccgaggaattccagaatgcattctgttggtcactcagcgtattacaaaataccctgtcttggtggaaaggatattgcagtacacaaaggaaagaactgaggaacataaagacttacgcaaagcgctttgcttaattaaagacatgattgcaacagtggatttaaaagtcaatgaatatgagaaaaaccaaaaatggcttgagatcctaaataagattgaaaacaaaacatacacgaagctcaaaaatggacatgtgtttaggaagcaggcactgatgagtgaagaaaggactctgttatatgatggccttgtttactggaaaactgctacaggtcgtttcaaagatatcctagctctacttctaactgatgtgctgctctttttacaagaaaaagaccagaaatacatctttgcagccgttgatcagaagccatcagttatttcccttcaaaagcttattgctagagaagttgctaatgaggagagaggaatgtttctgatcagtgcttcatctgctggtcctgagatgtatgaaattcacaccaattccaaggaggaacgcaataactggatgagacggatccagcaggctgtagaaagttgtcctgaagaaaaagggggaaggacaagtgaatctgatgaagacaagaggaaagctgaagccagagtggccaaaattcagcaatgtcaagaaatactcactaaccaagaccaacaaatttgtgcgtatttggaggagaagctgcatatctatgctgaacttggagaactgagcggatttgaggacgtccatctagagccccacctccttattaaacctgacccaggcgagcctccccaggcagcctcattactggcagcagcactgaaagaagctgagagcctacaagttgcagtgaaggcctcacagatgggcgccgtgagtcaatcatgtgaggacagttgtggagactctgtcttggcggacacactcagttctcatgatgtaccaggatcaccgactgcctcattagtcacaggagggagagaaggaagaggctgttcggatgtggatcccgggatccagggtgtggtaaccgacttggccgtctctgatgcaggggagaaggtggaatgtagaaattttccaggttcttcacaatcagagattatacaagccatacagaatttaacccgtctcttatacagccttcaggccgccttgaccattcaggacagccacattgagatccacaggctggttctccagcagcaggagggcctgtctctcggccactctatcctccgaggcggccccttgcaggaccagaagtctcgcgacgcggacaggcagcatgaggagctggccaatgtgcaccagcttcagcaccagctccagcaggagcagcggcgctggctgcgcaggtgtgagcagcagcagcgggcgcaggcgaccagggagagctggctgcaggagcgggagcgggagtgccagtcgcaggaggagctgctgctgcggagccggggcgagctggacctccagctccaggagtaccagcacagcctggagcggctgagggagggccagcgcctggtggagagggagcaggcgaggatgcgggcccagcagagcctgctgggccactggaagcacggccggcagaggagcctgcccgcggtgctccttccgggtggccccgaggtaatggaacttaatcgatctgagagtttatgtcatgaaaactcattcttcatcaatgaagctttagtacaaatgtcatttaacactttcaacaaactgaatccatcagttatccatcaggatgccacttaccctacaactcaatctcattctgacttggtgaggactagtgaacatcaagtagacctcaaggtggacccttctcagccttcgaatgtcagtcacaaactgtggacagccgctggttccggccatcagatacttcctttccatgaaagcagcaaggattcttgtaaaaatgatttggacacctcccacactgagtccccaaccccccatgactcaaattcacaccgccctcaactgcaggcgtttataacagaagcaaagctaaatctaccgacaaggacaatgaccagacaagatggggaaactggagatggagccaaagaaaatattgtttacctctaattgtgttgtcatttttccaaacaaaacaaaacactggcacttttgggagaaactttttgtctccattccttatgtatgtgtgattgtctgtgtccaaattgctttaagaataatatttaatatttcctggaagctcatttttttggcatgagtctaattaaattattgaaagccaccctgtttgtataatctttaacttatcaaatctaatttcagatttctggaggagaaactaacttgaataagcaggactattttaaaagttgttttgacgctagagtaaaattccatgtcacattttctacccaatcatctggatttcaagattccttttaagatctcaatgaagcaatttggatttaaagagtggtattcacaaggggtgaactttcacagtcagggcagttgcctcagtgcccacataggcagaggaggatgtgggaaagggtttttctcagctagtttttgtgtgctcatttcttctgggagcattaaaagtggtgatctgttacagtcactattcaactgggcacgtgttgtgattggtcagtcactgagccagggatacagtccggacttgcttagtacctaagcctaatgctggtggggtttcaagacatggttcagcatcatcttttaacaaggcccagaggcccagagcccccatcaagtcattttgatgtaaatagtgaactttgttagagccctcacttctatcaatcagctgtcctgtccctgccagcacctggagcaccaactaccactccctggaaagaacccttccctgcagttttttaaggacaaaactgcccactcctcattaagtttgctgcctggatacacttttccacaaaggaaaactggcatatcctgccttccgagtagtatgggtctctgtgtgagaaaccaggagatattttcatcttgttcggaaatacttgtatgtattttggtgtcaataaatatcttgtacctcatta

SEQ ID NO: 1487 - DNA, 280 bp, Homo sapiens
  source 1..280: mol_type = unassigned DNA; mol_type = unassigned DNA
gctcccatcagcagatcctgataattatttcttttgcagagattaagaattcagtgtccagcagatcagcagctgaaaaggaagatataaagcgtgtcaaaagcctggtggttcaacacaatgaacatgaagaccagcacagcctagatttgggtatgaaataacgcttttacctatactcgtaggggcatcccagatccaggtttagagtggacaagaagcaagtaaattttaacataaaatattccttcctggtaaccttatctatttcctgaaacgc

SEQ ID NO: 1488 - DNA, 4424 bp, Homo sapiens
  source 1..4424: mol_type = unassigned DNA; mol_type = unassigned DNA
ctggctggggacgccccgagttcttcctgagtctctactgtttcatctgttgatttcaccaaaacaaaaagatggattctgactccgactcaccttttaactactcgtggccttcctttcccaaaatgaagattcgaagaaggacgtccaaacaagatcgctccttcgatatcctaaaaaaatccaagccgccctcgacattgcttgctgcaggccggctttcagacatgctgaatggaggtgatgaagtctacgctaactgtatggtgattgatcaggttggtgatttggatatcagctatattaatatagagggaatcactgccactaccagccctgaatccagaggttgcactctgtggcctcagagcagcaaacacacccttcctacagaaaccagtcccagtgtgtacccacttagtgaaaatgtcgaagggacagcacacactgaagcccagcagtccttcatgtcaccatcaagttcgtgtgcttccaacttgaatctttcttttggttggcatggatttgaaaaggaacaaagtcatctaaagaaaagaagttctagccttgatgccttggacgccgacagtgaaggggaagggcattctgagccatcccacatctgttacactccagggtctcagagctcctcaagaactgggattcctagtggggatgaattggactcttttgagactaacactgaaccggattttaatatctccagggctgaatcccttcctctatcaagtaatctacagtcgaaggaatcactgctttctggagttcgctcacgttcttattcttgctcatcacccaaaatttctttaggaaaaactcgtttggtgcgtgaattaacagtatgcagttcaagtgaagagcaaagagcttacagcttatcggagccaccaagagaaaacagaattcaggaagaagaatgggataaatacatcatacctgccaaatcagagtctgaaaaatataaagtgagtcgaactttcagtttcctcatgaataggatgactagccctcggaataaatcaaagacaaaaagcaaggatgccaaagataaagagaagctgaatcgacatcagtttgccccaggaacattctctggggttctgcagtgtttggtttgtgataaaacactcctggggaaagagtcactgcagtgttctaactgtaatgcaaatgtgcacaaaggttgtaaagatgctgcgcctgcatgcaccaagaaattccaagagaaatataacaagaacaaaccacagaccatccttggaaattcttcatttagagacatcccacagcctggtctctccttgcacccttcttcctccgtgcctgttggattgccgactggaaggagggagactgtgggacaggtccatccattgtccagaagtgttccaggcaccaccttggaaagcttcaggaggtcagccacatccttggagtctgagagtgaccataacagctgcagaagcaggtctcattctgatgagctgctacagtccatgggctcttctccctctacagagtctttcataatggaagatgttgtggattcttctctgtggagtgacctcagcagtgatgcccaggagtttgaagcagaatcttggagtcttgtggtggatccctcattttgtaataggcaggagaaggatgtcatcaaaagacaggatgtcatttttgagctaatgcaaacagagatgcatcacatccagaccctgttcatcatgtctgagatcttcaggaaaggcatgaaagaggagctgcagctggaccacagcaccgtggataaaattttcccctgtttagatgagttgcttgaaatccacaggcatttcttctacagtatgaaggaacgaaggcaggaatcctgtgctggcagcgacaggaattttgtgatcgaccgaattggagatattttggtacaacagttttcagaagaaaatgcaagtaaaatgaagaaaatatatggagaattctgttgccatcataaagaagctgttaacctctttaaagaactccagcagaataaaaagtttcagaattttattaagctccgaaatagtaatcttttggctcgacgccgaggaattccagaatgcattctgttggtcactcagcgtattacaaaataccctgtcttggtggaaaggatattgcagtacacaaaggaaagaactgaggaacataaagacttacgcaaagcgctttgcttaattaaagacatgattgcaacagtggatttaaaagtcaatgaatatgagaaaaaccaaaaatggcttgagatcctaaataagattgaaaacaaaacatacacgaagctcaaaaatggacatgtgtttaggaagcaggcactgatgagtgaagaaaggactctgttatatgatggccttgtttactggaaaactgctacaggtcgtttcaaagatatcctagctctacttctaactgatgtgctgctctttttacaagaaaaagaccagaaatacatctttgcagccgttgatcagaagccatcagttatttcccttcaaaagcttattgctagagaagttgctaatgaggagagaggaatgtttctgatcagtgcttcatctgctggtcctgagatgtatgaaattcacaccaattccaaggaggaacgcaataactggatgagacggatccagcaggctgtagaaagttgtcctgaagaaaaagggggaaggacaagtgaatctgatgaagacaagaggaaagctgaagccagagtggccaaaattcagcaatgtcaagaaatactcactaaccaagaccaacaaatttgtgcgtatttggaggagaagctgcatatctatgctgaacttggagaactgagcggatttgaggacgtccatctagagccccacctccttattaaacctgacccaggcgagcctccccaggcagcctcattactggcagcagcactgaaagaagctgagagcctacaagttgcagtgaaggcctcacagatgggcgccgtgagtcaatcatgtgaggacagttgtggagactctgtcttggcggacacactcagttctcatgatgtaccaggatcaccgactgcctcattagtcacaggagggagagaaggaagaggctgttcggatgtggatcccgggatccagggtgtggtaaccgacttggccgtctctgatgcaggggagaaggtggaatgtagaaattttccaggttcttcacaatcagagattatacaagccatacagaatttaacccgtctcttatacagccttcaggccgccttgaccattcaggacagccacattgagatccacaggctggttctccagcagcaggagggcctgtctctcggccactctatcctccgaggcggccccttgcaggaccagaagtctcgcgacgcggacaggcagcatgaggagctggccaatgtgcaccagcttcagcaccagctccagcaggagcagcggcgctggctgcgcaggtgtgagcagcagcagcgggcgcaggcgaccagggagagctggctgcaggagcgggagcgggagtgccagtcgcaggaggagctgctgctgcggagccggggcgagctggacctccagctccaggagtaccagcacagcctggagcggctgagggagggccagcgcctggtggagagggagcaggcgaggatgcgggcccagcagagcctgctgggccactggaagcacggccggcagaggagcctgcccgcggtgctccttccgggtggccccgaggtaatggaacttaatcgatctgagagtttatgtcatgaaaactcattcttcatcaatgaagctttagtacaaatgtcatttaacactttcaacaaactgaatccatcagttatccatcaggatgccacttaccctacaactcaatctcattctgacttggtgaggactagtgaacatcaagtagacctcaaggtggacccttctcagccttcgaatgtcagtcacaaactgtggacagccgctggttccggccatcagatacttcctttccatgaaagcagcaaggattcttgtaaaaatgatttggacacctcccacactgagtccccaaccccccatgactcaaattcacaccgccctcaactgcaggcgtttataacagaagcaaagctaaatctaccgacaaggacaatgaccagacaagatggggaaactggagatggagccaaagaaaatattgtttacctctaattgtgttgtcatttttccaaacaaaacaaaacactggcacttttgggagaaactttttgtctccattccttatgtatgtgtgattgtctgtgtccaaattgctttaagaataatatttaatatttcctggaagctcatttttttggcatgagtctaattaaattattgaaagcc

SEQ ID NO: 1489 - DNA, 710 bp, Homo sapiens
  source 1..710: mol_type = unassigned DNA; mol_type = unassigned DNA
atccacggaaggaggaggggctgaaggttaaattgatcactaattactaataatttaaccaatcatgcctgcataatgaagcttccataaaaacccaaaaggacgggccgggcacggtggctcacgcctgtaatcccagcactttgggaggccgagacgggcggatcacgaggttggtgatttggatatcagctatattaatatagagggaatcactgccactaccagccctgaatccagaggttgcactctgtggcctcagagcagcaaacacacccttcctacagaaaccagtcccagtgtgtacccacttagtgaaaatgtcgaagggacagcacacactgaagcccagcagtccttcatgtcaccatcaagttcgtgtgcttccaacttgaatctttcttttggttggcatggatttgaaaaggaacaaagtcatctaaagaaaagaagttctagccttgatgccttggacgccgacagtgaaggggaagggcattctgagccatcccacatctgttacactccagggtctcagagctcctcaagaactgggattcctagtggggatgaattggactcttttgagactaacactgaaccggattttaatatctccagggctgaatcccttcctctatcaagtaatctacagtcgaaggaatcactgctttctggagttcgctcacgttcttattcttgctcatcac

SEQ ID NO: 1490 - DNA, 536 bp, Homo sapiens
  source 1..536: mol_type = unassigned DNA; mol_type = unassigned DNA
attgctttgccaacattgctgcaacagatgtgagcatttattattaaagtggaaaagtctagggccaacctgaccctattcctttgttgataacccttgtcttctgccttatgcttgaggacttttcattttttaatcatatggatattatgagaatatgtctatagagtaggtgtcatttaattatttttcttaggaaacagtgagaacttttgatgtgtccttttgggcgctttttcagctttatagaattcttgtctatggtggctttgactgtcactgcttctgatctaatttttctgatctcttccttggactgtaatgcaaatgtgcacaaaggttgtaaagatgctgcgcctgcatgcaccaagaaattccaagagaaatataacaagaacaaaccacagaccatccttggaaattcttcatttagagacatcccacagcctggtctctccttgcacccttcttcctccgtgcctgttggattgccgactggaaggagggagactgtgggacaggtccatccattgtcc

SEQ ID NO: 1491 - DNA, 8285 bp, Homo sapiens
  source 1..8285: mol_type = unassigned DNA; mol_type = unassigned DNA
aagaaaatgcaagtaaaatgaagaaaatatatggagaattctgttgccatcataaagaagctgttaacctctttaaagaactccagcagaataaaaagtttcagaattttattaagctccgaaatagtaatcttttggctcgacgccgaggaattccagaatgcattctgttggtcactcagcgtattacaaaataccctgtcttggtggaaaggatattgcagtacacaaaggaaagaactgaggaacataaagacttacgcaaagcgctttgcttaattaaagacatgattgcaacagtggatttaaaagtcaatgaatatgagaaaaaccaaaaatggcttgagatcctaaataagattgaaaacaaaacatacacgaagctcaaaaatggacatgtgtttaggaagcaggcactgatgagtgaagaaaggactctgttatatgatggccttgtttactggaaaactgctacaggtcgtttcaaagatatcctagctctacttctaactgatgtgctgctctttttacaagaaaaagaccagaaatacatctttgcagccgttgatcagaagccatcagttatttcccttcaaaagcttattgctagagaagttgctaatgaggagagaggaatgtttctgatcagtgcttcatctgctggtcctgagatgtatgaaattcacaccaattccaaggaggaacgcaataactggatgagacggatccagcaggctgtagaaagttgtcctgaagaaaaagggggaaggacaagtgaatctgatgaagacaagaggaaagctgaagccagagtggccaaaattcagcaatgtcaagaaatactcactaaccaagaccaacaaatttgtgcgtatttggaggagaagctgcatatctatgctgaacttggagaactgagcggatttgaggacgtccatctagagccccacctccttattaaacctgacccaggcgagcctccccaggcagcctcattactggcagcagcactgaaagaagctgagagcctacaagttgcagtgaaggcctcacagatgggcgccgtgagtcaatcatgtgaggacagttgtggagactctgtcttggcggacacactcagttctcatgatgtaccaggatcaccgactgcctgtaagtgaaaatgcaggccttggcaatgagcctgagcacagtccctggagcttacagtggtcacgtaaagtaaaggcaatgactgtctctggttgaaggggacttgatatatttttttaaattagaaaaaaactgagaataaatatgctagcctaaatgaatatcataggcatataataatgacactggggtttcaagtatgaggatctaaagagtagttggtgggttatactgctctgtttgccggccaaatatcggaccttccccaacccctaccctgcctcatttttgatatgatttattcattacagttttgaaagaactttttaacttttcaggttttttaaaaaaggagtccctgcggtcaattacagaacaagcccttaaacctaatctcatgtgcatcaactgagaaaacaactcagaaaaccagaaatatacacacggctccctccgtctccctcctttctctctccctctctctttctctctctctcacacacacgaagtttggtggtatggttaaagcagaagtgccagaaaattcttgatctgtgccatcctacactttagttcatgtcagaattcatttatgaaaacattgtttcaaaacattttaaatataaaaaaaaatagaatgtagagatttggtttaggtaatttccccgaacctagctatcctgttatatgtatagttgtaggctacttagttccataaaggtttctaagataagagcataaagagtatacttttcatcctgtgcaggtggtaacaaccttacttccacaaggtcttatgtgcgtaagataaaatggataaaatgtcttcagtagttagagatcagaagattaaattgaactcaagattggaagattaaattgaactcagaacttctttaacaacatcccttgattaattaagatatatagatgcagtatagctttttaattctatacttcttttttttttcttttttaaacatcagcaccactaattatcttcctctctcaagttctgctttatctaatcctgagtttctagtttcagaatgcgcacgtatgtttttcattttgacacagcccagattcatcaggggagttgtactgccctgggtgatttccttttaaaagaagaacctcattatgccattgaggagtctctgtctaaaaatacgtgcagggatctgctgagggatctgctgctctcagcctcgccccagggacagctggagaggctcccctctgcagctgcccgagcccgcggtcgtgccttccctcccttcaggccaggcagtgaaggtctccttgtctgtatccacatctctcatgactggggagagtttcaaagggacacccgtggcatttgccagaaccattgagaggctctttagaggggtctgatgtcgggattcaggtagaggaagtaccgaagctggctggtggggtcctgtaccccaaggcctcttcagttctgggtcagactggaacatggtgctatgagagtttgattctctttataaagttgttcaaggcacaaggctagttctaaatgaaggtctacaactgtgactgaatgggtcggttctgcaaatgacttggagaactgggctcttcttcatcaggcttatgtcagcctgaggttataagccaagcagacagctctattttcagtcttcagtatacatgatgagtatcttctacttctaggaaagttctgttcactggagaccctctggcccaccctgaaattggatacagggacagggacctgatctgtgttttattcttctgccttgtcatcagcttctttcccatttgattttcctaatttctatgagggagtgagaaacagagtggtgaattctttagtgatgcctttggccactctttaagagttaggaatagcacccaatagtagaaccatttttcaaatgacagagaaacctataaaatgtccctcattgtaagtgaataagtgctgatcagcttgaacaaaatggacttgtttttagctgatctcatctgaagccgtttccgtttagacaaaaacttctttgtattagaagaggtctttgaaatcctagaggactctcattttccaaagacataagtatttttattaaagaaaaaagcatttcctatattggaaataaagttttaaaaagacacaataaaaattatacaaacaaacagtgtcataaagtgaatatcgattttgtcagggtctggattggacatggttctaataaaacactgttttgggctttgaaaattctagttttaatcagtgcaaggtgggcacagtttaagttttaactgagttcacatgggtaaagaaataaaatcctgccaacagagatttaatggatgaagtgaaatctgtatttggtacttaaaaatatttcgggactagtttctatgttttcatagtttaaatacatagtatttgtaaatctaaagcataacaagaaatgtgagaaaaacaacacatttagaaattgttaaaaaataagttattcagagatagggacaggttcttggtttgtatgactatgagaccgtgaagtattagccatctccgccttcctagaaagatgtctccctcctgcttcggactcctccttcctcctaaaccttgtttatcgtctgctgctcttgcactggccacaagagagactttttacagacttaagtctgccaagagaccttgcttttgttctacagcacctgttttaaatttcacccttcccaggaggcattttcctattaagtgagagtgagatgtagattctaccctctgtaacacaaacgacacacgaacacttcagtgcaagaaagaaaagtacaaagatggtgatactttgtgcggttcgtcagttgctgtctgttagcgtgtaagccccatgtgggcagggaccacatgcattgctctgcgctcatccaagcacctcatctaagaatactcaatatgtattattttgtggtgtttcctattttgaaatatgtgttggccgtgtacagaagaacccggtgggctggccgatgtttgacgctgtcctttttgtttctgtctcgatggcgtgcttccagcattagtcacaggagggagagaaggaagaggctgttcggatgtggatcccgggatccagggtgtggtaaccgacttggccgtctctgatgcaggggagaaggtattgtgaactgatttgttagtaaacggcagcggttactgtgtataataaaatagcctcaggttctggtctgtcacggcagtcagtggggcaaaggtgcttttctgaattgttctcaattgatttaaatattcatatttaaactttctaacttatttcttcttcaaatgtgcttgcactgcctgtgtcatgtaggtgtaaacaaagcaacgattgaaaagttattaaaaagattaaaaactctcctgtgtatatgtgtgtctgtgctctctgacttctggtctttctgccctgcaaacctttgcttctcacccactatgtctggcagctctggcacccgggggcccttttgcaaccagatggcgccaaagtaattgaaacaccttttactttggaatattcttgcttctttcaccttccttgaccctcctctccttgcagagttgatttcctgtcaccacccacatttcacctactttttttgtggttaatttttaattaatctgaccagtttttgcttggggcacagcgattcccaaagggaatcctcttttttgacttactgctatagacatagatattaactctctctttaagaattaaatacataaaacttcctattaatgtctactgaaagtgagatgtcagaaatagggaaggaataaaatatgattctgggaggtggctagttggcctcttcctgcttgtcagggctccagagtttagctttatctaaaattgaattaggtacattaataggtgccaatatgtgtcaatgtgaaaaaatggcaaatgtcagatcttctcacatatacaacatattttacatattatatactttttgtgtatattacataagactgagaaatcaagtcaaggacttttaaaatccagagaaaagacagctgtgactgagtgttcttttttaaacttcagaggccaaaatgagcataggaatgtaatattttactccttctgattgtaagctttctaatgtattgcttcttaaaatgttcctgcttttcatcacttttaagtgtgaagtttgtggtgtccaactgtgttaatagaaaagagagagtgaattggacagtaataatttaatcttgaacgcaaagttgggtggctcctacccctaaagtctccctcttccactccaattcagctacaggtagataattgaggttaagtgtctgggttcttctttggattaagctatctgcaaaattttttgcttaataaggcattttgaaagattaatacattaataaacccaggtaaagggcaggatcacttgaaatcaaacttttaaaaggtgtataatggatattttgtcattagcttcctctacaaggtaaggttagaacaaatttctgaaagaatattaaaaaatgaaatctgactcaaatgcagaaataatggataaatcgccaactgcagttttaaacatttaccacaaggtggcagaacaactccattaaaaacgcgaaatttcctgtcttgtgtcaaacctagtggcttttgggcataagtaaccgcgggtagcacagtccaactcatttctatggttctaatttttatagactataaaaactctgtgccatatggtcttactacagaagcagtggagtgtggatgggccacgacagagccagaagagcagcgagaacgccaaccatccctctagggcgggggttcttagagcctgttctctcccatagggtttggcacagatctaatgtctttaagcttcatctccattttcagcctctgtcttttctctatcagaggggctgcttacgagtgaaatctttaattggcagtccaagggaagcggaggtctggctagctcatcctggcatcatcagcctaaactaattgaatttaacaagttcaaaattacccgaggacatgaccatggctggctgctttttatggcttaaaattagatgagacagtaggcccttgaggacagggcatctgatggtctcccatagcgtaaggtgtgaagtttacagtgggtgatcgatatttatttattgaatggcgtgccatcgagttcaactgggagtcattcacttgttgagtgtccgtgctatgtcaagcatcattcttataatatggagcacatggacaaagtctcgctactcactggtttgcatcctagggagagaaggccgacaataaatgaataaacaagtgttcaattatggaggctgcaaaccatcactatccacgtgtgcccttaatgtgtgctgtggaagagacaaagaacaaggcatagaccctctccctaaagaacagacggtctcctgtggctggttcgtggcctctgctgctagtacttctactatggcagtcactggtctggtgatctctgactgtggtgggatctagagcagcccagctacgcgcgccactatggccaccgtctgagtctggtttcttttcccaactgctgtatatgttgatatcgtgaatctcaaacattgagaaaaggagttaaggccagacatgatattctttctttaactttcaatctgtcctctagaatataagaggtcagcctgacccaaaagacaacttcagtctgggcacagagaactcaattcacattgtggtttgcacaaggtaaatgttgttacttgagttttcagggtgtccttactgtcatcccttgttgttttaaggggtgattgggtgaaaattgccatccatctcaaacatcgactttgcgtgaaggacgctcttgttgtcaagtgtttgtttgattctataggcttttatttctgggaggaaactgagtcagtatagataaggtaatcaagtttagagatagcaaagtgatttacccaaggtcatacattttgggacactgcagggcagcttttcagaagtagaatggttattcattttcttgttttttatgtattttaggtggaatgtagaaattttccaggttcttcacaatcagagattatacaagccatacagaatttaacccgtctcttatacagccttcaggtaactatcctcctctaatctttgaccttgtgaatggttctcttaatgcaattctctttgatgattcccagactttaaaaatgagaacaagtgagaggtagggaatgatcttaaaagaatgacaaccttctaagtgtgatgtgttggactcacatggttttgtaatcagaggcaacaccatgactacattttataccattcttctctgaaatcataaaacagttcatatctttaaaaaatattgatgaatatgatctggcttgacatttacaatgaaactcttaggtgagtgtagcatgacttcacattttctgatgaaaacctaaattcacacctaaaattctttgacttctccatgtggccatcagcctttagagcagttaagtaatccatatgttgctttactcttttgtttgttcatccactcaacatttattaatttattaatgttgaggggatgaacacacagtgcctgtctctgtgctgactgtgctgagggctgagcacacaaaggcaaattagccacacagcctgctctcaaatagcttactgcctttcaaggaagagcagacataaaaaagaaatcatgcttgcatttaggattaaatggttggatgatcccttaggctggggtccccaaaccccagggtgcagagtgttacctgtctgggctgcacagcaggaggtgagctgggggcaagcgagcagtaccacctgaactccgcctcctgtgagatcagtggcagcattagattcttataggagcgtgaaccctattgtgaactgtgcatgcaatctagggatctaggttgccccctccttatgagaatctaatgcttgatgatctgaggtggtacgctttcatcctgaaaccattctcaccacatcccagcccatccattaaaaaaaaaaaaaaaa

SEQ ID NO: 1492 - DNA, 2936 bp, Homo sapiens
  source 1..2936: mol_type = unassigned DNA; mol_type = unassigned DNA
atgattgcaacagtggatttaaaagtcaatgaatatgagaaaaaccaaaaatggcttgagatcctaaataagattgaaaacaaaacatacacgaagctcaaaaatggacatgtgtttaggaagcaggcactgatgagtgaagaaaggactctgttatatgatggccttgtttactggaaaactgctacaggtcgtttcaaagatatcctagctctacttctaactgatgtgctgctctttttacaagaaaaagaccagaaatacatctttgcagccgttgatcagaagccatcagttatttcccttcaaaagcttattgctagagaagttgctaatgaggagagaggaatgtttctgatcagtgcttcatctgctggtcctgagatgtatgaaattcacaccaattccaaggaggaacgcaataactggatgagacggatccagcaggctgtagaaagttgtcctgaagaaaaagggggaaggacaagtgaatctgatgaagacaagaggaaagctgaagccagagtggccaaaattcagcaatgtcaagaaatactcactaaccaagaccaacaaatttgtgcgtatttggaggagaagctgcatatctatgctgaacttggagaactgagcggatttgaggacgtccatctagagccccacctccttattaaacctgacccaggcgagcctccccaggcagcctcattactggcagcagcactgaaagaagcattagtcacaggagggagagaaggaagaggctgttcggatgtggatcccgggatccagggtgtggtaaccgacttggccgtctctgatgcaggggagaaggtggaatgtagaaattttccaggttcttcacaatcagagattatacaagccatacagaatttaacccgtctcttatacagccttcaggccgccttgaccattcaggacagccacattgagatccacaggctggttctccagcagcaggagggcctgtctctcggccactctatcctccgaggcggccccttgcaggaccagaagtctcgcgacgcggacaggcagcatgaggagctggccaatgtgcaccagcttcagcaccagctccagcaggagcagcggcgctggctgcgcaggtgtgagcagcagcagcgggcgcaggcgaccagggagagctggctgcaggagcgggagcgggagtgccagtcgcaggaggagctgctgctgcggagccggggcgagctggacctccagctccaggagtaccagcacagcctggagcggctgagggagggccagcgcctggtggagagggagcaggcgaggatgcgggcccagcagagcctgctgggccactggaagcacggccggcagaggagcctgcccgcggtgctccttccgggtggccccgaggtaatggaacttaatcgatctgagagtttatgtcatgaaaactcattcttcatcaatgaagctttagtacaaatgtcatttaacactttcaacaaactgaatccatcagttatccatcaggatgccacttaccctacaactcaatctcattctgacttggtgaggactagtgaacatcaagtagacctcaaggtggacccttctcagccttcgaatgtcagtcacaaactgtggacagccgctggttccggccatcagatacttcctttccatgaaagcagcaaggattcttgtaaaaatggctccagtatgacaaagtgcagttgtacgttgacatctcccccgggactgtggactggaaccacatctactttgaaagatttggacacctcccacactgagtccccaaccccccatgactcaaattcacaccgccctcaactgcaggcgtttataacagaagcaaagctaaatctaccgacaaggacaatgaccagacaagatggggaaactggagatggagccaaagaaaatattgtttacctctaattgtgttgtcatttttccaaacaaaacaaaacactggcacttttgggagaaactttttgtctccattccttatgtatgtgtgattgtctgtgtccaaattgctttaagaataatatttaatatttcctggaagctcatttttttggcatgagtctaattaaattattgaaagccaccctgtttgtataatctttaacttatcaaatctaatttcagatttctggaggagaaactaacttgaataagcaggactattttaaaagttgttttgacgctagagtaaaattccatgtcacattttctacccaatcatctggatttcaagattccttttaagatctcaatgaagcaatttggatttaaagagtggtattcacaaggggtgaactttcacagtcagggcagttgcctcagtgcccacataggcagaggaggatgtgggaaagggtttttctcagctagtttttgtgtgctcatttcttctgggagcattaaaagtggtgatctgttacagtcactattcaactgggcacgtgttgtgattggtcagtcactgagccagggatacagtccggacttgcttagtacctaagcctaatgctggtggggtttcaagacatggttcagcatcatcttttaacaaggcccagaggcccagagcccccatcaagtcattttgatgtaaatagtgaactttgttagagccctcacttctatcaatcagctgtcctgtccctgccagcacctggagcaccaactaccactccctggaaagaacccttccctgcagttttttaaggacaaaactgcccactcctcattaagtttgctgcctggatacacttttccacaaaggaaaactggcatatcctgccttccgagtagtatgggtctctgtgtgagaaaccaggagatattttcatcttgttcggaaatacttgtatgtattttggtgtcaataaatatcttgtacctcatta

SEQ ID NO: 1493 - DNA, 539 bp, Homo sapiens
  source 1..539: mol_type = unassigned DNA; mol_type = unassigned DNA
atacaggtatttttataaaactttcatacttagactaaatcttagtcttttgatttttattcagtttatttgaactgtggtttgcttcattaatactagtaatgttttttctttaaagatatcctagctctacttctaactgatgtgctgctctttttacaagaaaaagaccagaaatacatctttgcagccgttgatcagaagccatcagttatttcccttcaaaagcttattgctagagaagttgctaatgaggagagaggaatgtttctgatcagtgcttcatctgctggtcctgagatgtatgaaattcacaccaattccaaggaggaacgcaataactggatgagacggatccagcaggctgtagaaagttgtcctgaagaaaaagggggaaggacaagtgaatctgatgaagacaagaggaaagctgaagccagagtggccaaaattcagcaatgtcaaggtacagtgcaggcacttctggctccctggtcgtggtgttctcctgggtgttgggaaagcctgagtgtcatgaa

SEQ ID NO: 1494 - DNA, 1926 bp, Homo sapiens
  source 1..1926: mol_type = unassigned DNA; mol_type = unassigned DNA
tttatccctaggagagaaatgatttctcatatggggtcaaaacatacacacatactcagtatgtgtccattttcaatttgtcccttctgtactgctttgcactctaaatgggaacttttaaaattaaaagcttccaagggcattcacagagatctctttggttttgtggaatccttccaaatcttggtaattatttcctgtgatgttgccaaacttttcataggcagataccgtaactcaaaatgtttttttaatctggttggtaatgtcctctgggctttagagtatctattttcccttaatcatttcagcctcctgttagcgatctattaaacaaataaatttcagcttagttttttgtgcatgaccttcctgctataatacaaagatataacagtaatgagactagctttagccacttacatatctcctaaaaatggtattaactgctattcttaggcattatgttataaaaacattatttacctaaagtctccaaatagttgttttttatttttatgtcttcataatgcaatgtagctcaagtaatttctggtttgggactcaaaggaaggatactactaggtttatgtggattcttaagttctcatgaatgattgactagggagagacctcagcaagagagtgagatgtaggacaggaatgcacagccttgtgaatttatgtgccgagttcgtattcagaagactcgcttaactatcacccaaccaccagcagcaaactaccttcccacaggagaggatgatattgcttttgggctttgtttcttttctctataaattcacaggtcctacccctaggacagatgtagacacacctctctggaacgccaaaaaccttgcctttggaggtaacttagaaaaaggccagaaatattaagagaagtgaattcgggcctgcgttttgtgtttcgaggtagttccaaccgaaagggtaaacaataaccatggaaccttgtgttcagtgatttttcctctgtctgctctgacaggccgccttgaccattcaggacagccacattgagatccacaggctggttctccagcagcaggagggcctgtctctcggccactctatcctccgaggcggccccttgcaggaccagaagtctcgcgacgcggacaggcagcatgaggagctggccaatgtgcaccagcttcagcaccagctccagcaggagcagcggcgctggctgcgcaggtgtgagcagcagcagcgggcgcaggcgaccagggagagctggctgcaggagcgggagcgggagtgccagtcgcaggaggagctgctgctgcggagccggggcgagctggacctccagctccaggagtaccagcacagcctggagcggctgagggagggccagcgcctggtggagagggagcaggcgaggatgcgggcccagcagagcctgctgggccactggaagcacggccggcagaggagcctgcccgcggtgctccttccgggtggccccgaggtaatggaacttaatcgatctgagagtttatgtcatgaaaactcattcttcatcaatgaagctttagtacaaatgtcatttaacactttcaacaaactgaatccatcagttatccatcaggatgccacttaccctacaactcaatctcattctgacttggtgaggactagtgaacatcaagtagacctcaaggtggacccttctcagccttcgaatgtcagtcacaaactgtggacagccgctggttccggccatcagatacttcctttccatgaaagcagcaaggattcttgtaaaaatggtaattaacactttaaacatcatctgtatagtttgaacaagaagttgtccctctgaatggttggctcttgtgtagagtgaatcaaagtcctccctagcatgggaataaatcggtactgatgagctgg

(The sequence listing continues in the following parts.)